United States Patent Application Publication US 2007/0054278 A1 - sequence listing, part 16

SEQ ID NO: 93358 - DNA, 107378 bp, Homo sapiens
tccattctaaagatacaccattcatttttatttttattttattttattttttatttttatttacttttttattattatcatactttaagttctagggtacatgtgcacaacgtgcaggtttgttacatataagcttgtgctattttagtgtttactttagcgtttatcatatacatctttaacatgtcagagtgtatttttaagtgatattacaacaattcatgcataaaaatccttagcttccatatctcccttctaggcttttgaacaattgttttcattagttttatctctacatatatcataagccctaaatacattgttactattttgatttaaaatatattttttaagctgggcatggtgggtcatacctgtaatcccagacatatttttctgtcaattctttaaaaaaatagctccactgcctcctgccttacatggtttctgatgaaaaatctgctgtcatccttgtttttatgcctctgtaatatgtctttttttttttcttcctgtggttgctttttttttttttttttttttttttcagagttggatgggatcttatgttgctcaggctggcctgaaactcttgggctcaagccatcctacagtcacagcctccagagtaactgggactacaggcacatgccaccatacctggcttagtctgttaaaattttatcttatccatggctttgagcaatatgattatgttgggttttggtgatttttttttcatatgtcttgtgcttggtgttcattgagcttctggtctgtgagtttaaggttttcctcaaatttaaaaaatttttggccattatttcttcaaacatttttgtccttcctctttacatttctgggattccaattacatgtatattaagagatttgaagttactcctagcccttttcattttctaaagttacttttcccttcaatttctatgtctccaagtcactaatattttcttctgcaatatcttatctgccattaattccatccagagtatctttactctcaggtattatagttttaatttctaaaagttgtagtttggacctttttatgttttgtgtgtctctacttagcttgttgaacccatggactacagttacaataaaagttttaatgtccttcttactaactgtatcatctgtgtccattctgggtctgtttcaattgaccagtttttctccttattgtaagctatgtttttctgcttcctgcaagtctggtaatcattgtattccagatgttatgaattcacttcattggatactggatatttttgtattcctatacctcctctttagctttgtccttgagcagttaagttggttggaaagaatttgaaacttccaggtctcacttttaaggtttgttaggtggaactggggcagggtgtgctcagtctaggactaattattctccactattcaggcaagacccttttgtgtactctaccaaatgctcatgaattataaggttgttttccagtctggttggcacgaacaggcactattactagccctgagtgagcaccaggcacggttccctctaaagttcccacatggttctttccccagccttggataatttccaggatgcatgcgctgatcaataagtgttctgctgggtcctcaagggggacattctatagatctcttaggatctctctgggaagtctttaccctacagtattctgtcctgagacttctagatgttttgatttcctcagactctcagttctagctcctcaaaccagggagtccagcagtctctgtctgagtgtcctttctctgcgctgcaacttagaaatctctcaaggaaggccgggcgcagtggctcacacctgtaatttcagcactttaggaggccaagatggacatatcacctgaggtcaggagtttgagaccagcctggccaacatagagaaaccctgtctccactaaaaatataaaaattagccaggcatggtggtgcatgcctgtagtcccagctactcgagaggctgaggcgagagaatcacttgaacctaggaggtggaggttgcagtgagccaaaattacaccactgcactacagcctgggcaagactccgtctcaaaaaaaaaaaaaaaaaatctctcaaggcagtaagctgagtgcaatcataggaatccccttgtttgtattccagctcccagagagcaccatccttcttcacctggtgtgctgtcttaaaacctgttgttttatatattttgtctgggttttttgttgtattgtttcaggcagaagggaaaatcttgttcctgttactctatcttggttgcaagacaaagttgacatgtatccatttacaaaggaattacatgtagttatagaaaatatacagactggattttttttctacctctgatattaatctgcaacttatttggtcatttaaaaatgttttggctgagaatagtggctcatacctgtaatcccagaactctgggaggctgaggtgggagggtcatttggggtcaaaagctggagaccagcctgggcaacgtagtgataccatatctgtacaaaaagtttaagaactagccaggcagtggcacatgtttgtggtcccagctactcaggaggctgagatgggaggatcacttgagccccggtaggtcgaggctgcagtgatctttgattgtgccactgcactctagcctgggtgacagagtaacaccttgtctcaaaaaaataaaataaaataaaataatatttttgagtttatatcgtgtaacttctgtaaaatattctattacatgaatgtgttgtatcatatttacccataccccattgatgaatgcttaggttatttccaatctttgttattacaaacaatgctgcaaccagtgtccttatgcatgtctccttgtacccacatgtaagagtttgcttagggaaaatacatcggtcaaattcctctacagtgtaatcatatcaatttatattcctacaatgtatgagggtctatgtctctgcaatcttgccaatatttgatatgaacaagctttaaaaatttgccgatcggttaactcattagtattttaatttgcatttatcttatttctagtgggttaagtacctttttcaatttttttgtttttaaaagatggggtcttgctctggagtgcagtagtgcaatcataggtcactgcagtctcaaactcttgagctcaagggatctgcccacctcagcctcccaattagcctgactacaggtgcatgccaccatacttggctaatttttaaatttttttgtagagacaggatcttgtgtattgcctaggctggtctcaaactcctgggctcaagtgatcctcccacctcagcctcctgagtagctagattacaggtctgtgccactgcatctggctaattattattattattgttttttgtagagacagtgtctcactatgctgccaaggctgggctaatctcaaactcctggcctcaagcaattcctggaccttccaaagctcctggcccattttcagacaataattttattgcctatttttacttcttctagaaattttctgtttagtctttgtttacacttatattgaattatttttattatattttaacttacttgaaaaaatgctttaaaatttggatactcacctttgttatatagcaaagattaataattaatataaattaatttatccaagtctattccctgctttagaacttctcttgtcttgctgcagataatttaaatttgtatctggttgggtttatcagatttttattctatgccttttgattcttttttttttttttttttgccttaagaaagctcttcctggccgggcgcggtagctcacgcctgtaacctcagcactttgggaggccgaggtgggcagatcacaaggtcaggagatcaagaccatcctggccaacacggtgaaaccccgtctgtaccaagaatccaaaaaaattagccaggcgtggtggtgggtgcctgtagtcccagctactcgggaggctgaggcaggagaatggcatgaagccgggaggtggagcttgcagtgagccgagattgcaccactgcactccagcctgggcgacagagcgagactccatctcaaaaaaaaaaaaaaaaaagctcttccaggctgggcatagtggctcacgcctgtaatcccagcactttgggaggctgaggtgggcagatcatctgaggtaaagggttccagaccagcctggccaacatgctgaaaccccgtctctactaaaaatacaaaaattagttcggtgtggtgacaggtgcctgtaatcccagctatttgggaggctgaggcaggagaattacttgagcccaggagacagaggtttcagtgagctgagattgtgccattgcactccagcttgggcgacaagagcgaaactccatctcaaaaaaaaaagaaagctcttccttttaccaaattgttaagagattctcttgtattctctcttaataatttgaaagttaatgttttacaattagatctttaatctatccaaagcttacttttgtgtatagggtgagacagaaatataaattgcattgtgtatgtgtgtgtgtgtgtgtgtgtatcctcccaacaccatttgaactgtcttttgaccatttaaatgtgtctatcatttatcatattccaaacacatacatgagtctgtgtcttacatttttgttctgttccattaatctttttttcacttttcttgtaccaatattcagtgttttaactactgttgttttatcatatcttgctatattgtaagacaaatccttgttattctttctcaaagtgatcttgaatttactctcccatatgaattttgcaatcagttttatgttccaagaaagtcttgttaatttggttgagttagcattgaatctgtagattaattaaggaatcatgactatctttacaatattgagacattttatccattaacatggtatagcttgctattccgtcagatttctttttatgtttttcactaaagctttgtagtatttgcaataatgctctcacacagttttattgaatttatttctagttactttatagttttacttgttgatttaaatgggaccttccccccgcacccagttggatattgttgtcatataagagagctcttggtgtttgataactccccaccaagctatattcacttattagttctaatagtttctcaggtgactcacttggatccaagtccaccttcttgtcttagctcagaataagttctaaatgacaatttgttaaatgaatttttaaagtgattgatcattttgtagattcctgagttaccagtctgagcctgtgttctccattctgggagtagaaagctactgaacgctagctatggtcactgataacactagattgtttttccatttgtccttttcttgcaacagcaataaccaaagcaaacatccctcaaaaaaacttctctagctgaatttcattacttgggtttcaggttttaatatatgaagttcatcttttggaacagattttatctcaaaatctgaagcaagaaataaattgctatgtatgaaggcattcactaaaaaagcagctggaaatggtgctgggtgtgggagcacccatgatcaaggcaccaggaacacctgcaaggttgtgagtgaggatcccgaggctacaggaggatatgtagaataaaagtgccctctgcacagccacactttttcaccccatcccatccctcctctctgctctgcacctaccactccccacccagggcattctaagtgtgtttagcaatacaccatactaagaatcacccacactttgccattctgtttgtgggaaaccaaacactgctcatgcttctagtgagtaaacaattcaaagtaaactgcaagtagacaagagagatttaatctcctgtgtgaggaagggtattgcataagtgaagagaggaacttaagattcatgcttaaatacacgcactggaatgctgtgtctctgacaaacagaaatcaaatcagcacaaaggtaatattttacttaagcttctgtccctctgttgacattttggaataaaactttccagataattttatgtatgtatgcaaaatctacaaggcaattgactcctgtataataatgaatgcttaagaaggtaacaagactaggcatggtggcccacacatgtaatcccmgtactttagaggccaaggcaggtggatyccctgagcccaggagttcgagacctgcctaggtaatgtagtgagactcctgtctctacaaaaaataaaaataaaaaaattggccaggcgtggtggggtacatctgtagtcccagacactcaagaggctgaggtggagggactgcttgaacctcaggacgacgacgctgcagtgagctgtgatcatgccactacactttgcactccagcctcggagacagagcaagaccctgtctcaaaaacaagaaggtagcaaaagaagatttaatattttctgataggaatggaaaaccaaacatcgtgtgttctcactgatgtgtaggagctaagctatgaggaygcaaaggcataagaatgatacagtgaactttggggacttgagggaagagtgggagggggcaagggataaaagacwaccaatatggtgcactgtattctcctcgggtgatgggtgcaccaaaatctcacaaaccaccactaaagaacttactcatggccgggcgyggtggctcatgcctgtaatcccagcactttgggaggccgaggcgggcggatcacgaggtcaggagatcaagaccatcctggctaacacggtgaaaccccatctctactaaaaatacaaaaaattagctgggcgtggtggcgggcgcctgtaatcccagctacaggaggctgaggcaggagaatggcgtgaacctggtaggcggagcttgcagtgagctgagatccagccactgcactccagcctgggggacagagcgagactccgtctcagaaaaaaaaagaacttactcattaaccaaataccacctgtaccccaataacgtatggaaaaaaaattctgatatgtttctcctgcatttggatgaggatgtaaattcaactctaataaattacagtgtatcaaaaggattaaagggtctctccctgcattctctcctagctctgttccatcctacacacagctgctggattaatcttccaaaacaccaattttctcatgccacttttcaaaaactagcttcctggcttcctgttgtctaaaaactagtttcagatgcttttgtctggcattcaagaaggtcagtagtctagagcctcctaaatgtttcactcctgctccttccttctaccacttaccacctgtgtgctcttgggttagwtattattattattrttattattattattattttttgagatggagtctcactctgtcgccaggctggagtacaatggtgtgatctcaactcactgcaacctccccctcctgggtttaagtgattctcccacctcagcctcctaagtagctgagagtacaggcgcctgccaccacgcccagcttgggctaattattttaagaccggyccccctgtccctgtaaagatcccacgcacctcctccactcagtggctcactgtagcaatgccctgaaaggctgtaattgagtcatattccagcccctggactcaggagtcaggggtgatrtcgccaccacctaattgcttggattgaggatgggaacagtgattctcaagaagaaaacttggacactattaccagaagttagtacaactgccttaaagcactctgggcaaaatttaacaactgtctgttccaaaaatgcagagacatggaaacttagtaactcttgttggggcatcttccatcacatatgattcactaagggtatatcaagcaaattcaactgtaggaactggcacattctgaggcatagggtctcttatgttcctaaatttatattttaccatcgtggttctagccacttttctgtagatcagtcccacttgagcagcccagtttgctgggttttatctgtatggaatgtacatatcctttgaagtaagacrcatgtggttcaataatgtaactttttagattgcagaaatttcactgtaacacttacctcaaatggcataaaataagcaaaaacatgtattctgtgatgaatcaaacaaaatatattttgagttgttgtttcccccatttaaaacagcacatttctgatcattgtcatctgtttgtgaaaagacatgagaccaacagtcctttccacacttacggctgcagccttgtgcccatgagttaaagcctcggaatttgcctgaaactttccctgtcaatccgagatggtcatgaccaagccactttgcttccatacatcttcagtgcctccttccacacacacatctttcctggtttaaactttcatttctccagtwctatagcaaaacagtatttgcaaatctcttttgaccacaaactcctaacagtcagggacttctcatttggatttccccagggcttggaattttgtttygttcatggggaggggstgagatttttaaaattgcattaatgaatgaaaccaatcaatccattgctccatgctgtgtacaaacactgtaataaatattggttgacttcttataactaaggcaataggagcttctctcaataaactaaattccaaggaaagaatgaaggtaggaaagtagctggtttatttgcacctactatatgacaggccttagtttaggtttgtttgtttgcttgcctggagacagggtctcattctgtcacccagtggtgtggtctgatcatagctccctgaggtctgtaactccttggctcaagtgaccctcgtgcttcaccctccgagagtagcagggactacaggcatgtaccaccatgctcagctaattttttttttttttttgtcagagtcttgctctatcacccaggctggagtgcagtggcacaatctcagctcactgcagctctgcctcccaggtttaagcgattctcctgcctcagcctcccaagtagttgggtgcctgccaccacacctggctaatttttgtatttgtatttgtatttatttatttatttatttattttgagatggagtctcactctgtcacccaggctggagtgcagtggcatgatctcagctcactgatcctccacctcctggattcaagtgattctcctgcctcagcctcccaagtagctgggattacaggtgcctgtcaccacgcccagctaatttttgtattttaagcagagacggggtttcaccatgttgggcagtctgatctcgaacttctgacttcaagcgatccacccaccttggcctcccaaagtgctgggatccagctaatatttaaattattttgtagagactgggtctcaaaatgttgcataggctggtcttgaactccttgcctcaagcaatcctgccaccttggcctcygaaagtgctgaaattgcatgtgtgagccaccatgcccagccagtattttcacataaacattatttcagtgaattctcacaatcctgcagacacttgcagactcagttttggtttcttacttaatgtaacacaaccttagagtgacaggtccatcagcgaaatccagcatatttgactccatgattaccaaatgcactatctccatttattggaaaaggaaaattggaggtcactcaaagagcagtgaagttatggaaatatgaaatttttcacatgactctgagattgagtgtttgggtactatcgggaaatgttaaaaatgtccattttcttttctttctttctttcttttttttttttttttttttttgagacagagtctcactctgtcgcccaggctggagtgccgtggtgcaatctcagcttactgcaacctccacctcccrggttcaagcgattcttttgcctcagcttcctgagtggctgggagtacaggcatgtgccaccaatccagctaagttttttgtatttttagtagcggtgrggtttcatcacattggccaggctggcctcgaactcctgacctcaaataatccacctgccttgggctcccaaagtgctggggttacaggtgtgagccactgcacccagcccaaaaatgtctattttcaatagtggtttaaaacactcttggacagcaaaagaaataaaagttgaaggacattgtgacagcaaattgattgtatgggaactctggtgaatgcgaatcatttttaaattactttttttgtaaagtgcaaaacaacaatagcacccatttgcgtcatactttatagttcgcaaagcacatgggaaaaataaaggtaatgatggggatcgttgcaattcataggaaaggaggcacgaggaaatgaaaatgaaagggagtaataactacgtaactagtcaatcttccttaaaaaaaaaaacccttaaaatataccaccatcttctatttgatataatgcagaatgggaatgataaaaacatgaattacatttcagagtttcaaaaagcaaaccagctttakagcaatgcttgaggttgggctgctaacaagctcactcaactagtgtttcctgacggccaacgtcagaataattccatctccatgagaagtacagaaagaaccacaaaccaaacctccaaattgattctaagataaaatacccttaaaaaaaatttcccttcctatccgaaggcagaccaagaggaagtttatcctcccacctacaaattccccagagagctttcatctagaaggtttgactctggccagacaaccagcgagcatcttctcgcaatctgttgcttcttccatggcaaactccagagaattaagaagccaaactcaacatcgccatgggcctcaggacgactaaacagatrgggagaggcactaaagctcctggtcaccaagagggtatgtaggcatttgctgtcttcctggatttctcagagctgagtttttagccagaggttgcttatttacgataattcttggatatattatacactaaatactattattatctttttcgacccracttttatctttctgttcttatgtgtgaaggcagagaaagattatttagagctcttcaaagattcctatttaatttaaaatgcctgtcgccttcctataataggcttatgatggatgatagctttagttaaaatgtagcaatcttaaatatattcttcataaccaattccaacgtgttctcacttaagtaatgggtataaaaccccacttaagcgtaatattttaaatatttgaagccatcttttctgagagaacccgaagctgttttttctagagaagctgtgagtgtgtattgggcgacttctgttcactccttttctgcagcactcaccctggaggtcatgtagtaactaatgccaaagaaaaatcaaaatagaaagtaccagcgtgtgccatcatgcagcggcagagcctgcttaaagatcaggaaatttgtctaaatatcagatcgccggcgggcatctcagcccaggcctgtgtaaggggagttctggtgtctcagctgagggcgtgagtagggagccaggaaagcgacccgcgactgcagccgtttcttaaggccagtccttcgctcgcagtctgtcccgggcggcagtcgtgtcagccccccgctaggacccgcccagggggacgtgggtaccgggcaggacgcgcgctctgggcgctggggacgcccgggacactcggggccccgccttgcgtcccagccccgggtcgcggcaccccggctcccgccccgcgcctctggagggaggtaccgagggacgcgcagcgaaggggctttgctaattgccaaagcaggaagtgagctcgtggaagaagcgaaggaggagaagaagaagggaggggaaggcggaggagggcaggggcgcgcagagccacggtttgctccaggcgcgtcggaaccgcaggacttttcatccccgtggtcccacggtcctcccgcgccccggaggcctgccagccccgctcggacgctcgtttgcccctaacccgccgccatggcttcaccggacgaccctctgcgcgcaggtaaagggacacagcgccgcgcccgctcctggagcgagcaccgcggggcgggagctcgggaggcgctcgcagcagccgcagggctatcgaggccgggcctcggcgacccccgagggaggcccgggaaccacccccgacccaggcgccagacccggagtcgcacggggctcccagtccagccccgcgagcggctgctgaccgcccctcccgcgctcgccagggcccctgccccgcgtcagccaccgcgcgccttccccctgcccatgccgcagcccccgtggcttttgttctggactcgggatgccaggttgagacacgtcctgcaaacctctggcagaaatgggcgcaagggggtggatttcgttttcgcctcccgggctttttctttctccccgctcacatgccttctcattactcctcttcctctctcccattgcactttgatgaaatggttttgtctgtctaaacattggccctcggagctatttcatcagatagtatccgcagaatcgagaggcggatcccacctgtgggatcccatctgtgattagaatggcctctagttctgtctttattttaaaatattgtgtgttggtacccgaggtcggagtggagatttttctctattctctcacgtgaatctaaaatccgtcccagacctcgctttcctggagttctctctctccgctgtcctataacctagacggtgacatccgtgggtgtttcttgaacacacgaatgaatgatctatccctcagagtacactggggctttacttggttttgttgaggttggaaacactgaagagagttacacagaacctgatataaccgtttagataaacgcgtttcctatttcatttcttgagcttgggcaggggccgagtttgaatgttccatccttaaattgtggcttcagcagtcaaaaggagacagtgtgtctgcaggtggtcagaagactacacccaacaactaagttggcattgtgatggctgggtttgggggcgtttcttggaaacttcaaagaaagatctaccttttttttttttaagtggggattgttaaacattttatcaattggatgcggaaaataaatacattgtctagatattcttccccatccccatacctattgtttgaaaaaacagaaggggaaacaaagggagaaaccctcctactgccccatcccactccactcctaccctagcatccacctccttttctgagaactgaattgacaaggtgccaaggggtgttttaggctggattttactactagtggcctcagatctcattaaatgatgattgcaggggtggggggtgggggaattcaaaaagatcttgagagagatacactgcatggagataaaatgtaaaatctacttgggctcccctaaatcgacagtaccaggcaagatgggggctgggaaacagctcagcagtgaccacagtgtgtaaaaagctcagtggctgggtgcagtggctcaggcctgtaatgccagcactttgggaggctgaggcaagaggattgcttcaggccaggagtttgagatcagccttggcaacatagtgagaccctgactctacaaaaaatagaaaaattagccaaatgtgccagtgcatacctatagtcccagctactcggggggctgaggcaggaggattgcttgagtccaggaggtcgaggctgcagtaagccactgcactccagcctgggtgacagagcaaaaacctgtatctcaaaataaataaataaataaataaaaagctacaggttccagatttcccaagatggtgttcttagtctgcccagcccagccaaaatggatgtgcacaacctggaacaaatgggcaacatggaacaaagggatttcraaatcccaggacatgtggaggagtgagaggacagaggatatgatgataagagggcgtcatgtggaaagaatctgtctctttgacttcaagaggtagaacccaaacctgtcggtgaaaactttagagagagatggatttgggcttcctacaaagagaaaggaggcctcctaagggtgagagctccccaccagttggcagaggatgctgaagaacatacttgaccatctgaaagatgatccaaatgtccattcccgctctgggactctattctgtctataaaatgagcgctcctccatttaaacacaggcgcacacacacaccccaatttccccttcctaacatattgtttcgtttctgcaacccacaggagacatccccttactcctatttctgtaatgaaaccatagatggtgcccatatcttgagctcgctttaccccagaccaagtgaccatactctctcgcctgatttcccacactcttctcccgcctggtgttttcacaccattccaacgtaggttttcacacccactcttgccttctggtaacctattctgcaaaaggttgccagggccatcttttattttatttttattattattatttttcaagatggagtctcactctgtcacccaggctggagtgcagtggcgtgatccccactcactgcaacctccgcctcccgggttcaagagattctcctgtctcagcctcccaagtaactggtattacaggtgcacactaccacacctggctaattttttgtatttttaggctggtctcgaactcctgacctcaagtgatccacccacctcggcctcccagagtgctgggattactggtgtgaaccactgtgcccagccagtygtcttttaaaaacaaatcggattctgccatttgtctgtgctggctttgaatccggtgctggctttccaacactccgacagatcctcagtccttgaggcttacacactctgtgcaatcaatccctacctgttccttcacttgcctcacctgacacctagcttgacccctgctctctgcacgcagccgtgctgcctcctttcatttccttgaagcctcttgcaccctcgtgcctcctggcctttgcaaactttgttcctgcggcctggaaggacccctgcattccagccctcaccccatcctccacccacccgtttccttctacttaacctccagatttcagctcataggtcaccgggatccagcccgatgttatacatgctcagcaaaccctgtacctttcctttctggcacctgtcacaatttctagctgtgattatttggccaccgtggctatttccagtaggaaataaactcgtggacagaggtcatgtctgtgtggtagctctccctaacactcagcatagtactccgcacatagtaagccctgggcaaataccacctcagtgaatgaaggaaggttataaaatttaaccacaggctctttaaagagttggggggagaaaaagctcttcccgtattggcattttaggaacttactcatcgagttagccgtattaactaagttttctttgtaaagttaaagtaagatgtttgtatatccacgtgcatataacaaaagtatgtatatgattatagtatattatgagttaattgtatttatttatttattaatttttttgagacagaatctcactctgttgcccaggctggagtgcaatgatgcgatcttggctcacggtgacctccacctcctgggttcaagcaattctcctgccttagcctcccaagtagctcggattacaggggtgtgccaccacccctggctaatttttgtatttcttttttagtagagacggggtttcaccatgttggccaggctggcctggaaccmctgacctcaagtgatctgactgcttcagcttcccaaagtgctgggattacaggcatgagccaccacgccctggccacaccctggccatgagttaattttaagtgactttttacattgagaaaattcacaagactgtcacagtcacatggaaggaaaacaatgatgktggttatagtgtagctatcaccctgtgtctctcccactgagaaacagtctcacaatggatgagccagatttgtctgtcaaatgtttgtaaaatctgtttgttcatgattgttcatacagatagattttacagacagaaacaaacaaccgggctttgaaggtctgggtcaaaggtggcacaattccttgcttcgttgcagtaaggcaagtgccgacggccacagagcattgcaaaagagcacattctccctttgttctgagactccacaccgcagggctgtttcctgggggaaccctgggcctgggccaccaactcaggacagccccagtggtggcattcacctctcactgcccctcctgtgggcttcaatgggtccaaggtggcaacctaccctcctgtggcattgggygcagtacccaggactaaaggataaaccacttcctggagcactcatatgtgcaaagctggaccagccaattctttctgcagatacaccaaagagagggatggcaatctgtggttttcccttctctgctccttctgccctttctctttctcctccacgtgggttttcccaatgctcacttcatttctcttcctttcttacaacgcctctgctttgtgagtttccttctctctacccaagcattttccctgagctttatctctttgtttgctgtcttccctcatcctcccctgccctcttctgtttgatcccccgtcagtagcctggctgacacacttaatgctcggctgccctccagagaggttgctgtagggatgtacttctgtgatccttgcccctttcccagcttgttcagcccctgctgcggggtctgaggttgacagagtagccgaggtcagggtgaggtgctgaaaagacagaggaagctcaatgaaacagtgtcagcaccaccacgcagcagcacccctgcagctctgagagcttctggaatcctgaatatgtctcaggactccagaaaaacttccttttgttttttctgtctcgctctgcactcaggctggagtgcaatgacacgatcttggctcattgcaacttccatctcctgggctcaagcaatcctcccacctcagcctcctgagtagctggggccacaggcttgtaccaccacacccggctatttttttttttttttttttttgtatttttagtagagatggggtctcgccatattgcccaagtaatctcctgaactcaagcaatctgccctccttggcctcccaaagtgctgggattataggagtgagccaccacaccccacctccaagccttttttatatccaataatgacaatagcagtcaaaagaaaagttatgggctgggagcggtggctcacgcctataatccccagcactttaggaggccgagggaggtggatcacctgaggtcaggagttcaagaaccaggctggccaacatggcgaaaccccatgtctaataaaaatacaaaaattagctgggcacctgtgatctcagctatatgggaggctgaggtgggagaatcacttgaacccaggaggcagaggttgcagtgagctgagatcacactgctgcactacagcctgggcgacagaacaagactgtctcaaataaaaaaaaaaaagctatggtacaaaacaacacacaaataacaaatgagaaagaaattaatcctgcaatcacacattcaaataattgcctgtaattcttcactagaaagcacagtgactgcacttttctggctcaggatgcttgggaaggccaggaagtcctgacatacttccttgttttctctgaaaggacatctttagagatgtttgaacttcctttgagaaaccgtctctaggaagcattcaccgctatctgatgtcagaatgcggcagtgcagtcctcggccgccccaccagtgtctgtttcgggttatgtgctgaggattctttctggagaggctgttgcatacagtacgtgtttcccagcattcctgaagaggctctgatttggtagatgatgggatttgagtctttgagttgaagaagagtagatgagatttaggatttagagtggatgctggaatgattaacgcttttggggatgtcgggaggaggcaaatagattctgcatgtggaaaggatgggcagggggcagagtgtgaactgttacgggttgaattgtgcccctctaaaaagatatgttgaagttggaattcctagtacctcagaatgtaactttcttcggaaacagagtctttccagaggtaaccaattcaaaatgaaatcatcagagtgggctctaaaccaatatgattggtgcccatataaaaaggggaaatgggacacacagacactcaccttctcaagagagtctgtcgggtggtcagtgtatgaaccacttctattttattttgagaccaagtttcgctcttgttgcccaggctggagtgcagtggtgctgtctcggctcactgcaacctccacctcccgggttcaagcgattctcctgcttcagcttcctgagtagctgagattacaggcatccatcaccgtgcccagttaatttttttatttttaatagagatggggttttcccatattggtcaggctggtctcaaactcctgacctcaggtgatctgcccgcctcggcctcccaaaatactgggattacagatgtgagccactgtgcccagcccacttctattttaaattttattttattggccaggcgtggtggcttgtgcctgtaatcccagcattttgggaagccaaggtgggttcaggagtttgaaaccagcctgggtaacatagtgagacccccatctctacaaaaataaaaataaattagccagatgtgacagcacatgtctttagtcctagctrctcaagaggaggtggaaggattgcttgagcccaggaggtggaggctgcagtgagctgtgattaagccactgcactccagcctgggtgagagagtgaaaccctgtctcaaaatttttattttattttttattattttaaataagtagaaatgaggtctcactgtgttgcccaggctgttctcaaacatcctgaactcaagcaatcctcccaccttggcttcccaaagtgctgggactacagatgtcagccaccacacctggccatgaggcacttctagaacctgattatactggaaaacaggcagattatgaagccagaaagtcccagatacaagttctggcttttccacttacctcttaccctgtgatcttggatactcaatgtgtgaaaaaggggatgcctaatgccttcctcagggttactggaaggcttagctgagactgtgtgtaagccatgccatgcagagcagacgctagggaagcttttaaacttttcaaacttgtcttgtcttttcttttttttttgagacagagtcttgctctgtttaccaggctggagtgcagtgttgagatcttggctcaccgaaatctccgcctcctgggttcaagcgattmtcctgcctcagtgtccccagtagctgggattacaagcatgtgccaccacgcctggctaatttttgtatttttagtagagatggggtttcaccatgttggccaggctggtctcgaacttctgacttcaagtgatccacccgccttggcctcccaaagtgctgggattacgggcgtgagccacctgttcgaacttttctaagtgagagctttgaaagcttttttcttttcttttttctttttttgagaaggagtctcgctctgtcgaccaggctggagtgcagtggcgtgatctcgactcactgcaacctccgccttccgggctcacaccattctcctgcctcagcctcctgagtagctgggactacaggtgcccgccaccatgcccggctaattttttgtatttttagtagagacggggtttcaccaygttagccaggatggtctcgatctcctgacctcgtgatccgcctgcctcggcctcccaaagtkctgggattacaggtgtgagccaccacgcccagcctagagctttgaaagtttaattgtgaactttcagcttggaggtgctctttgacccatgtggatactactactcaccactcacggacttttaaagcaggaaggggatgcagaggtgctctgttcacctcctgagatttaagttggggatttaggacccacagaaagaaaatgagggtgcagcccgccctgcctgctctcacccgcagcctctgtgagccaggccaggtgccctcgccagccctgatgcatcagttcaccaggtttctctcatgccttttgaggaactttccagaatatgcttgagggagttacacctcattctcactgccggcagagatatccccagcagtcagttaccagctaatttgaggtgatctgagccttgtgcagagtcaccgacctgggggagcccaggcagctttggcagaaaagcacagcctggcataagatggcagccatgagcagaggacagatcccgcaccggccctggcgaaaccactggccttgtctccgatgggctcacgtggccccgcttctcctctgctcctctgcmcgtcctattagatatcagagccttgcctgaaggctcagcctgctgttaggcgggggctgggaaaaacaaacattttaaagcttctagataaacgatttgattttacacttaatagtatcgtaaacatgcaactccaagttcctaagaaagaccttagggcagctttccacttctgaatcagtctcaaataaccaggatctgctctcctccaaataacttccctggtacacactcacatctggacctgtgagaacaaaaggagtctgccaggatctaaaataaaggccagggagaaggtgcagtttcagatacagtgcatgggcgccacygtgggcctgggtcaatgagtgtatttggcagtaacatgtatgtaagaacttaatccacagcttgatataaggcaaaggctgataaagtcagaaccgcaatcagaaaaatcataaaagacctgactagcctgggcaatatagcgagaccccgtctctacaaaaaacagaaacaaaatcccccatacattagctgggcatggtgacgcatgtctgtggtcccagctacttgggaggctgaggtgggaggatcgcttgtgcttgggaggttgaggctgcagtaagyggtgatcacatcgcggcactccagcctgggtgacactgtgagacgccgtctcaaaaaaaatgtctggcgcggtggctcacacctgtaatcccagcactttgggaggctgaggtgggtggatcatctgaagtcaggagtttgagaccatcctggtccaacatggggaaaccccatctctactaaaaatgcaaaaacaaatcgggcatagtggtgggcacctgtaatcccagctactcaggatgctgaggcaggagaaacgcttgaactcaggaggcggagattggagtgagccgagatcacgccactgcactccagcctgggcgacagagtgagactccatctcaaaaaaaaattaagtaattaatttttaaaaaaagacctgaaaatgcctctaacacctgttctaaaagtagtgcctttcccagttcccctctcacttcattgttgtgcttcagaaaacaaaaaaacctaaattctctgtgtctttctcatcttaagttccatttattctgagatgtcagaccgaagcaagagactttgtgcctataaacctgtgatgtcttctgtctctatcttgttggcctcataaccctccaacacaagccctgggatctcacagaactcggtcagagtctgaggagtgttgattgaaattcacccacccaggtggttcccaaatccagaataatggtagtaagctgagtgtgggatccggagacytggaactcctcatggtgcagaggaagagcccgaggcttagaaagcttacgtgacttctccaaggtcacacctctaggcttgtccaaggccacagctctagacttgtttaaggccagactgctagstcttagtgatgtgccactgaggaccggtccttccttgcttttaactgtcctgtgtgtgtcctcaatgatgcttttttgtggctctgcctttcccagcgatctactgcattttcctctccttcctttctttttctttctttctttctttctttctttctttctttctttctttctttctttctttctttcttttctttttctttctttctttccttccttcctttccttccttccttccttccttccttccttccttccttccttccttccttccttctttctttctttctttctttctttctttctttctttctttctttctttccttttttttttctgctcattctaattttcctgtaggaagcaggattaacttgtcctggacgcagcgggcattgtttgcagaggatggtgtcagagcatttaaagcccccagcctcaccccacccctggctccacactccaaacccatttacctgaaatttcactgtgttgatgctattaacaagccacactcctggcaggatggcatttttaagccgtatcctccaggtaccctgtagtgaagatgaaatatgtgagactaggctgtgataggaggagggagaagggacttcgggctattttgtggtggcttctaccaccccctccccagctaggaaccagcgtgtgagaaggatgggaaggaaaaactggaaaaccgaatgcacgtgtgtccggctgtaaggactcatctgaagcatcgtcatatgtcacttaacaacagggatacactgtgagacatgcatcactacatggtttcgtagttggtgagcgtcatagagttcacttacacaaacctagatggtgtaacctacaacactcctgggctgtttggtacagcccattgctccaggactacacacctgcccagcatgggaccaccctgaatacagcaggcggctgtaacacagtgctatttgtgwgtctaaacatatctcaacatggaaaaggtatggtgagaagatggtggtctaatctttatgggaccaccatcatatacatgrtctgtcctgtgactgtacgttaatgtgtcatgttctctctcttctctgtggctgtgctattccctctgcctagaatgcttttccctcgctaccatgtcaactcatccttccagactcagccctcaggccctctgcaggctcttctcccacccctcctctctccgggagctccccaggctgcgagtgctgggtctgggtgtcccctggttgtcctgcactgccactgccttagcactaagggctctgtatcattacttgttgcttgggcagtaagagttctgccatctcagggaggcattagcaacacaatttgtttktcattttctttctatccatttaaatccaaatctgagtgtgtattgcactggactggcaggaaattccacttcagtcagaactggggctctgtcccttagggccacacaggaatctgaggggttcatgtggtgctgggaaaaactaggaaaggacctcaaatttgtagtgcatcagggaggcattgctgtcttatggtcctggcctgagaagtcccttgagacccagcagccctctgtttctgtgctggacacagggcacaggtctctttgctggkgctgggccgcggtccccgggggttaggctgctctgtgctgtctctgatgcagtcttgccaccttcatgctctgcagatgtctgtatcctgctccatgggaggcaatggcaaaggctctctccattcgtccccatttctcttcagtgactggaggctgcataaaacaaagagatgttgccttctcgaaacttctttgggcattatcaacacctgcagggcaaagaaactgtggaaagttcagacacattctcagctgggaaacacctaggaagaacacacacaaattattatcttgacaaattgtcctgctgtgcttatttggatccccaaaggcattcccaggacctaattcctagtctgcaatatgtacttaatgaggatttggatcaaaagtgaatgctgactcttggcggacccacgactgccacttagggtactgcaggtcgttcactgcacaaatctggaggatcccacgcaaaaagatttgattatttactgagacagctctctggcagatgtcttataaagcattttggagatgggaaacttttctaatttgtactaattaggtcctgactgaggtctgtgcctttttccgtatttcccctttaaattccttcaatgcatcaagtgataaagtatcagaaacaaaatattgagaaatcaagattatttttgataaaaaactatggttttttctttattagtccacataaacaacattcagaagattaagaaaaatgagttgcagcaaaataggaaatcaggaaagaagtagattcagaatggagtcattcctgccgaaggtagtgtcaaattcagtaggcaagagagtcattaatgtgatgmctgcatagtttgtggttgtttgtaactctgggtatttgaagatatttataggtaamctgttccaaaatatggtggggttttttatgtagttactttttatatttttaattaattaatttatttttttgagatggagttttgctctgtcacccaggctggagggcagtggtgtgatctcagctyactgcaacctccacctcccaggttcaagctattcttctgcctcagcctcctgagtagctgggactacaggtgtgcaccactatgcgaggctaatttttgtatttttagtagagatggggtttccctatgttggaccaggctgatcttgaactcctgacctcaggtgatcygccyggcttggcctcccaaagtgctgggattacaggcgtgagccactgcgtctggcctatagtttctttttattaatctmtttcttgatgcaatctgaatctgttcctctttattttgtctcaactaataattggaagtaagactttcaggccaggtgcggtgtctcatgcctgtaatcccagtgctttgggaggctgaggtgggaggatcgcttgaggccggaagctcaaggttgtagtgagctatgattgtgccactgagtgtactccagcctgggctacagagcaaaccctatttcttttttctttctttctttctttttttgagatggagtctcactctgtctcccaggctggagtgcagtggcactgtgttggctcactgcaacctccgactcctgggctcaagcgattctcctccctcagcctcctgggtagctgggattacaggcgcccacctaatttttatttttattttattttattttttagtagagacagggttttaccatgttgaccaggctggtctcgaactcctgacctcaagtgatccacccgccttggccttccaaagtgctgggattacagcatgagctacctcacccagccaatcctatttcttaaaaaaaaaaaaaaaaaaagragtaaggttttcttcagcctaagtaaaattacttgcctctgtatagagacagttatcaaaggactcatttgtggttttaaattaargcaaacccgctctatttgtttgtttttgttctttttacagatcatatggtaaaggaaccagtggaagacacagaccctagcactttatcctttaatatggtaggtgacaaattttacactaatggtgataattattgttttgctttttttctttgttatttctttacgtttttattactcagtatttacatgtgcatcagaaaccccaaagtaagatttttctaagataactgctttatcttggtattctacgtgataataataaactttgggtttctccaggctaaaaatggcgttagattcttttcttcttttgctcatgttggaggtgatattacattatgtgagggctttacccacttccctggkttttttttatttcatttttcatttttatttttttttagacggagtcttgctctctcacccaggctggagtgcagtggcgcgatctcagctcactgcaatctctgcctcccaggttcaagcgattctcctgcctcagcctcccaagtagctgggaccacaggcatgtgccaccatgcctggctaatttttttttttttttggtagagtgggggtttcaccatgttggccaggctggtcttgaactcctaacctcaggtgatctgccaccctcggcctcccaaagtgctgggattacagatgtgagccaccgtacctggcctacttgcctgtttttaatactactggtctggtaatggagcagcctgggatgccagatggacacacgctattggatttacctcagttacagcgtttarttctagcagctgccttctgagccacatcctctccccaccctcccgtaaccattctgaggctattgctttaagggtatccaaagatttcacatatattggttttttaaaattcattttatggttttattattattatcattttaatttcagattccatgggtacgtatgcagctttgttacgtggatgcatagcataatggttaggtttgggcttctcataaatccatcacccacatagtgaacgctgtacctaataggtaatttttcaaccctgagccctcctcccaccctccccccttttggagtccctagtgtctgttatttccatctttatgtccatgggtacccattctttagctcccacttataagtgagaacatgcagtatttgattttctgtttctgagttatttcacttgggatgatggcttccagctgcatccatgtggctgcaaaggagagaattgtgttcttttttatggctgccatcattatttttcaacctcccaagatcctcccaaccatcccttgagatggtggggcacgtacccccatcctacagatgcagaaaggacagttaatggaagtgtgccgccacctagaccggagccctgtgctcctgcccagcactgcttcttgctgagggccaaagcggtgctctctgtcaggcagcgtgtgtgatgggcatattgtgtaggacacattccttctgttccagatcctcagaggatgggatctaccaactcatgaaaagttttggttaactgatttagttacagcgacacagaatacacttcatgtaattcaactaaatgtctttaaatcttaggtgtcttgcggacctgaggtgtttgttttcctgtcctttaattacccctggcttggtaaattgtagacagcgtagggggtcaagctttgatacccactggaaattcctatgaaaaattctcagtctcttcactctgatcaaaatggaacgaagaacaaccctgtggccatggcttataygtctctggagtagcttgttactaaagcctttggtttctataaagtgttattcagtttgccttctttcccttcccactgcccccacctgtgactctccagttctccctggtatcctgcttacttcctgataccaggttttctttccctcccttggagctatgtccttatgctcaccttggggctcagctacctctaattacttctccatgctggggacaaagtgatctttccaaagtgtccctcttactagtttcttagggctgtcgcaacagaataccacagactgggcagctttcacaatagaaatgtatttgctcctggttctggaggctggaagcttgaaatcaaggtgtcctcagggccattctccctctgagacccatagggaagaatctttccttgtctcttctagcttgtagtggttgccagccatcgtggaaactcctcagcttatagaggcatcactccgttctctcactygttagcacatgaccatcttctcccagggtgtttgtgtctcgtctcttcttctccttctccctctccttcttctttcttcttcttcttcctcttcttcttcttttttttttttgagatggggtttcactcttgtcgcccagctggagtgcaatatgcaatggcgtgatctcggctcactgcaacctctgcctcccaggttcaagtgattctcctgcctcagcctcccaagtagctgggattacaggtgcccaccaacgggcctggctaatttttttgtatttttagtagagacggggtttcaccatgttagtcaggctggtctcgcactcctgatctcaggtgatccgcctgccttggcctcccaaagtgctgggattacaggcgtgagccaccatgcctggccctcgtctcttcttttaaagataccaatcatattgggtcaagggcctaccctcctcataacttaactaattacctctacaactaccctatttccaaataaagtcatattctgaggaactgggggttaggacttcaacacatctggtttgggagacagaattcaacccacagtattcccgctgggtacaggatttagtatataccccttgacatgggagatgaggtcctccatggccttacctcagcatccactgctcacctgctgacccagccctgtgtagctgtgtggtgcttcttaatacgccatgccctctcaccctcccagggtagcaataatgctgttccctctggcaaggaaaatctccctgcatctttacctaatgaactcctgtgcttcttcccatctcacttcaagtattcccctgatctacaaagccttacttgccttgggactttcaggtgctcccttctccgtagcccaatccctatttgccatctcagagaattgtcattgcctgcttgtctgacttcttgcaagactgtgttgaccatcttccctcatgcaaagtcagtgcaaggcaggtagcaagtttcccgagaacctagaagggcatcccacctaaatccctttgcttatctttcttggtctttcttagaaactgggtccgtcatttctcatctaatcccgccttcctctgtccacctccaacagactctctgtttcagttctataccctccrctcttccagccacctgatcccttctcctgccatgcctgccaccwgcaactactttgctgcttcttctgagttcatccaattctcagccattctctagggctagywccagcatcgtctttctaggagccctgaacttgctctggcttctgtgytcttccatgcagactttcagtggatgtttacttaaaactatgttacaatctgggaatgcacagattgtaattccatctctgggaaaactcagtctatctgaggaaatagacaagtactgtttatttttatttatttatttattttgagaccaactcttgctccgttgctcaggctggagtgcgatggcacgatctcaggtcactgcaacctccgcctccyggggcaattctcgtaactcagcctcctgagcagctgggattacaggcacgggccaccatgcccagctaatttttgtatttttagtagagatggggtttcaccatgttggccaggctggtcttgaacttctgatctcaggtgatctgcctgcctcagcctcccaaagtgctgggattacaggcgtgagccaccgcacccagcctctttttgaaacagagtgataaatgttctagtacaggtttgtgttcctcggtcttgggagtagaatgatgagaactaatttgatctggggtagaactgtaggactattctgtgtgattaatttttatttactaatttatttttgttgggagaggttggaggcttctagaagttttaaaactttactgcccagctccaaagaaactcccaggaaaggcacttaaaacaaaaccctcgattctccatttctttctctctctcctctcttggaggaagacatgggtggagagctacaggaaattgttcaggtgtaattttgttcaggctgaaggacagggctgagtggagttgggagctgagcaggggttaggggacagggttgggaaattaggctccttttcattcctctcatggacgttttcagaaatggctacattgtttagtctgaaataagtttccggaactttagatatcggcatgtaagtatgaataaatgaaaagaaatatatgtgattgtgagaacatttgctattttgaattcctgtaacagtattactctcaactgatgcattgaggaactgtgctgaattctgcataattactgatttttagatctttgtgcagtcagtagggaagggatcttttgaatcatcctgtctcagtcgacccaggccagagctctgcaatagtgagtactgcccagaacacatgcttattgaccccagtgactattgcagaaacggtgagaagaaatgcatctgtcctcataattcatgacaacaaatgctcctcaattgtaaactgcaggaggctagcactgcagaaaagagaggaagtgtagtttcgtggtccaagctgtggaaatttggaagccttattctgtttcatgttccagcattaacctcttgtcaaccttgatttcattcctgtcgactgagaataaacacaatcaatggataaggccagttgataagtttgaggttaaacattttcaagtttttaattgaagtcataactttcccaagacaaagctttcttttcactttgatcttacatggcatttaaaaataattctcctcttttgttggtttctacagtcagacaaatatcccattcaagatacggaactccctaaaggtatgtacagttaaaataactacttgaacatgtgattattttaatattgtgaacaaagcactagtcgacctaatttttcattatttaaaattgtaaagtagaaacatgcccatagattagctcgtgacttgtgacataattgtctcagaaattaattttttyyttttttaaatagtatcttttaaccttgcaatagaaatraattttcttattaaaaactgtaaattattccataacaaattatgcgttaaattcctgtggtgtttttaacaggcataaaatgaagacagctgggactttgggttgcaaagggagagaaatctaacactaatttgtttaaaaagcgggaactggccaggcgcrgtggctcgcacctgtaatccctgcactttgggaggccgaggcaggtggatagcctgaggtatggtgtgggcgtggtggcaggcacctgtaatcccagctactaaggaggctgaggcaggagaatcgcttgaacctgggaggcagaggttgcagtgagccaagatcgcaccactgcactccagcctgggcaacaaactccatctcaaaaaaaagaaaaaaaaagtgggaacttgctgactttggggtctttgggccctgctgcatccaagcatctaagtgaggctgtcaggctgagtccatctcatggctctgtcttcttccatgttggctccattcttgggcaggatttccccccgtggagggaaagatgattactagcgcctcttgctttagatggcgttctcaaggtggtggaggaagagggagcctttccaccagmacggatagcacaattttagagatgattgtgattgtggcagttcaggtcatgtggccatccttaaatcagctattgtcatcaggaggatggaggacattggccaggtctgagccttgagatcgggtcggggaggagggtcatggagtggattttgcccaaaccactgttctgtggctagacaaaggggtgagggatgcttgttaggcccaaaagcaaactaaaaaagctatctttgataacccatacacttatgctttaggcatggtgcagaccataggggtggctagaccctagccttccataacctctcctgctgggtggtcagcagggctatgttccttttttattattattattttttgagacagagtttcactcttgttgcccaagctggagtgcaatggctcaatcttggctcactgcaacctctgcctcccgggttcaagygattctcctccctcagccttccaagtagctgggattacaggtgcctgccaccacacccggctaattttgtatttttagtagaggcggggtttcaccatgttggtcaggctggtcttgaactcctgacctcagatgatccacctgccttggcctcccaaagagctgggattacaggcatgagccacccactgcacctgggccctgtgttcctttatggaggccaagttgcaggttgtcacagtggggcctctaccttgtagtctgctgacaatccagagatgaggggtgggatggggtggagttggggacaatcagatctgactagtttcagagatggcaggggcacctggcatcctggtcaccatggaggggtaggcctgcccagcacgcactaacgtgagtctccccagcagttctcatggtagtggataatcgtagagagatccccagggccaacctgtccagagtttggccaaagctctcctcctcttctccccctactatyccagacccttctccctgctccctgaaatgacaccattagagtgtcctttcttttctgtccaaaaaggctgtgagtggcctcagcaagtggcttcaggtctcagggtctctgtttcctcctcagcacagcggggaggacaaggttaccgtccacctcccagggtgctggtgagaattcagtgaaataaatcgagaatggtgcctggcacttgtgaacaccagacaggggtgcagggaaatccagccgaagaagtgtgaaaaatcaagcttaaaatcaagccttcagtcagaatggcaaagtgaaactgtcttagaaaaagacggagctgtaatggccctagcattgaatgtcgtggwgccatcaggctcaatatctttttttgtcactcttaagtgtgatttcctgttttgaaagaaaaagattgttgcttagcaacctgatactacagtaattgtattatcagatttctcctagaatttgagttctacaaaaatcttaatgaatttataagtaacgtgaatgtgaaaaccataccctaggtcttccctttgtccttattcatgctgaatagtatttttttcttagatcaaggaacagattggagtgaacattattattaagtgcataatttcttatctccaaatgaatacatcattttatatgtaaatgaaccatgtctagaagtttaaaaacttactcctacatttgcgctcaacaatataacaacttgatgtctgctagcatttttctttgatgtcactagtgggaccaatactatcattagacattgtggtaattttctcattaaagttgtttatggccgggtgccatggctcacacttgactccaggagttcaagaccagcctgggcaacatggcgaaaccccatctctacaaaaatatataaaaaattagctgggcgtggtgacatgtgcctgtaatcccagctaccagggaagctggggtgggaggatcacctgagcctgggaggttgaggctgcagtgaggcatgaacttcctgggctacaccccagcctgggtaacagaatgagaccctgtctcaaaaataaataaataaataaataaataagttgttttcagggaaagaaaaatccacgtgaattaacgaagagactgatttatagacttaaaagcaattgtaatttaattctataaaggaaagactaggacgccaacgtttaagtgagttttaaggaggccagctttatttactagaarcatcatttgtaattagcgttaagagtttcacaaaatctcttacatactgctaacatattcctacttcattcacagagagtataaacctttaacagtggccagaatagattggttttgaataatgtggttttaataatcagctgtggaaatctagtgtaatttcatttgtcagcatctgtttttgaggtgaaatgtgttgatataaattatatctgttttctcatagggcataaatgcagaacttccacctcaagcagccaccccctgattttacagtttttgggggttcatttggtttggggctcttttctgatggctgttctgtgagtctgcgggtactaagaactggtgagattgaggtttattttccatcacgtgattcccagtatctcgcagaagctgctgcttgattgttctgaagaaaatgtgactgttcacattttcgagagaaaaatgtgtttggaaaaggaattttgatttttgagccactatttgtaatggaagaaaattacacttaaatacacgaatctaacaagattttatcatcttcattttctctcgtgtccctgctcttttctttgattattcaaaaaaatgttatagtgtatttagaagttaaagagaagtaaggtagacttttttttttctcttcttttctttttttctttttttttttgagacggattctcgctctgtcgcccaggctggagtgcagtggtgcgatctcggctcactgcaagctctgcctcccaagttcacgccattctcctgcctcagcctcccgaatagctgggactataggcgcccaccaccacgcccagctaattttttgtatttttagtaaagacggggtttcaccgtgttagccaggatggtctcgatctcctgacttcatgatccacctgcctcggcctcccaaagtgctgggattacaggcgtgagccaccgcgcccggcctcttttctttttttctgagtcttgctctgtcacccaggctagagtgcagtggcatgatctcgactcactgcaacctttgcctcccaggctcaagcaattctctcacttcagcctcctgagtagctgggactacaggcgaccaccaccacacccagctaatttttgtatttttagtagaaatggggtttcaccatgttggccaggctggtctcgaactcctgacctcaagcgatccatccacctcggcctcctaaagtgttgggattacaggcgtgagccaccgcacccagccaaagtaaggtagactaatgctacccttaagaagtctgaggaacttgaacttaaatatagatgctgtttgggggtgccttttagaacaacgtgttaattaaatgtagaagtagttcagtttgaacacgtgaagagaaaacaaacaagtactaggaaatcactaaataattcaaaagtagaaaggtctgtcctaaaactaggaagccaatatgttgtatttgatatgatttcctacctcacggattgataatgatgccatgtgaagagttgtccctgttcycacgggaaactcctcatcctcccacctgtgtggtttgctctgtgttctcatcccgcttgttcaataaatacactccccgcccccgctccccaagccttgacagagaccctcttgggaatcttctgttacagtaaactaaaaaccaacctgccctcccctcccagtcatggcaagaatacaatggtaacaactctccaaaacattttttaatcttttgtgcataagaggatagaggggacggagaggactatgaccatgggagcatttggaaagccacctgagaaaagtcgctgttaaattcaagttctttgccagtgtttcaagaggccgaggcaggaggaccacttgagactaggagtttcagaccagcctgagcaacatagtgagactcctatcgctccaaaaagaaaaaaaaagttaattagctgagtgtagtggtgcacacctgtagtcccagctacgtgggaggcttaggctggaggatcgtttgagcctgggagttcraggctgyagtgagctatagctataattgcaccactgcactacagcttgggcaacagtgagcccccatctcaacaaaaacaaaactaaaacaaaacaaaaaactcaacttctcgtagtgggaaaaaagcactttaaagaaatctgggttaataattttgacagtggggatgactgtgattgaagtcacacacctattacgttgggctgtgacgaatgacacttcagtgtgcatcagaatgtggggatgcttgtcaacaacgcagacttctgggcccctggagattccaactaaggcggtctgggggagagctcagcactctgactgacaggcaggagagctgagagcsaggcaagcctgggtcagatggtgaccgctctagctgtaaaaagataacatacacagcctcaggcaaagaccacacttttagcttcagtttcccagataatactattatgaaaagaaagtcttttattccagtcagaattgtgtgtgagacaatgaatatacatggtcccttatttgaaccaatctagcagctcagcgcataataggtgaatgaatgctaatgcatggacggtgactcgcgcctgtaatcccagcattttgggaggccaaggcgggtggattactcgaggccaggagttccagaccagcctggtcaacatggcgataccccgtctctactaaaaatacaaaaatagaattagtcaggtgtggtggtggcacgcacctgtaatcccagatactggagtggctgaggcacgagaatcgcttgaacctgggaggcagagattgcagagagctgagatcatgccactgcactccaccctggacaacaaagtgagactttgtttcaaaataaataaatacataaaataaaaagactgctaatgaaggtaaaaatcaaatggcttaatcaatcaatccctcacttcatcctgacttttcaaccctgagttaaatggttctgtatttaaggctaaataactttaaacatttacatggtgctaaaatttctgttataatatatttctgccaaccttaaagtttagagtatggccttgaattctgtgactaaagattagaatctgatggaacaaaatcagtttttaagctattttgtaccatcttcaccacaggtgggaaaactgtgaagttaacacaactttggaatggaagttgcttcctagcaattcatatggaaagatgttaaatgtttaacatgaatttcaagttcctttrcttttcactggcaacctgaacttgaacaagagaaccaaaatggtttaggtttgacctttaggagggtgagctgttgggacaagtataatcccactctctactgtctgaaaggcttagtaaaatgacagacgaatgaacacactggaatttgatatcacgttgttaatcaggggagaattttttttttgagatggagtctcgctctgtcacctaggctggagtgcagtggcacggtctcggctcactgcactcctgagttcaagcaattctcctgcctcagcctcctgagtagctgagattacaggcacccgccaccacaccaagttaatttttgtatttttagtagagatgtggtttcaccatgttggccaggctggtctcgaagtcctgacctcaggtgatccacctgcctcggcctcccaaagtgctgggattacaggtgtgagccaccgtgccctgccaggggagaatgtgttttgattgtctcctcttcaccctgttggtgagggagggattccatcttagggttacagggatggccaaacacatgacactcaacacttaacagatgagatcgacaggaatttatgagtcatgtatactcagtccaggaggggaggacactgygcgtcatgcagggccacatggaggttgcacttaggagcagagcaaacaacaaggggctgtcagacaggctttatggtattaagcaagtggggtgcctcctggttgtcaggatgtgattggcttgtttgagttaagtccatggaatcaggggaaatgaagcccattacaaaaagagaacaaggactgtgcgtggtccccttggtaaggggcgttgtttggctaggggactttggccatgggagcagagtgggaaggagacttgtggttaggccattcaagaccttcccagttcttttttttttttttttttttttttttgagacagagtctcactctgtcgcccaggctggggtgcagtggctcaatctcggctcactgcaacctctgcctcccaagttcaagccattctcctgccgcagcctcctgtgtagctgggattacagatgcccgccaccacgcctggctaagttttgtatttttagtaaagatggggtttcaccatgttaacctatcctctaactggtctctaactcctgacctcaggtgatccacccacattggcctcccaaagtgctgggattacaggtgtgagcccttcccagttctaccaatgtcaaggcagcacataaattgagtctcaatgttaggtcttatacaacagttcacccctagatgccatggcataaatttaaaccttaatgatggctgagacttctagggaatagaagtgccccactaagaagcaaggaaggcacttgaccaggagggagagggccacatggtgagatggtcatcaaaaacaggaactttagaggtgtccccctgatggccagtaaaggcagttgaggaacccgtgtggcattggtgtagggagtacatgtcyccagaggttgtggatttagattcattaaggcctgtgrcaatagtgacacccagtaacttacataggagtttcttgaagatttcattatgcctctcaatcgaacctgctgcctgatatgagaggggaggtggaagtttcattgaatggcttaagagcctggcrttgtatgttcttagaagagaaatgagtgtcttgctcactgtcagtaataagtgggactccaaaggagactggaaatgttctgctgaagccttgtatggtggccttgctgtacatagagacatctgtttctttatttatagtttgggtgtatttgaggcaagagattctgagagttctttaccacaaagggtgcaactcttaggcaatggtccaaaaatttataaaaactgtgcagatggggcgatttgttggccaggacatccagcaataagatgactgcctgaagtytggccagttttgctaatcttgggtccttcctttatcagggatatcctggttaagggatggaaagcagcaactgtctgctgagcttcatcgtgtatgatgggggtgatgtcatctgtaaagtctacaaattcccattgctcttcactcagttgctttgaaggggctccccagataacctaggagtctgcaagaggggtgactttttccagcactatgggctctggtgagggatgggggaagccaccccttcctgcagatggaacatgccagagtgcccgggtttagctccatcctgtatcaaggaggccttggtaaccatgcggagcttccaggattttgcttccatgacccaaggcataatggacagcgcagtatggagggtcacagctagtgtttaatgacagcctctatttccaagagagcccagtatgcagctagcagttgctgctctaataatgtgtagaacagggccygggagggcagtttcttgcatcaaaagcctgtggacaactttcagctatcgtgggtggtccagagacttcaggaggaatgagaggaggttgctgaagctccagaaatctctgggggtcctagtgggactgcctgttgtagacttttattggaggggcccaaatttacattgagctgacttgcaagtactggcatcaatgagattaaatttgtaaatgagaaatatgttgccaccagaacccaaaaaagagctaaaaatatactagacttgtattcacattgtgggtgcagagagggtcaatagctatttattgacagtgtctgggtgggagcagcccttagtttaccaagtaatttttaggaatttcaccaaggtggcagggccttgcgctatgtgtggggcagtggcccatctctttccgtgagcattgttgtgagtactgtattccgtggcctgcatgaaaatgtcaagtgagaatgtcctcagaggaggatctcatccatgtaatgtcatcacactcatgagactgagaaagtaggatgcagttagatcttgcctgcaaagcctgtgtgtgatgaccaggctcttgaaatgccccatgggtgccttgtaaagatatatcatgtccgtttgcagatgaaggcaaactttgattgagagactattgagatagtcactgaacagaacatattaggcaaatctgtaatagcaaaatattttctagtcactaattggatggagtcagtgttttccaatcatwttaggcayggggtatggaagccttaagggatgagaccacagcagtaaaagtgtagtaatctggctagatgcagtggctcacacctgtaatcccagcactttgcgaggccgaggtgggcagatcacttgaggtcaggagctcaaaaccagccgggacaacatggtgaaaccctgtctctactaaaaatacaaaaattagccgggcgtggtggtgggcacctgtaatcctagcttcttgggagtctagggtaggagaatcactcaaacctgggaaatggaggttgcagtgagctgagatcgcaccactgcactccagcctgggtgacagaayaagactccgtctcaaaaaataaataaataaaataaaattgtagtaatccactgtgaagcatctttttttttttttttttttttttttggaacaggacgttgctctgtcactcagggctggggtgcggtggtgtgatcatgggtcactgcagccttgacctctgggagccaagtgatcctcccacctcagcctcccaaatagctgggacgataggcatgtgacaccatgcccagctaatttttaaactttttgtagagatagggtcttactgtgttgcctgggctgattttgaactctgggccctcaagcaaccctcccatcttggcctcccaaagtgctgggattacaggtgtgagccaccacacccaacctgtcttctcctttgtgtccaggtttctttttrtctttctttcattccctttttatggtcactggatatacttttggcaggggcagtcttctctactctgctcatattgataaatttcttcccccagagaacctcaaatcagtawcatcaggggtggggccttccctgtggcagtggttgctctcatatagtttaaaaactgtgggcttgtgtcagggtgaattaacccttttactgtgccccggggctactaggagttttccctacaactctgaggatcaggatctttgctgcaacaggggcataagctgcagcgtggtccagcccaatggaagagtgctggcctataacccagaggtggagggactctgctacaactttgtcttttctgccatgagggttttccttaattaattaactaatttgtttatggattttttcctgtcttgtacaaatgccctcagaatattttggatttctagccacataaagttgtggctttcagtttttgtctccatatgtcccaagggaccttctgggaggttacgagcaaagtgttgggagccaggtggcccccgtcgcaggcagccacctcttcctccagggaataccagtcggtctcsctggggatggggtcctcatccagccaggtggttttgtctgtggcccaagtggggacattaaacccactatggcaagatgagctctttggcgtgttggaagcagcagygctaagcacagctgggtgcgctcgccaggggctctgtgccgagagagcagttgagtaccaaatgctttttcccgttttctttcttcattagcacctgggccacagactgccatggctgtgtacctcgatgcccctgggggtcaggagaacacatgggcagcagcaagggaagcagcagctgaggggaygggcagggtcactgccyttgccttagcagcaaccagggcaccagggaaactcccctggggaactccctggtctctctccttcctttctgcaaacctctgtctgcaaaggaccgcccccgtggctgacctggggatgcacttcacaaacagtgyctgtacagctgccccaagtggccagtgatggtcaccaagctagttgtattgctaagagagcttgcacctgtcccttgataagtgggacttaagcagcaaccggttagggggatgtgctaccaccgtctttacagatgggagcctcaagagaccacctgccaaacacaggcccaaactgacagctctggggtccagtcagttcacaacagttttcatcttgggatgagatascaaacaatcaacaaagacaacacagcattkcataggccagagtgcaaatcttccagtaattgtcaattctatcccaggcagcctgcgtggtattagtgaagttggttagccgagagcagttaatgaaatctgaccaaatgtccttgattgtggttgggtcatcctgttcattatgccagktgtttcttttcttttatttttcttryctttttttttatttttttatttttggagacagggtctcactctgtcccccaggctggagtgcagtggcatgatcgatcagagctcactgcagccttgaactcctgkgctcaagtgatcctcctctctcagcctcccaagtagctgggactacaggcacacaccascatgcctggctaatttttaagttttttgagactgggtctcactgggttgcccaggctgctcttaaactcctgcctcaagtgctcctcctgcctcagcctcctgaatagctgtcattacaggcgtgagccaccactcctggctatcatgccagttgttttgatcaccttctcctcacccctgctctaggattatggggatggacaaacacacacatccaacactggagagacaagatcagcagcagtttatgagtcacatataygcacagcccaggggaggaggacactgcccatcacacagagccacgcagggggacacagatgttgtacttgagagcagagcaaaaaaccatggsctgtgtgagacaaacattgtggcatcaaaagggtrggctgccttctggttcccatgtgagttcgtgatcagcctgtttgaataattccacatgttggtaggaaactgaaacccactacccaaaaaataagcagggggcagtcacagtggctcacactagtaatcccaacactttgggaggccaaggcaggagaatcacttgaggccaggagttcaaaaccagcatggacaacacagtgaggccctatatcttacttagcttggtgtggtggcacatgcctatcttcccagatacttgggaggctgaggtgggaggatcrcatgagcctaggagttccaagttactgtgagatgcactccagcctggatgacagagtgagaccctctgtctcttatttttatttttttgagacggagttttgctcttgttctccaggctggagtgcaatggcgtggtctcagctcactgcaaactttgtctcctgagttcaagtgattctcctgcctcagcctccagagtagctaggattacaggcatgcgctaccactcttggctaattttgtatttttagtagagacgggggtttctccatgttggtcaggctggtcccaagctcccaacctcaggtgatccgcctgcccctgtctcttattttaaaaaaataaataaaaaataagcaggaattgtgcctaatctcttgataagsagcattgtttagctgggggatcttatccttaagagcagagtttggagaggaatttgtagtccagcycttctgattttaccagatgccaaggcagcatgtgacactgaaccttaattttaggtcttacaccayggagtgtgtgctttttaaaatcacactttstttctttctttctttctttttttttttcctagctgaagaatgtgatacaattactttgaactgcccacgaaattcagatatgaaaaatcaggtaagaataatttcaactatattttacccttaggtacatgataatccacctaaaattttttgagakttatagagttttacaaataaaaaatgaaaaacaggatttctagatcataaacagggtttgcaaatggtctctaagcatcccagtaaggtagcatatctttagaacttttttacttctaataaatattatagctttcattcattctttgaaatactcttctacatgccaacaacagaaaatcaatgcwggtgagttagaaaggagagttgttttctttctaatgcagttggcactctgtggatgagcaaattctttaaggcacaacaaaactagatactctaatataatacttgtaatgctttatwaaactttaatttttttagatatcagawgtcaaactttaacatattatttctattatctttttccaaaaaggaaatatgtttattgtkttatgattataaaagaattcatattttttaattgtaawtttttttatttatttattttatttttttttttagtatttattgatcattcttgggtgtttcacagagagggggatttggcagggtcataggacaatagtggagggaaggtcagcagataaacaagtgaacaaaggtctctggttttcctaggcagaggaccctgccgccttcagcagtgtttgtgtccctgggtacttgagattagggagtggtgatgactcttaaggagcatgctgccttcaagcatctgtttaacaaagcacatcttgcaccacccttaatccaattaaccctgcgtggacacagcacatgtttcagagagcacagggttgggggcaaagttatagattaacagcatcccaaggcagaagaatttttcttggtacagaacaaaatggagtctcctatgtctacttctttccacacagacacagtaataatctgatctctctttcttttccccacacttcacccctttctattcgacaaaaccgccatcgtcatcatggcctgttctcaatgagctgttgggtacacctcccagacggggtggcggccgggcagaggggctcctcacttctcagacggggcggccagtcagagacactcctcagttcccagaaggggtcgctgccgggtagaggcgctccccacatcccagacatgggcggtcgggcggagacgctcctcacttcccagacggggtggcggccaggcagaggggctcctcacatcccagacgctgggcggccgggcagaggcgctcctcacttcccagacggggtggcggctgggcagaggctgcaatctcggcactttgggaggccaaggcaggcggctgggaggtggaggttgtagggagcggagatcacgccactgcactccagcctgggcaacattgagcactgagtgaaccagactccgtctgcaatcccggcgcctcgggaggccaaggctggcagatcactcgcggtcaggagctggagacatgcccggccaacacggcgaaaccccgtctccaccaaaaaaatacgaaaaccagtcaggcgttgcgacgcgcgcctgcaatcccaggcactcggcaggctgaggcaggagaatcaggcagggaggttgcagtgagccgagatggcgtcggtacagtccagcctcggctgggcatcagagggagaccgtgcaaaggggagaggcggcagtacagtccagcctcggctcggcatcagagggagactgtgcagagggagagggagagggagcgggagcgggagcgggagagggagagattttttttttttttttttgaggcagtctcactctggagtgcagtggtgcgatctcggctcactgtaacctctgcctcctgggttcaagagattctcatgcctcagcctcctgagtagctgagatcacaggtgtgcgccaccatgcccggctactttatttatttatttatttttttagatggagtctcactctgtcacccaggctggagtgcagtggtgcgatctcggctcactgcaagctccacctcccaggttcacgccattctcctgcctcagtctcccgagtagctgggactacaggcacccgccaccatgacccgctaattttttttttttttttgaatttttagtagagatggggttttgccatgttggccaggctagtctcgaactcttggcctcaagtgatctgtccacctaggcctcccaaagtgctggtattacaggcttgagccactgcacctggccagaatgttcattattttaaagttcaagttgtgcaaaaaagtacacacagaaagttaagaattgcctgtcattccactgttccaccttttgatatacatctttctggggacttccttggtcagttacttcttgtactgtccaagccacctctgttctctctcccaaagctcattagcagagttgcttaactatatttacagcattcagtatctcaaaggcatgttttgcctcaaataggctgattcarttctgctccttctatatataacatcaagttaatttgtaacaagttttgcctagtcttgctttaaaacatcactctgtaataaagtctttaatagtaacattgytgkgtagtcaaatcacctmtgtaagaaagagaagttacacaatagttgataaaataagcagtttaaattaaaacacataactgtcttgaaaatggtcagtggtgctagttttaactttgttttggggaattttcaaccattaattgtgaatatcagacttcactctttactcctgatactcaacattttccttgaaattayaatctaataatgggcttctgtgcttactgaatttaaactagtttagtaaactgaaagtataaatttgttcttctcataatcctaatttttaaacaaaattttgctcctcacatttttttggtaacatgtagacttccttgaagataaaagaatgctaagtttttcatgtagtttacttttagggattttccaaaaccacttaagatgaggtacagaatatatgttagcacactgttcagcatttttcctaatttcagtgttataatkttggcyatatcaagtaaatactatcctaaaaggtgaaaatatatttatcaactaaaaaaataggggaaatacctctttgagatttttaaagttctattttaaaacaaaatgtcttcttctcctataaaaagtagtactataggcagctggctgcttccgttgactatttctttgtataatctataggatttgttttaactgctagatactcagaaggattctttgaaatgaacttggcagttagaacaaagaaaattcaccagggagaaacgtttaaaagaagaaaacaacacacactccattctatagttcagacattaaaagcaagctggaggccgagctcggtggctcacgcctataatcccaacactttgtggggctgaggcaggtggatcacgaggtcaggagtttaagaccagcctggccaagatggtgaaaccccgtctctactaaaactacaataattagcagggtgcagtggcaggcgcctgtaatcccaactacttgggaggctgaggcaggagaattgcttgaaccagcaggtggaggttgcagtgagctgagattgtgccactgcactccakcctaggtgacagagtgagaccctgtcttaaaawaaataaataaataaaataaaagcaagctggaagtatgttctttagaataattattatctgcctttttagtgatttttataatttaagactaaaatctgcttctactaaggattwatttgagcttcctttttcgagtgatgccgaggaaaaacatcatagtgtcctagtgtcaaaaattaaagtctaagccaggcatgcttgtggtcccagctactcaggaggctgaggtgggaggatcgcttgagaactggagtttgaggctagtctggcaacatagcaagacctgtctcttaaacaaaacaaaacattaaggtctgacatttcaagtgcaatttcagaaagaaccctttacttttagttatttaaaatcaataccccatctactagaactattcaacttctacaacttattacaactggtatttattgaggatatactctaagaccaatctgaactgggtattcttggacataaaaaatacaggaggaggaggtggaagttaagaccccaggcagggccgggcgcggtggctcacgcctgtaatcccagcactttgggaggccgaggcgggtggatcatgaggtcaggagatcgagaccatcctggctaacaaggtgaaaccccgtctctactaaaaatacaaaaaattagccgggcgcggtggcgggcgcctgtagtcccagctactcgggaggctgaggcaggagaatggcgtgaacccgggaagcggagcttgcagtgagccgagattgcgccactgcagtccgcagtccgacctgggcgacagagcgagactccgtctcaaaaaaaaaaaaaaaaaaaaaaaaagaccccaggcagaccttatagacttgttggagaggcagtgcacacagtttgattctcggatgtgtgtaaggctcagatgtgtaaacaatttccatgatactttaaggaaaacatttcctaggacctttatcaatcaataaagttttaattactttaacgacatgcayaagcatatggcaaatgaagataaagcaaaaatttgttccagctgggtacggaggctcacacctgtaatcccagcactttgggaggccaaggtcagcaaaacctgaactctacaaaaaatacaaaaattaaccacacctgtggtcccatggtcccagctgctcaggaggctgaggtgagaggatcgcttaaacctgggaagcagaggttgcagggaatggaaatcgtgccactgcactycagcctgggagayagagccagaccctgccaccaaaagaaaaaaaaaaaaaattgggttccagtttgtagccaagaatccatgccaagaggagtctaaggtaatacaataaaaataagaaaaataataaatattaggatactaagttggagttagaagttatgaaaataatgacattgtcttctatgttgtttatttggattacaaaacaagtttttttagttttagaaactacattaagaaactgcagaccaactcggtggctcatgcctgtaatcccagcactttgggaggccgaagtgggcagatcacctgagatcaggaattctagaccagcctggccaacacagtgaaaccccgtccctactaaaaatacaaaaattagctgggcatggtggtgggtgcctgtaatcccagctatctgggaggctaaggcaggagaattgcttgaactcaggagaggaaggttccagtgagccgagatcrtgctcagcttgagcctgggaggctgtggctgcagtgagctgtgactgtgctgctgcactccagcatggatgacagagcaagactctcaaaaaaaaaaaaagaaagaaagaaagaaagaaactacaataccattaagttattggctcatttacttgcgacaaatgtatcccactaatgtaagatgttcataataacagaaactggggataggatatatatataggaattctttacactgtcttctcaaattttctgtaaatctaaaatgattctaaaataaaagcgttactttaaaaagcatactaaataaaatttagattctagatcaatgaaagcgcatcgcccattccaccactcgaatacaattatttttgtcacttcgttgtattcctttgtacatttttgtatgcataattataaaaacagcaaataaccctgggcgcggtggctcatgcctgtaatcccagcactttggggggggccgaggcaggtggaccacctgaggttaggagtttgagatcagcctggccaacatggggaaacagaaaccctgtctctactaaaaatacaagcgattctcccgcctcagccccagagcagctgggatcacaggcacccaccaccacacccagataatttttgtacttttagtagagacggggtttcaccatgttggccaggctggtctcgaactcctgacctcaggtgatccacccacctcagtctcccaaagtgttgggattacaggcgtgagtcaccgcatccagcctaactcatatagttttcaaaatgaccttatgcaggacgtaccattattatgctcactttacacatcaagatccagagtggttaaaaaataaaataaaataaatataaaaattagccaggcgtggtggtgggtgcctgttatcccagctactctggaggctgaggcaggataattgcttgaacccaggaggcagaggttgtggtaagccgatatcgcaccactgcactccagcctaggcgacagagtgagactccatctcaaaaatcaaaaacaaacaaacaaaaaaaaacaaaaaaaaaaaccctgcaaataatttgatattgttctatatcctgcttttgttgtttaataattcagaaacattttatccagtttgctccatgattttgccatcctgttgctccatggtcatgatgatgtcatggtcaatggcagcacggtatgcccatctgacacagaaatagattctaggatgcgagtctgagggccggagccagaaccctcccagtagatggaatgatatagcccaagcttgtccaacccatggcctgcaggccttatgtggcccaggacagcttagaacacagcccaacacaaatctgtaaatgttcttaaaacattatgaatttttttgctttttttttttgagatggaatcttgctctgtctcccaggctggagtgcggtggtgtgatctcagctcactgcaacctctgccacctgggttcaagcaattttcctggctcggcctccctggtagctgggattataggtgcacgccaccacacccagctaaactttttggatttttagtagagacggggttttgccatgttggccaggctgatcttgaactcctgacctcaagcgatccacccgcctcagcctcccaaagtgttaggattataggcgtgagccactgtgcctggcctttttgtgatttttttaaagctcttcagctatcatcagcattagtatattttacgtgtggcccaagacaattcttcttcttccaatgtggcccagggaagcccaaatattggacacccctggtatagacagaggatctgaggggagattctgtgacagagtgaacttggcctgagagagcttaggtgatgaggctggaaggtaagttgagaccagggccccagagccttgaatgccggagaggggtgggtggtggaaggtattggggattttcagtgattttctcatgaccttatctgggatcctaaggggacttgaaagaagatgagacaggcttaaaagcctgtgcctgggagatggatgctattgmcaagatcaatagagaattcaggaagaagaccatcagatgtgtgtgtgttgttaggattgagttttctttgttggttggttcagaaagaggagataaaggtgtgtggagtttggggtatgtgagatttgttgtgccagtgagactgcttgtgtagatgacacagcactaggtactgtgcttaggattcatgcattgggaggttatagttgaagccctaggcatggatgagactgtcaaggaaaatcgtccttataggaaagcggagaggttaaccaagatgaaaccttgaggaacacttactcttggaggtcagaggaagaaaggagctcagaggtaactagaggaatagccagagaagaaaaccatctgtgctcaaggcaacgattctttccttcatagcactgatcctagttcatagtcacatgtttgctgactatttcattgtcttcacccattgattaggctatgccccttgagggcagggactcctgtgtctttttgctcataattgtatcttcaatgcctactacatagtaggtcccaataactgtgtattgaataaagaaagggaaaagccaggggagggcatcgcttcacatgtcgaggaaggaatggtcaccaccctcaggaggcacagcgtggtcaagagggagacctaccaagatgtcattggatttacttgcaagagttaagaagtgagtatgagaatgtttatgcagttctatccagaaattcattaaggtagcaaagaaaaatattaaaatgttatttgaagrtattggaaagtacagaaaaggcttcctttctacttttcaggatgagaaacttcaggattttagaaagaaaaaggatcagcaggagtggaggattaaaaataatagagagaagggggataatacrtgggatgttttcctatagaaggtagaggggattcattttcttagcaaatatttattgataacatatgtttggtagaaaacacacagcactagattttcctcaaggaatctgtaagctggcaaggaagtcaagatatatgcacacataattttgataaataagagtcgtcaaaggcatagagagatgaatttgcattttaaaagtaaaaacctcagccaggcatggtgactcaggcctgtaatcccagcactttgggaggccgaggcaggagaattgcttgagaccaggagttcaagaccagcctgggcaataaagtgagaccccatctctattaaaaaaaaaaatgtctttctttcctttttttttttagatggagtctcactctgtcgcccaggctggagtgcagtggtgtgatctcagctcactgcaacttccacctcctgggttcaagcgatttacctgcctcagcccccgagtagctcgaactacaggcgtgcaccactgcacccggctaatttttgcatttttagtagagaccaccataggtctcaccatatcggccagactggtctctaactcctggcctcaggtgatctgccctcctcggcctcccaaagtgctgagattacaggcgtgagccactgcacccagccaaaactttctttttaattagctaggtgtggtggtgcacacttgtagtcccagctgcttgggaggctgaggcaggagaatcacttgagcctgggaggttgaggctgcagtgagccgtgattgtgctactgcactccagcatgggtgacagagcaagatcttgtcaaaaaaaaaaaaaaaaaaaaaagtaagaaccttaactctttttyagaggcaggactcaaagaaggttggatggggaaagatagaaatatactttttagatgcaaagtcaaraagttgagttagttgatgtgaaactggkgttgtgccttgaatcacggcatttggttgggacasttggttgggacaggagggaggaaatggagcasagttattagggggctaaagagtttgctctgttcatacagcagggaggcagagacctgcgtgaaataggcaatgctatgacagtatttgataaatgtgaaatagattgccagatggtagatggtgaaacatccattcatccctccatctttcaagtatttcagtgccaagaatgtattaccagcactcccttagggtctccagatacaatggtgaatacctagagcttacagtcaagtttggcattgaaaatctccaactgggaagggtgagtggaagtgtttgtggatgctccaatcacagaagctccgtaggcaagtacactaagaaaatccccctcttagagaagctcagcacatatccctaaaggcaaaagatagagaggacacctgatcgacaggtaagcttagttgaacagagaaatacttgtttttcccacccctggggcatacctgttaaatgtcccctgcatctcatgtttcctgtaaacactactttgggaagagttgttcaaatggaagtcttgaatgccaggatggaagagtgtgaacttgatgtcccacaccctggaaagttcccgaaagagtctgacggtggaatgatggggtaaaaaggcagagttctagaaaggtcatcctagcaggggatggtctaggggttagataggaagaaagactgaggccaggagagcctgagggctattgcagtcacctagggatgtaatcccaagggcctggatttgggttgtggcagggagaaggaagaggggagactgcagttctaaaatgttggtrttggtgtattagggctgccataacaaagtgccacgaatgaagtgacttaaacttaccatcatctcatagctctggaggctacaacaaatctgaactcaaggtgtcggcagggttggttccttctttttttttttttttttttttgagacttgctctgtcacccaggccagagtgcaatggcgtgatctcagatctcagcccactgcgacctttgcctcctgggttcaagcgattctcccgcctcagccttctgagcagctgggatcacaggcacccaccatcatgcccagctaatttttgtatttttgtagagacggggtttcaccctgttggctaggctggtcttgaactcctgacctcaggtgatccgcccaccttgcgccctgcccagggtcggttccttctgagggctgtgagggaaggacctgctccaggcctctcttcatggcttgtagctggctggcttctccctgtgtttcttcacatagttttccctctttgtttgtctgtctgtgtccaaatttcccctttccataaggaagccagtcatattgagttagggcccaccccaatgacctcattttaacttgattacttctgtaaggaccccatttcaaaacacagtcacattccaaggtactgagggttaggattccaacatgggaattgtgtggagacacaggtcaatccacaacaatgtttgaaaacaaagcaaaacaagaaccttacaataataataacagcgcattttgagggagagatgaagatgatttggtgtctggcagactctgggacagaagtggagggaagggctgaargtccatttcagagaaccccggtggtgaccagggctgtggtgggtgccactgttgaaaatagaaaaaccacttgtttgggcagtgggaaaagcaagtagagagtctgatcaacaaaaactgaagaccccatgtcattttatcctccgagggctgattgtctagttggtggattacctaatgctatcattttcccactccctgcaaatcatccgtagttgattcttttattattatttttaatacgctttacgtttttggagaatttttaggttcacagctgaattgagcaaaaggtgcacaaatttcccattcactccctgcccccactcatgcacagctccacccccattgtcagcatcctgcatcgtaacggtgcgtttgttatgattgatgaacctacgctgacacaccattatcatccaaagttcaaattggtttaaattagggttcacccttggtgttgtacattctataggtttggacaaacgtctgatgacatgtatccaccattctagtatcttacagaggagtttcgctgccctaaaaatcctctgagctccacccattcatctctccctcaccactaayttctgaccaacaactgacctttttactgtctccatacttttgccttttgcagaatgtcacatagttggaatcatatgctatgtaaccttttcagattggcttctttcccttagtaatatgaatttaagttttcttgctgtcttttcactgcttgatagttcatttctgtttagtgcttaataatattccactgtctgtatgtaccacagtctatttatctattcacctactgaaggatgtcttggttgcttccaagttttggcaattgtaaacaaagctgctgtaaacattcacgtgcagatttttgtgtggccataagttcagcccctttggataaatccaagaagcatgattgctggctcatacagcaagaggctgtttaggtttctaagatgccrccaaactgtcttccaaagtggctgtaccattttgcattcccacccagcaatggatgagagttcctgttgctccacatccttgtcagcatttggtattgtcagtgttctggattttagctattgtaataggtatgtagtggtatcttattgttgttttaatttgtatttctttgatgatatacgatgtagagcatcattttatagcttatttgccatttgtgtatcttctgtgatgaggtgtttgttaagggctttggctcattttaaaatcaggttatgttcttattgttgagtttaaagaggttttatatatttyagataacagtcctttatctgatatgtcccttgcaaatattttcttccagtctgtgtcttttcttttcattcttttgacagtgtctttcacagagtagaaagctttaattttaatgaagtccagtttatcaattatttctttcttggattgtgcctttggtactatatctaaaaagtcattgtcatgcccaaggttaactagattgtctcctatgctatcttctaaaaattttataattttctatttacttctaggtctgtgacccattttgagttaatttttgtgagagtttaaagagtttaaattttgtgagagcttaaggtgtgtgtctagactaatttttttttgttattccagtaccatttgttgaaaaaactatctttccactattatattgcctttgctcctttgttaaaaatcaatagactatatttaygtggtcctatttctgggttctgtattctgtttcattcatctattttgcttttatttgtctcttgtttgccaataccacactgttttgattactgtagctttccagtaagtcttaaagttgggtagtatcagtctttcaactttgttcttttccttcactgttgtgttggctattctgggtctttttgtccctccatgtaaattttagaatcagtttgttgacattcacaaaataacttgctgggattatgattgggattgcatttaatctatagatcaatttggaagaactgataccttgacaacattgagccctcctatttatgatcatggaatatctctccatttacagggcatgcctctttttattgtgtgttatgttattgtattttgcagatattgcatttttttttttttacaaattgaaggtttgtggcaaccttgtgtcaagcgactcttgctgccatttttctaacagcatgtgttcactttgtgtctctgtgtcacaatttggtaattctcacaatattttggtatttgttatgatgatctgtgactcgtgatcttgatgttactattgtaattgttttggggcaccatgaactgcacccatataagacagtgaacttaactgataaatgtgtgtgttctgactgctccaatgactggccattcctctgtctccctcttcttgggccttcctattccctgagacacaacagtatcgaaactaggccarttgataaccctacaatgagctcttaagtgaggaagagttgcatgtttctcacttcaaatcaaaagctagaaataattaagtttagagaggaaggcatatcaaaagccaagataggctgaaagctaggtctctcatgctaaacagccaagttatgaatgcaaaagagaagtttttgaaggaaattaaaagggctactccagtgaacaaacaaatgataagaaagccattattcttatcttatacttatcttattgctgatatggagaatgttttagtggtctagataaaagatcaaactacccacaacattcccataagccaaagactaatccagagtaaggccctaaccctctttatttatatatatatattatatatatataaataatgtcatatataaatatatataaatgtatataaatataaaatatataaatataaatatatatttatatataatatatgtattatatatatgagatatatgagatatatatagaagaaagccctagatggcatcttcttccaggaaagaagtaaaagaaatattatatattatattataaatatgtaaatatatattttataatatgtaatataatatttatatattatatatatatattttttgagatggagtctcactctattgaccaggctggagtgcaatggygcgatctccgctcactgcaacctccacctcctgggttcaagcgattctcctgactcagcctcctgagcagctaggattacaggcacccctcccgcccaccacacgtggctaatttttgtatttttagtagagacagggtttcaccatattggccaggctggtcttgaactcctgacctcaagtaatccacctgtctcggcctcccaaattgttgggaatacagatgtgagtcaccgcacccggcctcctaaccctctttaattctataaaggctgagagaattgaggaagctgcagaagaaaagtttgaagctagcataggttggttcatgagcttaaggaaagaagtcgaagtcatctccgtaacataaaagtgtgagataaagcagtaagtgctgatagagaagctgcagcaagtaatccagaagatgtagctaccatcattgatgaaactgatgaaggtagctatactaaacaacagatttccagtgtagacgaaacaacctttcactggaagaagacgccatctaggactttctttctttcttttttttttttttgaaaccgtgtctcattctgtcacccagactggagtgcaggggcaccatctcagctcactgcaacctccacctccggggttcaagtgattttcgtgcctccacctcccaagtagctgtgattacaggcatgcaccaccttgcccagctattttttgtatttttagtagagacagggtctcaccatgttggccagactggtctcaaactcctaacctcaagtgatcctcccgccttggcctcccaaagtgctgggattacaggtgtgagccactgtgcctggccatgagccaccaagcctggccatctaggactttcctagctagagaggagaagtcaattcctggattcaaactttacaggacaggctaactctcttgttaagggttaatscagccgatgaccttaagttgaagctaatgatcattgaccattccgaaaatcatagtgcccttggaataaggctaaatttactctgtctgtgctgtgctctataaataaaacaccaggcttggataacagcacatctgtttatagcatggtttactgaatattttaagcccactgttaagacctaktgctcaataaaaaagattcctttcaacacattactgttcattgacgatgttcctggtcacccaagagctttgatggagatgtacaaggaaattaatgttgttttcwtgcctgctaacacaatatccatagtgcagctgctatggtttgaatgtttgtcctccccaaaactcatgttgaaatttaatccccaaggtagtagttgggagaggtggagcctttaagaggtgattggttcgtgaaggctctgccatcatgaatggattaatctgttcrtggattaatgggcttatggattaatgagttatcgtgagaaaggaactgaaggcttcctaagaagaagttaccatattagcatgcccagttcctttgccatgagataccctgcactgcctcagtagagtccccaccggcaagaaggccctcaccagatgcagcccctcaacctgggacttctttgcccccagaactgtaagaaataaattccttttctttataagttgccacgtttcagatattctgttataagcaacagaaaatggactaatacagcaccccatggaccaagaaataattttgactttcaagtctaatttaagaaatacatttggtaagactaaaaatagtgattcctctgatggttctgtgaaaagtaagttgaaaaccttctggaaaggattcaccattctagatgctattaagaacattcatgattcatgagaggagatcaaaatatcaacatttacgggagtttggaagaagttgattccaacgctcatggatgacgttgagggattcargatttcagtgggggaagtaactgcagatacagtagaaatagcaagagaattaaaattagaagtggtgcctgaagatggggctggatttctgcagtgtgatgataaaacttgaatggatcaatagttgcttcttatggatgagcaaagaaagtagtttcttgtgatggaatctgctcctggcaaaaatgctgtgaacgttgttgaaaagacaacaaagagtttagagtagtacataaatttagaatagtacataaacttagaatagtacataaacttagtacataaataatgcacgaagcaggggcagggcttgagagaattgacttcaatttggaaagagtatctactgtaggttagatgctctcaaacagcatcatacgctcyggagaaatcttttgtgaaatgaagagtccattgatgtggcaaaccttattattgtatttttaaagaaattgccatttccaccctaatcttcagcaaccaccaccctgagcagtcagcagccatcagcatcaaggcaagaccctccatcagcagaaagactacaacttgctgaaggctcaggtgatcattagcattttttagcaataaaatatttttaagacgtacttttttagacataatactatttctagactacagtatagtgtaaatataactttttcgtgcactgggaaaccaaaaatttatgtgacctgctttattgctatatttgttttattaactatgttttattattattattattttattttatgtttagttaaatcatattaactaatatagtttacaaaatgaccctatgcaggatgtaccattattaggcccactttacacatcgagatccagagaggttaaataatttaaggtcatacagtactgagtactgattctcctgtcttgactctcccatcttttttttgaaatggagtttcacttttgttgcccagggtggagtgcagtggcacaatttcggctcactgcaacctccgcctgcagggttcaagcgattctcctgcctcagccttctgagtagctgggattacaggcatgcgccaccacgcctggctaatttttgtatttttagtagagacggggtttcgccctgttggtcagaggctggtcttgaactcctgacctcaggtgatccgcccaactcggtctcccaaagtgctgggattataggcgtgagccaccgcgcctgaccaactctacaatgttgattctatcaccatggtcactgcacaattacctgatatgggcagtgcactctaagctgaatttttgcacctgcccccagcagccaaccccacctcttcagtctgaaactgaacccacaataattctgagatatgcctgtagtttttatttctttcatcagagtttttatagttttcctcacatagatcatatatgtattttgttagatttcaacccaagtatttcatctcggagggagttaatatgttataaatggtattgtgttttagatgccaggatctacttcttcattgctgatatataggaaagcaattgacttatttgtattaatcttgtatcctgccactctgccataatcatttacttttttgatgactgtttcagattttctacatagacagtcacatcatctaagcaaagacagttttatttattctccactgtaacgtttatttacttttcttgtgttattgcattagctgggacataataaattcttttttttttttttttttttttttttttgagacagagtcttgctctgtcgcccaggctggagtgcagtggtgcaatctcagctcactgcaacctccgcctcccaggttcaagtgattcttctgcctcagcctcccgagtagctgggattacaggcatgtgccaccacgcccggctgatttttgcatttttagtagagatggggtttcactatgttgaccaggctggtcttgaacatctgaccttaggtgatctgcctgtcttggactcccaaagtgctgggattacaggcgtgagccaccgcacccagcccataatcaattctttattgactgtcctctacatctaaggatgagctaggcaggaaggaggagcacactacagcagggatctttgccactggccagtgtcacaggaggtrgaaatggrggaagaagaagattaaattggygactaataaacttttcaatatagttgtaagtcacatgacagtcttcataaatgtgcatgcccatatttgatgcctccaagagtcttgggaggtgagatattacctccacttcatagatgaagaaatgcagaatagttagaccatctgttcatgttccagaagaacgaaggtgggagcccaggttttctgtcttcaggctccccccttgcctgcctttgtgcctttcctttttctcagcagttccacccctgttggaaccaatcactgtgagcacccatacacaaagaatgctttcaggattggcaggtctaagtatcggagtgtcaattgtcggagagtgagaagtcgtgattcattattgatgtctgcagcgcatggcacttatactttgaaagacatagaaatgctttatatgaaaaatgcaagctccattttactctaagagaagagcgggccatcttcctrctgccattttttaaacaaagacacagaggtcttgagtccctaaggaccttctccttctcccctctgttacccagacctcctgtacagcccttggcctrgctatgattgcttacgcccagtctgcctgtagttcagtatttttcaaactttagacgataacatagattagaaagtcataaggaggccgaggcaggtggatcacaaggtcaggagtttgagaccagcctgaccaacatggtgaaaccccgtctctactaaaaataaaaaaaatttagctggggatggtggcgcacacctgtaatcctagctactcaggaggctgaggcagaagaatcacttgaacgcaggaggtggaggttgcagtgagccgagatcgcaccactgcactctagcctgggtgacagagcaacactccatctcaagaaaaaaaaaagagaaagtcataaaagcttcttaagtcttgaccagcatttctaccaatgaaatgagtagtatacaatacaaaaaattagaaaatgtgtcaaaatgctgtgcatgaaatagaattatttttgtaaatttttggttttgagtatatattttttaaaaacacgtatatttatgcaaaatagtgttacatgtttcatttctgtaggttgtggtcaaaaagttgaaagagccctgcactagactgtgagttgcttaaggacagagaggctgtcctggtcctgtttggtcctcaatgtcatgcatgaagtgtgcacgcactgtaacgcatgtgaatatttagtgtccacatttgatcaggttgtcccaggtactgctcagagtgctgagatgtggtggtaaacaaaagacaagacctctgtcatcaggagctgacagccaatgggcgaggagggggcatagcagggcagggcaggtcaccagtgctggcaccagagcacctatagcgaaatctctgtgaccctgggcagtgcctcttcttttcttttctttcttccttccttcctctctctctctctctttccttccttccttcctccctccctccctctttctttctttctttctttctttctttctttctttctttcctttctttcctttctttcctttctttctttctttctttcttcttgatggagtctcactctgtcacccaggcttcagtgcagtgctgcaatctcggctcactgcaacctcctcctccaggttcaagcaattctcctgcctcagcatccccagtagctgagattacaggcacgtgccgccacgcctggctaattttgtgttattagtagagacagggttttgccatattggccaggctggtcacacatgtacctcttacccttcatttgcatgtcctcccgccatcctacccttcttagctgtttttggataatccctgagcctgctgcatcactttgcacatagaaagtgcttcaaacatcagccctgttaagcgggaggggtcagcaagcttcaagtggccaccctatgagtagcacattaggcagtaatgagaatccctaaggatagatttgaaaaaaacatggaaagtgcctattagttagtggcccaaagaaaacagatttaaattttgttactaacagtattagtacccatctatgatctgcttaaaccaatggttctggtcctcgactgcacattggaattacttggagaacttttttttttcttcttttttttttgagacagtttcactcttgttgcccaagctggagtgcaaaggcgcaatctcggctccctgcaacctccgcctcccaggttcaagtgattctcctgcctcagcctcctgagtagctgggattacacctgcgtgccaccatgcccggctaattttgtacttttagtagagacggggtttctccatattggtcaggctggtctcaaacttctgacctcaggtgatccgcctgccttgggctcccaaagtgctgggattacaggcatgagccaccgcgcctggcccactcggagagcttttatgaagtaccagtgcctgggcccctgccccagagattctggcttaagtggcctggggtagactccaagcattgatcttccttaaatgtcctagggctttcccagcacagccagagtgaggaaggctggcttagaccacgcatccacagggcagaggaatgcagacacgttcactgctgaactcttcatgtggtctgcatgtgggctgctcctcctggctgccatggaaggcctgctgggctgaagttgaattgggcagcctgggagggtctgatcctagagtcagccccaccatggcggtcagggcaggcccacaatgacagccccagctgctggggaagagcatgagagagcatattccctgactcccaaaaccctttccccatttctaatatattaactccccccaaaataaaagacttaggttgaaatataacaaaatacatatatgatctatgtgaggaaaactataaaaactctgatgaaagaaatcaaataactaactatagktgctccggtgccagcactggtgacctgccccgccctgctatgcaaatttcttaggccaaggaacgcacattgggaaatgccgtcttcacctaaccaatgtgcatttctgatacagagattgtgtagacttataggacattagaagtggaaggagctgtatcatttagttcagatttctttgcagatacaaaaacagaggcccagagatttcttctttttccttttcagaagcaactgacataaccatgtgtgtctagtctgcttgggctgccgtaactaagtaccacaaagtcggaggctcaaacaacagagatttatggtctcccagttctggaggctggaagtctgagatcaaggtgccagcagtgttggactctcctgagggctgtgagggagattctgttctatgcccctctcttagcttctggtggtttgctggcactttttggcattccttggcttgtagaagcatcatcgcaacctctgcctgttctccctgtgttcaggcctgtctccaaatgtcccgattttataaggacactggccatattggattttagagcccaccctaatgatctcatagtaacttgcttacctctgtagagaccctatgtccaaataagcttacattctgagatattgggtatcagaaccccaacatagggattttgcaggggacacaattcagtccrtaacagcacacaataatttggtgatgattatattgcagaatttgtctcgaaatctgatacttagtagacgtttattaaatggaatggatggatgaatacataagtcttagcatccagggtattgtgtgtttatctgtatcagaaaacatacaccttgatggtttccattctcctctgagcagaaggctggagttttccagaccagcctccactgtcatgaatcattttgctttattattcgttctggctatatcggttatacttacatcttttcctatgcattctcttttgttctacttcccatccgggatatggctgcatatgcttacctaccctttgctaaatcacaaagccttagctgtgataggtactcgttatttgtttaaaactgttaatagtaacagcaagctagggatacagaattctttctgttacatgattacttttctattataaaagtaataggcggctgggcgcggtggctcacgcctgtaatcctaacactttgggacgccaaggcaggtggattgcctgagctcaggagttcgagacctgcctggccaacatggcgaaaccccgtttctactaaaaatacaaaaattagccgggtgtagtggtgtgcgcctgtaatcccagctactggggaggctgaggcatgagaatcccttgaacccgggaggcggaggttgcagtgagccgagattacaccactgcactccagcctgggtgacagaacgagactctgtctccaaaaaaaaaaaaagtaataggcttattaaaagatgatgaatgatgagggcccagtgtggtggtgcaagtctgtagtcccagctacttgggtggcggtggctgaggacgaaggatcgcttaagcctaggcatatgatcgatataatcgtgccaccacactcccacctgggccacagaggaagactctgtctctaaaataataataataataaagaaaatgaaggaagtatgatcttctcttttttccctttgcatgggtataatttttttttgtatagttatagtcacactgtatagacaatggaatgtcttgctttcttcacttactacagtatcataaacattttgtataaagagttaatttgatgtgatcaaatgaataatcattattaattaaaaattttaaggccaagtgctgttctaaggacttcccttctccccccaaccccccctttttttttctttgagacagagtcttgctctgtggcccaggctggagtgcagtggtgcagtctcagctcactgcaacctccgtctcccaggttcaagcgattctcctgcctcagcctcccgagtagctgggattacaggcatctgccaccacacctagctaatttatgtagttttagtagagacggggtttcaccatgttggccaggttggtctcaaactccggaccttaggtgagccaccctcctcggcctcccaaagtgctgagattacaggcgtgagtcactgcatccagcctaactcatatagttttcaaaatgaccttatgcagaatgtaccattattatgctcactttacacatcgagatccagagtggttaaatatttgtttaaggtcatacagtactgagtactgatactactatcttgactctaccctctggattctatcaccatggccactgcacaattacctcatatgggcagtgcacgcccagctgaatttttgcgcctatccccagcagccaaccccagttcttcctctcccaggggtacacaatgcaagtcttgactctgctactcaatactgtatgactggaaacatgatgatagaatctactatcttgattctatcgccatggcctctggagctagatggaccttctcagtccctagctttgctactttgctgtgtcacctggagctggttcccaatccctctcagtcagctttctcctysgtaaaatggacatcttaatactgatctcctagcacacagtaagtgctcaataaatatctggttaacgttatatttacatgaaacaaactcagtggagtatttgtctgtcatccagttcaaagcttccttcctttcttttttttttctttggaaacagagtcttgctatgttgcccaggctggaatgcagtggcatgatcttggctcactgcaacctctgcctcccaggttcaaggaattctcctgctccagtctcctgagtagctgggactacaggtgcccaccaccatgtctggctaatgtttgtatttttagtagagatggggttttgccatgttgcccaggctggtcttgaactcctaacctcaagtgatctgcctgccttagcctcccaaagtgctgagattacaggcgtgagccaccacacctggctcagagtttctttcctcaccttcagctcaggcctgatctgaaatttggaggccttaaagttaggcggttggacctggctctctccctcctccccggagatgagaatttggccactgcacaattacctgatatgggcagtgcacttccagctgaatttttacacctccccccagcagccaaccccagctccttctctcccaggaatacaccttgcacctcttacctgagcaggtaagaggcctgcgtgctttccagaaggcactggtgcatgtgacccatggaaaacatgccccactgtgccatcatccagggcggctccagctagcatcttgcttcctcatgcccacaggttaggtcttccagtggcagaaaggttgggcctgtgagtacccacagtccacaagaatccagctggggagtgagaggctggtccccgcccctgctgataagcaccccctagtggtgatcttgacgccctcatcacttggcttggatggrgcagagagcagccctgtttctccttatgagcagagggagggcagcagccccagctttcactccttccgtgaatttcttctaagaaatctctttctcttattgatatggtgtggctctgtgtccccacccaagtctcatctcaaactgtaatccccatgtgtcttaggagggagctggtgggaggtgattggatcacgggggtggttatccccatgctgttctcacgacagtgagtgagtttgcacgagatctgatggtttaaaagtgtgtggccgatccccccyctctctctctctttcttactgccatgtaagacgtgccctgcttctccttcaccttctaccatgactgtaagtttcttgaggcctcctcagccatgtggaactctgagtcaattaaacctcttttctttataaattacccagtctcaggcagttctttacagcagtgtgaaaatggactaatacacttctataagctgaaggtggggcttggggcaagggtcataccaccacatttgacccacccttagctggtcttggggtttaaacagcacctctctgtggaacatgtacacaccactgtcctcacttgggcccaatcaaaactcctatgacactaaagacatcccatctcacatcctcctataggatgtcccattacagtctccgccgtatagctacgtaagggtttctttatgtttattacgggacttggagattgtttcaactatttcactgttctaaatgctgcttcggtgaatgtcacgatgtgagtacttgccccccactcccrcataaggttgtatctttcctacaactaccctgatgtctgtatttgtagactagacctaaggctgattgccagttcgttcttccactaagcaacccagaggcactcaaagtcccttcctagtgataagtgccaccaaataaaagaaatgatgctgttttatctgttgaaagcctagcagtaactacagtcttgtgctgcataataaagtttactgtcaacaacagaccatgtgtacgccagtggtcccttgagattctttttttcttttttttttttttttttgagatggagtctcgctgtcacccaggctagaatgcagtgacattgtctcagctcacttcagcctccacctcccaggttcaagtgattctcctgcctcagcctcccaagtagctgggattacaggcgcgcaccaccgtgccaaggttaattattgtatttctagtagggatggggtttcgacacattggctgggttggtctctaactcctgaccttgtgatccacccgccttggcctcccaaagtggtgggattacaggcatgagccaccatgcctggccgagattctaataccatgtttttactgtgcctcttctgtgtttagatatgtatttaccattgtgttgcagttgcctacagtattcaagtcagtaacatgctgcacaggtttgtagcccaggagcaataggctttaccacccagcctaggtgtgtggtgggctacaccatccaggtttgtgtaagggcactctatgatgttcacacaacgaaatcacctaaggacgcatttctcagaccatatccccattgttaagggacacatgactgtaattgatttctttgatatctaacatgtctctcaaaaatttaagttctgcattatgttatacagaataaatggrgaactatcttagttaatgattgatgctaaagtagccacccaatacatagtgactagttttatcttgtttcctcatcaaggaaacagaaatctatttccaaggatgcagagtttgtatctttttctttttctttttcttttcytttttgagacagagtctcgctctgttgcccaggctggagtgcagtggcgtgatcttggctcactgcaacctccatctcccgggttcaagcaattctcctgcctcagcctcctgagtagctgggactacaggcgtatgctaccacacctggctaactttttgtagtttttttagtagagacagggtttcacccccttagccaagatggtctcgatctcctgaccttgtgatctgcccgccttggcmtcccaaagtactgggattacaggcrtgagccaccgygcccggcctagagtttgtatcttcagtgggacacgcccctttgtctttgacccctcacacaccgcctgcaccttccttttagagagctggattcctccttcctcctagcccccatgcatactctgtcattcagagaccagggccccatctattgtgctttatttcctaggcttggtgtcatccagaactagagcagggggatgactcggctttgctartcttgacaatttagaaagagcctggggcctagctgcccagtttgacaacttggcatcttaaagccgaagggaaccttagaaatcacattgttcagcctccttgctttacagatgagggaacctgggacagtggatgagtagcagagttggcccggggcctggcccagcacccccgccagatgcccagcttgtctgagttggtagcagttgttaccacctgctgctgggcctcttgccttgcctaaatctagggagatwtagacttttccacagttctgaatgatactcatctggcagaatggtrcagataaaagctactggaacaaaactgggagatggaagkgttgctcctttccttaaattggatggaaaggccgkgtgtggtggctcacgcctgtaatcccagcactttgggaggccaaggcgggcagatcatgaggtcaggagttcgagagcagcttggccaatatggtgaaaccccatctctactaagaatacaaaaattagctgggcgtggtggcgggcgcctgtagtcccagctacttgggaggctgaagcagaagaatcgcttaaacccgtgaggcggaggttgcagtgagccgagattgtgccactgtactccagcctgggtgacagagcaaggctctgtcttaaaaaaaaaaaaatagtggatggagaggcagtgggcagaatcccatccaacaacttcattggcttggcagggcaaccagctcaccagactctctgcagacccgaagtcattacatacagtatgataacagggaatggacccgaccagcatttgctggagatgatatctggtgtcagcccgacaggcccctacctgcttctcttgatatgcaggaatcccttcaagctccaacaagatctgtttaatagactggagagtcctttagttccttcctctaagggaaaatcagatcgttctggtttgcttggtaactccttacttcatccctgatgggaagtttatagaatgaggaaccagggctattacatgaaactataaaactgcctagagcacatacttggtatttttaacattgttgagagggactcacttaattcagccttgcagctattgcattccagtccaaaccaacggcaggttctcaaaacaagcggtgaaagggttcctgttgcagagctgtctggacattwaaagaagggagaggaaatctcaaggggtcggttgcactggaatagaaatcgcctgttctttttttttgagacggagtctcgctctgtcacccaggctggagagcagttgcgcgatctttgctcactgcaacctctgcctcccgggttcacgccattctcctgcctcagcctcctgaatagctgggactacaggcgcccgccaccacgtctggctcatcttttgtatttttagtagagatggagtttcaccattttagccaggatggtctcgatctgctgaccttgtaatccgcccgcctcggcctcccaaagtacagggattataggcgtgagccaccgcgcccaggtgcctgttccttttttaagagtctcactctgtcgcccaggctggcgtgcagtggcgcgatctctgcttactgcagtctccgtctcctgagttcaaatcaagcgagaaatcacttgttctcttctgtgaacggaagcatcgcrgatctcycttggcctcacactcctccatctccctgattcctctgttcttcatttacctaccttcccagcagtctgcagagctggccgctcactcacctctagtaaggggatggagggtcctgtgttrgaataactcactgaccgctagaaagttaaaaataaatgggtaatgccaggagaacttggctggtgccttaaaagccatagaacttctctttccatctgtagataactgtagacaattttgtccaaaacagataatgatctgattctacctcccattggtatttcccttcctcggcctgtgacatctcactttctctagactgaactttatcccagactgtgaccttgccatgaccttcctcctgcgtgtgcctctgccaccacaggaatggccacgcctcagatcatgtcaccgctgggaacaaaccctctaccygcgactctgaagttccctctctgaccctcttttctttcttccccycccccctccccctcactccctctgcacctgtgtttcrctgtcacgctcccaactcatccctgtagagctggtgaagagatgctgatgtagttcttgaccttgaaccccggccctgcagccgtcctgtggcctcactgacccagcgtcatgccctggtcaagcattttggtgatgctcttggtgattttcaatgggacctgccttgccaagcccggggcttaggtgaaccaggaccacctgcattctatgtttttgattgctggaaaaaaatcatgaaatgtcaactgttgttctcatttttcccactgccagttcctgctacccaacctccgccctcatttcaaggccttgagtactttttttctatagtgaagtctcccaaaaatgatattttttwaaaaaagaaaagccatagtactctgatttgatgtggtctgttaatacctatgggctttgacttgtttctgcttttagacctagacaaaataaaatatctgtggtaaaacatwttcaagtttaccgggcacgggggctcacgcctgtaatcccagcactttgggaggctggggcaggcagatcacttgagcccaggagtttgagaccagcctgggcaacagggtgaaacaacatctctacaaaaatacaaaaaatacctgggcattgtggtgcatgcctgtagtcgcagctactcgggagactgaggtgggaggatggcttgagctctggaggcggaggtcatagtgagccaagatcrtgccactgaactccagcctgggcaacagaggcagattctttctctctaaaaaacataaaataaaaaaaggccaggcgcagtggctcacacctgtaatcccagcackttgggaggctgaggggggcggacgaagaggtcaggagatagagaccatcctggccaacatggtgaaaccctgcctctactaaaaatacaaaaattagccgggtgtagtggtgcatgcctgtaatctcaactactcaggaggctgaggcaggaaaatcgcttgaacccaggaggcrgaggctgcagtgagccaagatcgcaccactgcactccagcctgggtgacagagcaagactctgtcccccaccaaaaaaaawaaawwaawaaatcaggccaaagggcaaaaatgcttgctttttagcacttagtagttatttccccaagaagagcgggagagaagtttattaataatgaaactggacagttctttatcagctctaattgtttgactcaatggcttctcttctcattaccatgcagtgctctgctggctgcaatgcctttgaacttcacaagaaggttagaatttcactgagacattcggatggtgtgggtgtcagggtgcagctctcacacatagttgagagtgtaaattgatacaactttatggaaaattaattgggagtacccattcacactcctgtctagcaatctcactttaaggacttgatcctacagaactcattacatggtgcaaggttcacagtgcggcattcaaaatagagaagagctgcgggtaactcccatgcccgttggcaggaactggttgaataaattatggtgcatcagtgctgtggggtatcattaaaccattaaaaagaagagagagtcctggccttaaaaaacttatctgatgtattgttaaacagataaagcaagttgtagatcaatatgatttggggctaaaaaaatatttctatataggtgtgaacatggccatgactaaggaatcaggaaggaagtacctagattgtaaccagtaacatgtggggagtgagatgggattgagagacgtaataatagattgagagaaaaagattttcccatctctttttgattttttaagaaaacagcatgattttcagtaatttttacttttgtgtgtttttggtattttttctttttctttttttttttttttttttgagacggagtttcactcttgttgcccaggctggaatgcgatggcccagtcccagctcactgcaaccttcacttcccaggttcaagagattctcctgtctcagcctcccgagtagctgggattacaggcccctgccattacgcccagctactttttgtatttttagtagagatgggtttcaccgtgttggttaggctggtttgaactcctgagctcaggcgatctgcctrcttcagcctcccaaaatgctgggattacagccgtgagccaccgcccccagccggtattttttcaaatcaaagaaaaaataatagagtaaatcatccaaaactttagatggtatttagactcagtaaacttttcatatatgacagatgaagccaaatggtctttctgtgcagtcagctagcacacaattgtgcacccgaggaaaattagagactgaaccggggtgtctgtggatgcatttcctcagcattcagccttccttttgcccgtgttctagcattacttctgtcctacagcctgggatttgtgaatgaaatagacaggtgcaaaaactccctgcctgtctgtaatatccatagccccgtgctctacttgtatttgcatgtacaaaccataatctcctgtaaaatactctgtgatatttctgaataataataaactctacatcctacacaaaggcaaaacccctgtatctttcatctttgaaaccatagcaaaggtatgaaattacacctgagcatgcctggcctcaaagtcctggaacggttatgtctttgaccctcacttcaactcaactccagaagaagcaggtcttccttgtaattggatagaaaactcattgtagagaagaaagatctacaggtcaagaaacccacaggtttgctgtaatccgagcaaagcactgtagcatttattttatattttcactcttcttatttagctcttttttttttttttttttttgagatggagtttcattcttgtcacccagcctggagcaatggtgccatctcggctcactgcaacctctgcctcccaggttcaagtgattctcctgcctcagcctcctgagtagctggggttacaggctcccaccgccacacccagccaattttttgtatttttagtagagacggggtttcaccatgttagccagactggtctcaaactcctggccttaggtgatccacccgcctcagcatcccaaagtgctgggattacaggcgcaccggccttagctcttttatccttaatgaaatgctcctcattccctgaggtctcacttgaattcttgcccacctctgggttgccttcctcttctgtctgtgctttgtaacacgtggttccttatgatgtcaatatttatgcatatgtcttcattccattactggattataatcttgaagcaacagatttttgtctctatatcccagagcctagaatggattcttacactgggcagtaagtacttaataaatgtatcccaaatcaaataaatacatttcttctttttcttttctttttttttttttttgagacagggtcccactctgtcacccaggctggagtgtaatgacatgatctcagcttactacagcctcaatctcctgggcttaagcaatcctcccacctcagcctcccacrtagctaggactacaggcgctcaccacaacacctcatttttgtatattttttgtagagattgggggatctcactacrttgccccggctggttttgaacttctgggctcagacaatccacccaccttggcctcccaaactgttgagattacaggaatgagccaccattccctggccaaatacatttctaaaagccagtttctggagtatactrtcaaataatagatatatgtccacatttttatacggacttataytgtaagaaaaagtaaaaataagtgtgaagttattacagtaatagtaattattttgcagaaaaagaactgagtttaaacaggctttttagaaaaacccaacaggagattcacagtctggtactaacgtttagacatggatcatcagtaaatgtgttccaaagagttacacagataccagctttgtcttgggaattcttacccctgaaaattgattgactrtcactgactgtgtgacatgagaaagttttgtggggttttttttttgtatttttttgagacgtagtcttgctctgtcacccaagctggagtccactggcgcgatcttggctcactacaacctctgccgcctggttcaagcgattctcctgcctcagcctccagaatagctgcgattacaggcacctgccaccatgcccggctaatttttgtatttttagtaaagacggggtttcatcgtgttggccaggatggtcttgaactcctgacctcaggtgatctgcccacctcagcctcccaaagtgctgggattacaggcatgagccaccgtgcccagcctgaaaaagttttgaacggtctaaatccatatgctgtgaatcctattaccatcacacacttaggcatttaaaatcatattttcaaggccaggtactgaaatattttctgcaagcagagagatcaaactttagcattgttattcttgtagtagtttcatagtttgaggtcttagatttaagtcttccattgattttgatttgatttttgtatatggagataggggtctagtttcattcttttgcatatggatatccagttttcccagcaccatttattgaagagactgtctttttcaccagtgtatgctcttggcaccttcgtcaaaaatgagttccctgtaggtgtgtgggtttgcttctggttctctattctgtcccattggtctaagtgtttggttttatgctactaccatgctggttggtatagctctgcagtataacttgaaagcaggtaatgtgattccaaagaagctagttaagtaattgagctaaactggaacctcaggtgtagaagtcataagcgtggggagcgtttcttctcaggttctctgcctataatttagtttgccacaccagatgaacagtgacaacttggtcttggtgttcgtggtggtttccaaccaaactttggtcataacaggtgaaccagcctggggcatgctttcccattcggttatcctccccatagtttgcaaagtagcaaagatgaactcttcatgagttggctaagcatagacatttcaagaccaaactaaacgtcctgaagagcatgtttcacattaaactagcccctaagggaccagtgggggctgtcagagaacaaggtttcaacgtactgagttttaaagatctaattggcttttaataacrattcatgaaccaggcaccatagtctacaaaatagacagggtttctgctgggcactgcaggacagttggtttttggaaggtggcttgagcaggaacaaggaaaaagcaccgtgccaagagtggattggttaacatcaggggacttcgggtgactttccttctatgggttaaagcaaaggggacttccctagcatgtcagctcaggttgactgggcccctttggattggttgctgtgaatctcctagttttttttgttttggtttggtttgggtcttttggggaaaacgggccagtttggagattcagctattatttctctctcctgatatcagaagatcagatcttatgagtacacagctgaggttttgggttggtgatgtggaaccctggtgtgagtgactccattttgggttggtctattggggtctcggtgcaggagctcagtccaaatcartggcctctcctcatttttatttgacttctccatcaatctatccgtgtctcccgtcacatcagtccattcccccgtgggctgcacattcagctcggagctgagagcttttcccagggtgtgccctggggtttctgctgcttgcagcctgatattaaatctcaggtgtaaatcttcagaggcaactgttccttagtacccagagctttcagctccctgagcagaaatgggacttgactgtcagtttataaactaaccaaggtgtgaaattcatgcaacttagccgactttctgttcaaagaattcttggcagcagttaatacattttgcccaaatataagataattcccttgtactcacaatgagaaagttttacaaaatgggggttttctttagtttacttgaatataaaacataggtgttccactctgcagtaccttaacagttcttaaggagatgtttgaaacaacccatgtccaggcctcacacctcgccaattaaataaatgagaagttcttcccagccagtgttaagaaaaattaacatcaagttttaggaaggtagacagattatgcaaatgcatacctatatgatttaagttattacattaatttacacacacatttaaaatcatagattaatctaatttagagatgctgcattttttccatctctcctgtttcataaatgttattcacacggcatttctctgctatcctcggaatagtgtttgtatcgtgtcactctggcacggggctctacagaacatgtcgagcgtgttgccttccctactgcccacatcgtttgagagaacacattttaaacatttttttattrtggtaaaatacacataacataaaagttacgattttaaccttttttaactctgtcatccaggctggagtgcagtggcgagatcttggttcactgcaacctccgcctcctaggtccaagtgattctcctgcctcagccttccgagtagctgggattacaggtgcacaccaccacrcccggctaattttgtatttttagtagatgcggggtttcaccatgttagccaggttggtctcgaactcccgacctcaggtgatcagcccgcctcgcctccccagtgctgggattacaggcgtgcgccactgtgcygggcccattttaaccacttttaagtgcacagttcagtggcattaagtatattcgcggtgttgtgcgaccgtcaccaccattcacctccagaacttctctgtcttcccaaactgaaattctgtacccattgaacggtaactccccattccccatttctgcttcctaggccctgacatggaggctgggccaacggatatctcacctcccttcaggcttctccagatttgcccccgtttttctccctctttgtcccatctccaaagaaatggtgtcttttcatcatcaaggtccatcccttgctccttgaatacactccaggcccagtggaacaggcatcctgtggggtgcacggacagggtgcctggggaacacccagggcacagaacccagaccgggggtttggagaaggtgtcctagcagaagtgatgtctaagctgaggccctacagataagagaaagtaagcagatgaaagggctggggagggtggcatttcaggcctacacaaccacacgcgtgttcttcagccatctccatggcctcactgcccacctggtatcagccggccaccayccggctagaacggctttcaaaatcgctgctcgtctactcctcaccaaatcttgtcttcacttggtgctcagagcccatcacctttctgcaagtattttttttttttttttggagatggagtctcgctctgtcacccgggctggagtgcagtggttcaatgatagctcactgcaaccttgaactcctgggctcaagatcctcttgccacagcctcccaaagtgctgagattacaggcacaagccaccatgcgtggtccttgctgcaacttkytttttttttttttttttttttttgagacagaatctcgctctgtcgctcaggctggagtgcagtggtgtgatctcggctcaatgcaacctccgcctcccgggttcaggtgattctcctgcctcaccctcctgagtagctaggaacacaggcgctcaccaccacatccagctaatttttgtgtttttagtagagccggggttttgccatgttggccaggcttctctcaaactcctgacctcgggcgattggcccgcctcggcctcccaaaatgctggaattacaggcatgagccaccgtgcctggccatttgctgcaacttttgacactgctccccctgcttttcttcccctctctgacctcctttctctgctgtcctttcgttccttcctctgccactgaagtgtccttctcaggtccttctcaaggttgtgaccttacagctgtctcttcacttccagtcatttctttcataatcactttgacatccttattttcatctcctgccctggcctctcccagggaccaggaccatgcattcagctcctgggggcatctcaagcttgttgtgtgtgagcctgcccttgttgtcttctccgtcacctcttcacagcttgctctgcatttcacctcctttcctgttttccccagtgatcgcatctctacagcggctctcacttcatccccttctctcctagaggagtgatgcggagtctcattaatccttgcttatgtcattcttcccccttctctgtccatcacctccacatgtcctgttcccccatgcgtcctacactgtagccaggtgggtatttcctgtgctggtcttagacaccccctgaggataccctgcttcaggcgagagcccctcagtgactccctgttgtccggaatgacgtccagctccttggacaggccccagtgtattcacctgtctcatctccttcttttcgttttgtttgtttttcttaacttccagcccgatttctgaatcatctccctcttgcccctcccattgcctttgcttaagactaaatgctccttcctcccaagtccccactgcccagatttcagcagggtccatctcaaacatgtctgtctccaagaaactgcctctgatttttttcataagaagacacctgtcctctctgacttcatctgtacccctctcttggaagtcactatcttgtgccttgcattttcgttgtttaagtggtctccatttcccagcatatcttgaggtcaagggttcaggtcattttatctttgtctatgcattgcaatatgggggtttttacatattagctgctcaataaatcggtgttgaataaaggcatgtgtatgctttcattaagactatgaaacccacaaaaatcagtggttttcctatttcacccttagaaaacaaacccacaacatagcacaacctgataatcagagctaagaacaaasgtcatgcatattaatctaaattctatctttatcaactttcacaagtaattcgtatttccctgtctgcatcacggggatgattctggccagacattgaccttggtaaaatttcctccagattatgagaaatcaagtcaaatatgccaagtaacatagtttctacttagagtcaggttcatgttttagcaggaacctcaaataccacaaaatctgtcaagttctaacatttgtatctctcgacagtacctgaagttcctgtttctgtttcctcagcccaggtttccaattcagtgagcagaacggtgactgtgttggtaaaagagcccacatacctgcccgatcctgcaggagtgttgcagatgcaaacaggcgggtctccacatgacctgcggagtaatgactagtgtccctaaagtcatggggcttctggggttagccttgaaaaaagctaaaggttgcatagagagagatttctatccgttcagagactcactataattctctctttctgtctctgtccttcatctgtttctctctttctctctcaytctctctctgamamacacacacacacacacacactcacactcacacactcctgagtaagggaaatgtgagaagaaggtaaaacttcaactaaatgaaaagaaattgtatgaattatggtaagcaggttggtttttagttccagtaaagatagaaatatttagattacttaggagaaaagtctagctggtaacacatgggaatgtgcctgtgtgaaaacaaaacaaaacaaaaaatctaggcttgtggttaggtgaaggtatgtacactgctgagacatggcgatgggtgagcttgggatgaggagaaaggcttctctgagaagattaagagagaaagattgtttaaaaatgtttaaaacatgctgggcactgtggctcacacctgtaatcccaacactttgggaggccaaggtgggcggatcatgaggtcaggagttcgagaccatcccggccaacatggtgaaaccctgtctctgctaaaaatacaaaaattagccaggcgtggtggcgggtggctgtagtcccagctacttgggaggctgaggcaggagaatggcgtgaacccaggaggcggagatgcagtgagccgagattgtgccactgcactccagcctgggcgacagagcaagactccgtctcaaaaaaaacaaaaaaacaaaaaaaaaacacacattgacaccaggacggagttagcacatctttacaggtgagactctcagacccgagaaaatagaggcactttagagctgagctaatcccacagccacctcaacacacaaacggggaatctgagacccgcattggcaccgtgcctgaggttctaaagcccagggcttctgactcgcctcttgtgcttcttcagtactgtgggtgggggtggggtggggggtgacattagctgatgagaaagattttggttttagaaagatggagttaacataaacgaaggtgtactgggactggtctcctctgctgacttcatgggaagcacacacacgcacacacacacacacacacacayayacayacayacacacacctgtccaagatcagaaaaaatccctcacatccctgtagcatgatcctgattgtaaaaatggagccctaatcagaagggcagaagcatgattgcctctcaagagatttggacgccactttttcatagttggttttagctgctttgcgatatatactgaaataaatagaaaagggaaagaattgtaacctggattgacagacaacaagccctgacagacaaaaagcagataagaaataaaataaggaagataacccataatgtaaaataaaaatagcacattgttgcatgcattgatacccttttttttttttctttgagatcttgckctgtctttcaggccgaagtacagtgtctcaatcatagctcactgcagcctccagcttctgggctcaagcaatcttcccatctcagccacccaagtagctggggctgcaggcacgaactatggtgcccagctgataatttttaaaaatagggacattagtgcatttagcaaatttgagtgtctgctgtgtatcaagcactgttctgggcactgggacagcacagggagcaaataaacaaaagcccctgcgctcaaggtgctcgtattctagagggagatgctgagttcacctcccattaaaatgccattctcaagatccagtccctccacccaccccagcccccagggttttggtggaaatttaactaagttggaagattgataatatctccattcacatttggatatgattttaatgaaggttgctttttggtttttagggagaagaaaatggctttccagatagcactggagatcctcttccaggtaaatgattgattytaaagctatctgggctaatagctagtgtggctgaataaaagataatttgaggccagggtcggtgactcatgcctgtaattccagcactttgggaggccaaggtgggcggatcacctgaggtcaggagttcaagaccagcctggccaacatggtaaaaccccgtctctaccaaaaatacaaaaattagctggttgtggtgggcgcctgtaatcccagctactcggaggctgaggcaggagaatcgcttgaacccgggaggcggaggttgcagtgagccaagatcacaccactgcactccagcctggacaacagagcgaaactccatctcaaaaaattaaattaaataaaataaataatttgagactatgtttatcattaactttaaaatctgtactgcagaatagagcaactttctacctgcggtgcactgcagggaaagccgtatcttacaagacttcacaaaagccttcaaagagtattttctctgcactaaccttcctttgcatgtgaggggcacggcagggttctgaatggggcaggtttaggatcaggccagtcgggactgagtggattcttcttccctctgagttctaagagccatagcattggtggagaacatgctgtttgttgcttggtggaagggaccagaagccagctgggtcatctctctgtktgtgccttggccacttaggtarccaaaggagccctcctgacattaggtcaggtgttagtccctctccttttctgcttttagtgtgtttaagcaaataaacattaaagttcatttctccccgctccccttttttaatcataagacagacatgtttgcaatgtttaaatttctcattaatcagaagggatagggagtgagggagtaagcattaaaataagctagcaaatggccaggtgtggtggctcacacctgtaatcccaggactttgggagkccaaggtgggcagatcacttgaggccaggagttcaagaccagcatggccaacatggcaaaactccatctctactaaaaatacaaaaattagccaggcgtggtgatgggcacctataatctgagctactcgggaggctgaggcagagaattgcttgaacccgggaggcaaagattgcagtgagctgagactgcaccactgcattccagcctgggtgacagagcaagactccatctcaaaaaaatgctagcaaaataataataataataataataaaacatacctcaccaacattttctacatcttgtaaagcatacattgactgactgaagtcaccagagttttgtttctttctttcttaagcagggtggggaacccgtagagccctcaggggcagctatcatcagcccaggtaaccaagctgaaaaaccagaaggtgcagtgcgtactcaactttttccccttagaaacacgatattagaaaatacaccaataccaacatgtgagcaacagttctctctggaaggtgcagttctgggtgatttttttttcattccatagattttttttttcttgagacggagtttcgcactcttgttgcctaggctggagtgcaatggtgcgccaccacgcccggctaatttttgtatttttagtagagacggggtttcaccatgttggccaggctggtctygaactcctgacctcaggtgatccacctgcttcggcctcctaaagtgctgggatgacaggtgtctcactatgttgcctaagcttttctcgaacccctgagctcaagcctcctcccacctcagccatccaaagtgctgggattacaggcatgagccaccacgcctggtgagtttttattttctttccactatcctatatttctaaaatttctaacatgagctggtatcagaactgcccctccgcatttaatctgtgtatacaaatgtatatataacaaatgatcacatgttggtaagtataccttgctgcatggtgaaataaccaaggaaacttctaaaaggttaactgtggttggcctgggtaatgggagcattaattttttccatatgctcatctgaattttcagatttgctatgacaagcacatatttattttctaattttaaaaatctatatttaaactctttaaagactaacaccctacacactaatgtggcacgttagctaaaataaaaataaatacagaaatttgtttagaaatatttgtaaacccttcaaggactcttctgaatgatagtcattattaattagcaggttaattttaatcaggcttctggtcatcttcaaacattttttacttgtgtcaaaatgaaccaccagagtgtgggtttttttgttattttttttgtttttttgagacagagtttcactcttgttgcccaggctggagtgcaatggcgagatctcggctcactgcaacctctgcctcctgggttcaagcagctctcctgcctcagcctcctcctgagtagctgggattacaggcgcccaccaccacacccagctaatttttgtatttttagtagagatgggttttgccatgttggccaggttggtcttgaactcctcacctcagacgatccacccacctcagcctcccaaagtgctgggactacagatgcacaccaccacacccggttaatttttgtatttttagtaaggacgggggttccccatgttggccaggctggtctcaaactcctgacctcaagtgattcacctgccttggcctcccaaagtgctggcattacaggcctccgccaccgcacccagcccaacctgggtccttttgtatgtgagagtttgcttgtttttttcacgtgctttctctactccagttttattctatgacaaaattgaggcccaacatgatttacttgcctggatccacccaacctgtcagttacttcccagtgctgctgccaacttaatgtctccttaaaaggatgctttagagaaaacgaaatcatgttgtttttcccctttggttaagagatcaaacgcccaccaaaagcccttgggtcagtttcttagtagataaaaataattcttcgtcactttctgaaagcggctaacatataacccttatgatgaataatgtggtgtgtgtgtgtgtgcgcgccccaaattccaatgagttatcaaagccagaaacttatattttaaatatgtttatttcccaaccacactggaaaccacacacagaaaaaaaaaaaagcatgattatacccccttaataaccgttactgcagaaggatgtgactctccttcaacacttgttggtattttacagcctccaaatctgacaatgtataaccacctgggatagagttattttatttcagaaccataatacttagctatctcggaagttgccaatataaaatgtttactctctaatggttttgaactaactcaagacctggttatcccggggagcatccttacaaatgatctgagagctaacagtcctcttgcagcagtggagggaaacactcccgtggcaatcactctccaaaagccagaatgtgcaagataaaagggcaccttccctgcagggaggcacattaagtcagtctgtgatctgctgccaacatcctgactggagccgtttctacgcctaactaatcatgacgtttgtgaattgtgaagcttgttgcaattcacaattaactgttaattgacccatattttataacccgccagccatgaacttacaagttagatacagacactaccagacattcactatttttttttacaattgttttaartgacattaatgagcatgcttgattcctgaactcttctttacagtataattttaaaatatttgagtgggatacgatggagaggagggaggtgggggaagaaatgccccatggaaaacccactcatcaggttgagagtgtggagaagccctgtgtatctgagaactcttaatcatccacagacatggtatctctcaaagagaagtgggtgtaattccaaaatctaattttggcaggcgctcctgactaaatacttaatctggagatgtcttcaaggcaggcggaggttttcagtcctggctgcacattagaagtcccaggggagctttaaaaaattcccacgtcctccctgcatcccagactaattaatcgggatctccgagggtgggaccacacatcagggttttgtaaatttccctgggggtttggtggggttgggggtggaggcgtcyatcctatggccaaggttgagaaccactgctttttaaaagactgtttgcttgtttttgagatggggtctcgctctgtcacccaggctggagtgcagtggcgcaatctcagctcactgcaacctctgcctcctgggctcaagcaattctcctgaaaaaggctgttggttattaatgcttccccacagctattctattcattgttgcatgcttcttacgtgtgctaggatgggagctttaaaggattacctcatttaatcctcacaaccaccttgtgagagaggtgtcattatccctgtttggagagtgagacaggggcttagcaagctcagtaacctgtccaagtcacacatctgcayggggttagctgcygctaaagctcatgccgttaatctccatggtacacggtgtcctctccatagcaatcttgcggctgccttgttaacaccaaaaaaacttgcatcagctggtttgacaatttctagataaagagctcttttcgggctgctaagaagcctaatttttcatttgattttcttcttgaactgtgtcacactcctcattcatttgatatattcatcaaatacttattgagcacctgctgtgtgcctggtgtgcagcagtgacaccagacatccaaagtccttttcctcttagagcttattctatctgggagagacagataataaacacaaaatcagtaagtcattttatatggtggtaggtgccttgaggaagatgagccaggttaatgggattaagcctggtagggggagggtgccactttagctcggaaagggtagcgagacccaaacaatgcaaaggacccggcccgtggagatctaagacaggaggatgccagggacaggaagttgctggggcaaagsccctgaggctggactgagctcagtgttctaggacrggcktgggcagtgaggagcagcagaggaggtgagctgggagatagcctggggactctttcttctgcctccttcaaaaaataaaactagccaggtgtggtggctcacacctgtaatcccaacaatttgggaagctgatgtaggtggattgcttgagtccaggagttcgagaccagcctgggcaacatagtgagacccctcccccatttctaccaaaaaatcaaaaaattagctgggcccggtggcgtgcgcctgtggtcccagctactcaggaggctgaggtgggagcgttgtttgaacccgggaggtggaggctgcagtgaggcgtgattgtgccactgtactctagcctgggtgacagagtgagactctgtctctaaataaataagtaaatctagaacctaacatcttggagtgcagtggcaccaccatggctcactgcagcctcaatctcctgagctaatcgagcctccccttcagcctcctgagtagctgggactataggcgtgcaccaccayacctgaataatcaaaacctaacatctttaaagaacattggcataagacttggcaaaaatggcatcttgtccctcatctcatttagtccaagcgatacaggaaatgctgccacctccattttatagatgaggagtctgacgttcctagaggttcaatgccctgaaacgtcaagccttgaggaagttggagcactgggattcgaagagcaccatccaatacagacccagaatcaggatgatttgggattatgcttgtcaaggactcagggcagggctaccatacattaggcacaagaattttgatagtgataattactgtgttcattgtcacttcatcatgacagttaccgtgatgataagaaacctggcccttcttcacctgacaaaggctttcttcgtttgagccactgctcaaacgagactgaccaagaataaatcctcggggctttggcctttaaaataggaagtcatcataaatgacttgatgtggtgtgtttcattcttgctttgcaccagtggaaaatatacaggtcaagcatcaaaacatggcaaatggggaccccaattattagagaatctaagttaatttttatgtataattaattattcaacaaccctctcctctccaaaccaataattaatccatcttttgtattttaagaccaattctgtagtattttccatcaatatctatttactgctagcagatatcagctacattctttctcctttaatagaagttccctctttaggtattaagattcattaaacaacaataacaaatctaccttgcctcccagggacaatgcacagttctcattcatttgttcatttagcagataatttttgaatttccactgtacagcagccctgtgcttgtggttggcctgttatttgagaagcatcaaataataatctcattttttggctgggtgtgatagctcacgcctgtartcccagcactttgggaggctgaggcgggtggatcacttgaggatgggcgttggagaccagcctggctaacatggtgaaacctcgtctctattaaaaatacaaaaattagccaggtgtggtggcagacacctgtaatcccagctactcgggagggtgaggcaggagaatcgcttgaacctgggaggcagaggttgcagtgagccgagatcgccccattgcactccagcctgggcaacaagagcgagactccgtctcaaaaaacaaaacaaaacaagacaaaaaaaaacccaacaaataaaataaataatcccatttttctccatttttgagaaagatttctttggtctgaagtctttctctcccctctccgaggcattacccagtttaacctttcatgtataatatatatgatagttatttaaagtatagcaggacaaaatgtatttgataggagaaaaccttgtttgctctgtgttaagtcctccagagagctaattagagtttgtgattctaaaaggcaactatagattcacttatattagcagttcatgtagattccagttaaggaaatkgtttgtcacttgtgttattgaaaacacacacagggcgagcactgtggcccatgctggtaatcccagcgttttgggaggctgaggtgggcagatcacggggtcaggagtttgagatcagcctggccaacatggtgaaaacccgtctctactataaatacaaaaaattagctggcagtagtggcaggcgcctctaatctcagctactcgggaggctgaggtaggagaatcgcttgaacccaggagtcggaggttgcagtgagtcgagatcgcaccattgcactccagcttgggcaacaagggcaagactccgtctcaaaaaaaaagaaagaaaacacacacamaaaaaaactttagtagatctttcggcatattattttttaaaataaactgataatggttgatatgattgttcaaagaaataagagcttttcataaactcagtttaaagaaactttacaggccgggcgcggtggctcatgcccgtaatcctagcactttgggaggccaaggcggrtggatcacctgaggtcaagagttcgagaccagcctggccaacatggtaaaagcctgtctctattaaaaaatacaaaaattagccaggtgtgttggctggcgcctgtaatctcagcaactcaggaggctgaagcaggagaatcgctggaacctggtaggcagaggttgcagtgagacaaaatcgtgccattgcactccagccccagctgacaacagcgagactccatctcaaataaataaataaataaataaataaataaataaataaaggagctttacagaaaccttctgatgtttttttcttcttgacgataacattgccaacactgaatcttacaaagataagacaagaaagggaccttcagacaccattacatgtaattctggacttagtggtttaaatccttatttttctatgacattaaaaaaatgtatattttaggccaggcacagggctcacacctgtaatcccagcacttcgggaggccgaggcaggtggattgcttcagcccaggagttcaagagcagcctggggaacatagtgagacccctgtccctacagattttttttttttktttgagatggagttttgctcatgttgcctaggctggagtgcagtggcrcgatctcggttcactgcaacctctgcctcctgggttcaagcaattctcctgcctcagcctcccaagtagctgggattacaggcatgtgccaccacacccggctaattttgtatttttggcagagactgggtttctccatgttggtcaggctggtcttgaactcccaacctcaggtgatctgcctccctcagcctcccaaagtactgggattacaggcgtgagccaccttgcccagcctacaaaaagttttaaaaaattaaaaaattagttgggcatggaggtgcatgccagctactcgggaggctgaggcaggaggattgcttgagcccatgaagtggaggctgcagtgagccataattgcagcactgcactccagcctgggccatagagcaagaccctgtctcaaaaatatatatagtatccaaataaacacaataattacagaaaattgaaaagtgcccataagcaaaaaaaaaaaaaagaaaaaattaatcacctgcgttctcatcacccagaattaaccattgttaatatttttgttatagatccttccaaacttttctccatgcttgtgattgtatttattatacatgatttacagggatataaacgactgtattattagtcattagaagaactggattatggccgggcacggtggctcacacctgtaatctcagtactctgggaggctgaagtgagcagatcatgaggtcaggaaatcgagaccatcctggctaacasagtgaaaccccgtctctactaaaaatacaaaaaattacctgggcgtggtggcaggcgcctgtagtcccagctactcgggaggctcaggcaggagcagagatacctatctgttctcaggattttaaggtgttgcgcggaaataagaaaaccgtacagtgtttctcactacaaagcagggtcaggagatgcaaacaaactgatgtgggggttccaagtgaggtggaattccagacaggggccgggaagacttcgtggaaagggagaatctgaggtgggttttctaggatgggtaaagttcattagaggaagagaagtgcaacagaggaagttcggtgagaggtagagggaaggcgttctgatcatgaaggaaacactagaaaaggtatggagatagaaaaagataaggcctgattttttaacctaccacttaaaaaaaatccttgaaaagagatttttaaaacgaatacttggtgctgacaaaggtgaaatgaccgggcgcggtggctcacacctgtaatctcagcacattgggaggctgaggcgggcagatcacttgagctcaggagtttgagaccagcgtggccaacatggcaaaactccatctctactaaaaatataaaaattagacgggtgtgatggtgggtgcctgtagtcccaactactcaggaggctgaggcaggagaattgcttgaacccgagaggcrgaggttgctgtgagctgagattgtgccactgcactccagcctggatagcaggatgagactgtctcaaaaaaagaaagaaaaggaaagaaaaaaaaatccgtactgtaaactggtaaaggctttctttctggagagcaatttggggcacatgcaccagtagccttagaaggctcatgcttttgacctaattatcctattagtggtgagatgattaaagatgtggccccaatttatgtgaaaggtatgcatcacatcttcactcataatcaggagagttggggaaaaccctagctgttaatagtttatccaaaatccatatatatatgtgtgtgtgtgtgtgtgtgtgtgtgtatggatttatatatatatataaatggatatatatatatatctggatggatatataaatatgatatatatatgtgtgtgtgtgtatatatatatgtgtatatatgtatatatatatgatggaatactatttagccataaaaaggaatgaattaatggcattcgcagtaacctggatggacttggagaccattattattttattttatttatttatttttgagacggagtctcgctctgtcacccaggctggagtgcagtggctcgagctcagctcactgcaagctccacctcccgagttgacgccattctcctgcctcagcctcctgagtagctgggactgcaggcgcccgccatcacgcccagataactttttgtatttttagtagagactgggtttcaccgtgttagccgggatggtctccatctgctgacctcatgatccacccgcctcggcctcccaaagtgctgggattacaggcgtgagccaccrcgcccagcgagactgttattctaagtgaagtaactcaggaatggaaaaccaaacatcgtatrttctcactcataagtgggagttatgctatgaggacgcaaaggcataagaatgatacgatagactttggggactcagggaaaaggtgggaagggggtgaaggataaaagatacaaattgggtgcagtgtatactgctcgggtgatgggtgcaccaaaatctcataaatcaccactaatgaacttactcatgtaaccaaataccacctgttcctcaataaaccatggaaattaaaaaagaaaaaagaaaaagtaccctggaaaaaaaatttctccctggccagtcacggtggctcatacctgtaatcccagcaattcgagaggctgaggcaggaggatcacttgagcccagtagttcaaaaccagccagtgcaacatagtgggaccctgtctcaaataaaatctaaaaattagccaggtgtgttggtgcatgtctgtggtcccagctactcaggaggctgaggtgagagtattgcttgagcctaggaggttaaggcggcagtgagccgtgattgtgccactgccatccaacctgggcaacaaagcaagaccctgtctcaaaaaaaaagaaaaaaaaaacctctctattcgccttttaagaatacctgggcttctctgtgtacacttaagcttcattggagtctttagactttttttttgctgtatctgtccagttaccaagtcccagcttctactccatgctccccatgctctcttcctattttattttccatgactgcctcggtataacttgtgctcaaccaaactggactactcaattccctgmattttcttttttaaagtttaatcaaaaaaaaaaagaaaactggctgggcacagtggcttctgcccacaatctcggtgctttgggaaactgaggcaggaggattgcttaaggccaagagttcaagaccagcctgggtaacatagcaagacctccatctccacaaaaaaatttaaaaattgactgagygtgatggtgtgcaccttagtcccagctgcttgggaggctgaggcaggagaattgcttgagcccaggagttccaggttatgatgagctatgactgtgccaccgcactccagccagggtaacagagtgggactgtctcaaaaaacaaaacaaaatccctaatataatctcagtgtgccttttaagtatgccatatatatatatatatatatatatatatatcacattttctttatccactcattgattttcatgtagttctaatcgtagaattcatacattctttctatcttccatctttcacataacatcacaaacattttctaggttgccatattgtcttcatagttacttaaataatattccatcaagtagcacaatcatttatttcactagtcctctaactgtagacattttggttgtttttgaaacttaataatgtaaataacaccgtgataacaatgtttatgtaaattcatattttggattatctccttagggtggattcccagaagtcacattagtaggtcaaagagtatgagcctattttcaaggctcttgttttattaccttttaatttccacttgcctcaatattgctggtttgctcccttatgatcaccagagttactccgtcggtccaaattctttaccttccgaaactgggaaggccatgactcaatgttatatatatagtaaaggctactataaccttccccagaattttccaagccagtggtctctaaagtgacctttggctgttaaaatctgaattcagagggttcatgagactcagtgttgttgtagaatttaagctccttaatttgccacgttgtttagacaccacttaatactttattgcaaatgacttgtcaacgcctctcacctacaaacttcatcctcctacaaatatacctcctgctaatcaaatgaggctacagttgagtctttaagtttcagtagaaagatggcccttcctctggggtaggcgcatgctcttcatgctgaagctcagctgaaaagcctcctgctgagttttctgcctctttccctcccactgcacacaccccagggtgttggcgccacttcaaagggagcctgtggatgaagaaaacacaggtaaaggcagagggctsataagggggccataaatttaaaaagttaagattcctggcactatcaactctcacttgttttcaaatatgcatatggagtggatattccagttttcatgtctgtgttgttgtttttaaaaaaagacctttcaaagaactgtgcattttttacaggctgacaggctgtgtttggtgttaaactgtcagggctgactggtcacttggaaagggcaagggctgaggtgcatgcaagtgtcggctggttactcacagacacagcagccccttktaccccggagagagttctgtttgctggagcccttattctggccagcagtgtcacaaatgcacactgtaagacatagacagtcttggaaagaaagggaaactggctttaaaaattcttactccttctagcaaagcaattcatctttggctataaagaataacacagccaggtgcggtggctcatgcttgtaatcccagcactttgggaggtcaaggtgggcagatcacttgagtctaggagttcaagaccagcctgggaaacatggtgaaaccccacctctaccaaaaaaaaaaaaaagaaagaaagaaaagattagccaggtttggtggtacgtgcctgtagtcccaggtactcgggaagctgaggtgggaggatcgcttgagcctggagggcggaggttgcagtgagccgagatcatgccactgcactccagcctgggcaacagagtgacaccctgtatcaaaaaaaaaaaaaaaaaagaacagtaacacattattagaaatgagcattctgaggccaggcacggtggctcatgcctataatcgcagcactttgggaggccgaggcgggtggatcacaaggtcaggagatcgagaccatcctggctaacacggtgaaaccccgtctttactaaaaacacaaaaaattagccgggtgcagtggcgggtgcctatagtcccagctactcaggaggctgaggcaggagaatggcgtgaacccctgggaggyggagcttgcagtgagccgagatagtgccactgcactccagcctgggcgaaagagcgagactccatctcaaaaaaaaaaaaaaaaagaaagaaaygagcattctgaaatagtcttccatatgatgcttttgacaattcagcaggaaaataaaggatgtaagaaatgaatgcatatgttaggcctcttgttgacctgtggactaaattgtttctccctgcagagatcagcaaggacaactcctgcaaagaaaactgtacttgttyctcctgcttgctccgggcccccaccataagtgacttgctcaatgatcaggacttactagaygtgatcaggataaagctggatccgtgtcacccaacggtgaaaaactggaggaattttgcaagcaaatgggggatgtcctatgacraattgtgcttcctggagcagaggccacagagccccaccttggagttcttgctccggaacagtcagaggacggtgggccagctgatggagctctgcaggctctaccacagggccgacgtggagaaggttctgcgcaggtgggtggacgaggagtggcccaagcgggagcgtggagacccctccaggcacttctagagctcttcttcttccttcattggcctctccggatgttgaaacaaccacaggtcaagaaggaatgtgaatctgttgttttataagagtttaggacaaggacgtggaacagtggacactggttttccccaaagctggcagttttgtggaggggtagcttgtttcggtggtggatctctgtttatttttgcacatctgttataatttaatattcaaatctggaattaagaaaacatattttctagtatcctctaagggccaaagtcctacaatcggaatggattcatgccacgttgaagataaaattatcctctctctgaaatacggtaaagatttaaataggtcctgagactgttgatagccccagacatacccacagcattatatgtaacatctctcctgatcagtgccattcccacggtttcaaagaaaacagctacaaggaatgcttacctgagtgtctgcagcaccctccacttctctcctaggcaatgagacccagtggctagaaattcaccatgtctattctcaagatccatgccagggagctctttgactctcgtgggaatcccactgttgaggttgatctcttcacctcagaaggtctcttcagagctgctgtgcccagtggtgcttcaactggtatctatgaggtcctagagctccaggacaatgataagmctcrctatatggggaagggtgtctcaaagcctgttgagcccatcaataaaactattgcacctgtcctggttagcaagaaactgaacgtcacagaacaagagaagattgacaaacttatgatagagatggatggaacagaaaataaatctaaatttggtgcaaatgccattctgggagtgtccctcgctgcctgcaaagctagtgctgttgagaagggggttcccctgtaccaccacatcgccgacttgtctggcaactccaaagtcatcttgccagtcccggtgttcratgtcatcaatggcagttctcatgctgtcaccaagctggccatgcaggagttcatggtcctcccagtcggtgcagcaaacttcagggaagccatgcccattggagcggaggtttaccacagcctgaagaatgtcatcaaggagaaatatgggaaagatgccaccggtgtgggggatggaggcgcgtttgctcccaacatcctggagaataaagaaggcctggagctgctgaagactgcgattgggaaagctggctacactgataaggtgatcgtcagcatggaygtagaggcctccgagttcttcaggtctggaaagtatgacctggaattcaagtttctcgacgaccccaccaggtacatctcacctgactgtctggctgacctgtacaagtccttcatcaaaaactacccagtggtgtctactgaagatccctttgaccaggatgactggggagcttggcagaagttcacrgccagtgcaggaatccaggtagtggaggatgatctcagagtgaccaacccaaagaggacagcctcggccgtgaatgagaagaagtgcaactgcctcctgctcaaagtgaaccagattcgctcygtgactgagtcccttcaggcgtgcaagctgkcccaggcsaatggttggtgygtcatggtgcctcatcattctggggagactgaaaataccttcatcactgacctggtggtggggctgtgacctgggcagctcaagactggtgccccttgctgatctgagcgcttggccaagtacaaccagctcctcagaattgaagaggagctgggcmgcaaggctaagtttgcyggcaggaacttcagaaaccccccagccaagtaagctgtgggcaggcaagcccttcagtcacctggtggctaattagacccctccccttgtgtcaactccggcagctcaagacccccgagcaacatttgtaggggccgctgctagttagctacccttgcccaccgccgtggagttcgcacctcttccttagaacttctacagaagcaggttgcagtgagccgagattgcgccactgcacaccagtctggagacagagtgagagtccgtcccagaaaaaaaaaaaaaaaaaaagaacttctacagaagccaagctccctggagccctgttggcagctctagccttgcagtcatgtaattggcccaaatcaccggagccacgtgaccctccagtgtcatctccggggtggccacaggcaagatccccagtgattttgtgctcaaaataaaaagcctcattgacccatgagaaaaaagaaaacagcaatgagaagtgaccctgtcttgttggtttattactttttttgttataaagtactttggtgaattaacaggatgctagtattacatggtgatactcttcagaacacctgccccatcttttttatgcaagtatgtttacaatcagtggactatcagtaatgtcatttgctcaaatattttttaaagacctacagaaactgatggttattgggaaaacagtcaggaagtagtgaggtaatcaaggccatgggaatagtgtttgacaaagagagtactccaaatcccttttggttacccaggactttaaaaaagagagtactccatcacacctgtaatcccagcactttgggaggccgaggcgggtggatcacgaggtcaggagatcgagaccatcatagctaacatggtgaaaccccgtctctactaaaaatacaaaacattagccgggtgtggtggcgggcgcctgtagtcccatctactcgggaggctgaggcaggaggatggcttgaacccaggaggcggagcttgcagtgagccgagatagcaccactgcactccagcctgggcgacagagcaagactgtgtctcaaaaaaaaaaaaaaagagtgctccaaatctcctttggttacccgggactttaaaaaatttaatgtgatagttaggccgggtgtggttgctcacgcctgtaatcctagcacttttggaagctgaggcgggtggatcatttgaggtcaggagttggagaccagcctggccaacatggcgaaaccccgtctctactaaaaatacaaaaattagccaggcgtggtggtgggcgcctgtaatcccagctcctcgggaaattgaggcactagaattgcttgaacccaggaggtggaggttgcagtgagccgagattgcgccactgcactccagcctaggcaacagagcgaggttccatctcaaaaaaaaaaattgtaataataataataacaatgtaatatttactttttcatcctttatataaggctgagtgcttcacccctgagatgaagctcagttaagaaataaatgaaaatcccgtaacctattggtgaaaggtaaccacccccagctcctactagcccaacttaaaacaggaccccatcacactacacagcagtttagccaagaaaagggggtctttatgtggacactgggagggaagggattccttcaaatccaaactttaaaggattttaaacaaatgaaacatttggttcaaagaatagctgatgtttttatttgatgattttggagaaaggaaagtgtggggcataatggggtttgttattggaaagatcagattttctaggtaatttgggtggagaaagacaaaaggcaaagctttgactgacaattccatgaaagtgctatttggttttggttatgggcttagaaaattaagacacttagttcaatttggaaggattctgtataagtccctgattaaaataagcaaaaatgatgaataacactgattcagtgcaaccgaaagattaggattaactcaaaagaaagttattttctaaaccaccgtgattttttccactgacaattacagcggttttcattaggttgctgacacatgaagtcagcctcaccatcagttgcaaactctaaactagcaaaatctattacagagacatacttatcacttctgatttagtgctaatctcacccagctcatcttctcttgtcagatttatgagataaatgtcagatttatcaccagatatattgaaagtaacagccagtaataaaatgtgagattttaaaaaatagattctttggcaaattggtgttcagtgaggcaattattaaacatttttgtcagccaggttccaggcactgtacagaagctgttaggagttctcaccatctacgaatttgatttgatgtattgtattctcattaagctatgtgtgacacattgtcatttattagcccagaatttaaaaagctgtggttgtttagtgttggtggtagcagaccccagcagtctgatggtctgcactccttccatcctgccaccccctggggatgcaaagactggatctcagggtgacaatcttcttgcgcacgactgcctggccaagtgcctccagaaagccccttccttcccccatttccacccaggcccacttgtcacctcagcctaacaccagcctgcacagtctacggccaccatccaggcagtgggagagggaaaggggaggagggtggaagggaaaacccctttctatacctctcctcagcctgctctttcctcctcccacctctgagcctccgcctcccccagacagagacagaaaagatggaagaacaggtgggacctccacccccaccccaagccttcatcccggtggagggggatgggaagatttctctcatttcaagagactcctccacctcagactgacaaaaggcagaggcctggcaagaagaaagggcaccctggggaagaagggcattgaaatagcacctgccgggccgggcacggtggctcacgcctgtaatcccaacactttgggaggccgaggcgcgtggatcacggggtcaggagttcaagaccagcctggccaagatggtgaaaccccgtctctactaaaaatacaaaaagtagccaggcgtggtagcgggtgcctgtagtcccagctactccggaggctgagacagggaactgcttgaactgggaaggtggaggttgcagtgagccaagatcgtgccatgcactccagcctgggcgacagagtgagactccatctcaaaaaaccaaaacagaaatagcacctgcccccaccccctgcccgccctccttcccgcccccgtcctttcctagacttcactcaagtcctctgctcagaggaagccctgctctactgaaagccacaaggccattctcggtggcctgggacagcagcccaagacgtgggcttctaactgcctccgaaggggccacagcagcaaacataaataaaaatagtaaaatgttcttaaattataaatttaaaatttggaaaatttagtgagcacagcttctagggggcatgtttccaaaattccaaccacaaaagtgcagtctcaaaactgactgtaaaccgaacataccatctcatctcagacacagctattgttcacgagtgtcagtggaactttcctcccttgagatggaccaaaaacgtcaagcaagatgacatttgctgatttgcaggcttcaggcagataagatacgggcagagttgagtgtgcgcctttacccttaaattcaggaatagcaggaacagcaggaaaaacgtaggaccacagcgtacgtcccacttgtctttcattttgatatcattatttccagagtcctgattgctagtcatgtctaacactggatttattatcatctcattgctagcatggctaggaaagctttgaacatccttatcattctattttaattcctattataattgcatggggaagttccagggtggaaaaatttccttttctttctttttttttttttaataggagagttggctgggcacggtggctcacgcctgtgatcccaacactttgggaggccaaggcgggtggatcacctgaggtcaggagttcgagaccaacctggccaacatagtgaaaacctatctctactaaaaatacaaagttagctgggtatggtggtgcacacctatagtcccagctactggggaggctgagacaggagaatcacttgaatacgggaggcagcagtgagccaagatcatgccactgcactccaacctgggagagacagagtgccatctcaaaaaaaacaaacaaaagagttgatataaatttgctgttataatttgactgtactgtttcttgcacatgttgacatctgtaatgactggagtttatgaaaatttttgatgagtaggagcataccattaacagagagaaatttaatcaaaagatttttaaagttccttcagagtccagactttgactaagtgtagtatgatttatatctatgttgcatacaaaaatatcaaacagtaattcccaactgaaatacaagtatcaatcaattgtgtaacaatgcaaaatcatttaatttaaagttaatttatagcaaatgagtactgtaatagcataagcatgccgatactttacaaaggagagagtggaaaggtaggatattataactaattgatcaaatcattgttaaaatttaagtttattaatacttttacttctgtccgtagggatccatgttaaattgggtatattataaacttaactgctaatgatgaggtccttttgctattagaaatctattttttatttttctttattattttttgaggcagggtcttgctctgttgcccaggctggagtgcagtggtgaaattatagctcactgcagcctcaacctcctgggctcaaggaatcctcctgcctcagcctcccaagtaatggaaactgcagtcgtatacaagcacacccagcaatttttttttttttttttggtagagatggggtttagctatgctgtccaagctggtctcaaactcctggcctcaagtgatcctcccaccttagcctccaaagtgctgggattacaggcgggagccaccattcccagcctagaatgaaatatctttagctaaattacagggctggatgtggtggctcatgcctgtaatcccagcactttgggagactgagggcgggagggtcacttgagatcaggagtttgagaccaccctgggcaacacagtgagaattctgtctctattttaaaaagagaaaaatctagggtatattctcttaaacaaaactttcatctataatggtagttgatgaggtcctatgtaatatgcatttccttggttgcaatagcaaattactacacacacagaaaggaaagccacactccccgacacatctacacacaggaggactcacacaggagggagactcaaagaaggcacgtgacttttacattgttagggcttacatggtcctgggatttcccaccagtactcaaaagatcaattgtatgaacaagtcacctatttttacggcactaaataattattattcaacaacatggaaaatatgtggtagcagacctggattttccttaagagttatttttatgtggtactgccccctgctggaatataacatctatacacatcctttctggctgggctgacatcctaaaaccagcccaggaccagccttttattaatattaattcttggccaggcgcggtggctcgcctgtaatcccagtactttgggagtccagggcgggcggatcacgaggtcaggagttcaagaccagcctggccaacatggtgaaactccggctctactaaaaatacaaaacttagctgggcatagtggcacattcctgtaatcccagttactcgagaggctgaggcaggagaattgcctgaaccgggacccgggaggtggaggttgcggtgagccgaaatcgtgccactgcactccagcctgggctacagagcgagactccgtctcaaaaataaataaataaaaattaaaattaaaaaataattcttggttgtatgctaaaagccttgcaagtagccccactggaagataggaagagtggggctgttttacaaatgagcacatataagcagaacgaggccgccataattgaaatgaaggtccccgtcccgtggatgtgttcatcgctacttcaccctgtcattcggatccaatgtgtgaccagccagctccaataacagttccatactctgggaattatttttaacactcggcaggatgctttcttcctgtagttttaggcttagccctttgtgcacttttggtctctttccctttcaatttagcatccaaggaagcggctgtgaccaaaggtagctgtcatgttaaaggacaaagttcatagttacagcaaatattgacccagagcactatccttgccccttcctc

SEQ ID NO: 93359 - DNA, 24187 bp, Homo sapiens
  misc_feature (1)...(24187): n = A,T,C or G
aaacatggaagattcattttcttctaatcaatgttctcacccatccctaaaagtagaaaatgtccataaaattttagatattttaaataaaagcacttatcacaacacttatctttaaccaaaaaacagtgatcattgaagacccagaatatgactatagaaactttcagtgctttctgtagactccatcttttgctatctatcaaagaaagataaaatctaggagtggaaggaaagaggttccctacactccttattacctggtgataaagtacaggggttttaataggctgtatcaaatgcacaaaattccaggtcacatcaaagaaagttctacacacctggaagttgaaggattagggattacaagttgtgtgagggaggaatgggaggagtcagatagtattgggacatcctaggcaatgtttccagcctactttgtgttctttccctaccaactaagcttgcctaatttgcttcagaattggaagagggaattgcagcaggaaaatatgtgaagagtttttaaacccacaaattcttcttactttagaattagttgttacattggcaggaaaaaataaatgcagatgttggaccatgttggaaaccttgtcaagacagtggattgtctcacacagaatggaaatgtggcttctgattctggtggcgtatatgttccagagaaatgtgaattcagtacatatgccaactaaagctgtggacccagaagcattcatgaatattgtaagttgggatttctgggaaatgaggtacttaacatgttaacgtttgtatctgtgtattatttacattatgtattatatttatacatggtggtgattcatactagaagagcatagtgatgaagtagcaaattgtactggaaagaatgctaaactggatgtcagtagacctggggtctcctcacacaaatttagtaaacttgggcaaatgacttaatctctttgagcttcaaacacaatttaacttttccttgaacactttggttcatcctatgagtggagaagtaattaaggccttttaagttcaccccagtcccttgattatttccattttgtctgtaccttttattcttttattctttttttccatattgcaaaggtgtcagcctttgcttcttgctatcagggcacacacttctagtagcatcttataccattctaatctactctttttatcctgtttctggactggtactttgctgaatagcaataaaaggaccccgagttagtgctacacagaacctcctacaagtaaaatgcataaatgacagtacatctctttagttttcccaggaggttttttttttttttttttttggtagcttttcaaattctaagctgggttttagtaatggtcaccctatggtaacacttatcccatagcagggattatgacacaagcagagatactattctatttcaatttcattgccctgtgcagtagataggatcattcacatatttcaaatctagatactgagattaaagaggttaaacaagttgaacaaggccacaccaatgtaatagcatagctactatttaaattcaggactgcctaaacacaaagtctataattataaatactacgcaataaaccctcccaggtgagaaagaggagaggctacctccagatgagtaagacgatcatgtgcaatgttcatgttccagagatttatctaacaaactctcagaaaatggaactttaacatgtatttataccgatttaagaccctttctacagaagcttccttatatgggttcaaaaactgagaggaaatagaaatattctgtatctgcatggtgctgaatatcaggtttcttttgactattcaatgattaggtggtttgtctaggtagttagcacattggtgtcagtcctcaggagtcatccttctggccctgagactgtcccacttgaattcctctggtttggaggtgaggggaatctctgcagtggcagacagagatgatcttcctgggccccacccactgcgtgtacccagcacctatacactactggggcttcaggagtctgtagactaaagcccattgaattgggctctgcctttaagcagctatgcctggaaaaaaacaaagtaaaatagaaaattcgtacgattggtgtaaattcaacaaaatagaataaaagtagttgcaagtttgaactggttctgaggtaggagaagggcaggacttactttctggtcccaacaggatacagtgaataaacaagcacaaaccagcaggtggtgaaaaaaaaacagcaagaaccagcagtggcctggaaggcatcctttagttgccccggctgctcattagcataagacactcctaccagaaccatgacagtttacaaatgtcatagcaatgacccacgagttagtacccctttccatggcaatggcccagaagttactgtcccgtttctggagatttctgaataacctgccccttaatttgcatgaaattaatagttataagtaggcataaatacagctgccaatagcccatacactgctgactctgggagcactgcctatgaattagctctgcttttcaaggagcagtaccattcagtaaaagattactgtctagtattaccggctcacccttgaattctttcctgggcaaagccaagaaccttcccagggtaagccccaattttggagcttgtctgtcctgcattgatttgactctgtatattcatgcatatggattatggtctatcttatactttgatgaataactggccttatgcatgtattttttaagcaagtgtttactgagcacctactaggtccatgatattgtgttatgtactaaggttagacagatctaagaatattaaaagccctgactttatggagcttatagtccagcaggaaggacagatcatcaattagtcattataaaagcaatgaaataaaagaagaaaacataaaatagggggaactaatccagaaagctttgctgaagaagggtttcaaagcctgaaatctgaaagataaatggcagttgcttgagagggtggtagcaaaaaggtcagcacataggacagctggagcagctaagaacatgccagattcaaggagctgaaagcagcttatatctggatggtcttttaaacattgacttttttatactattacaaaagcaatatatgctcattatagaaaatttaaaaaatacaaaagaaggcaatagtcaccaatgtactctgcaccaagaactgctttgtcatgcctttatcttcattctaaatctgtgaggttttgttttcttaagaagaaatgtcatgcacaatttactattttccaactttttttctgctaaacaatgtatatcatgaagaatttcccaacgttttaaatacccttctacaacatcatttcaccttgctgcattatgttccatttttttaaataaatatttgccccaggttggattttctgggggacagactctgaggcagaattcatacaataatgtttattaaggagaatcatcatcatcgcctgtggaaaggaagtagagaatcaggagtaaggaaagagataaatcaaactgtgatacagacttcaaaacagccagactcaactccatgaggagctatggagctaaaactgctcttcagagatgtcctacgttgggctgagatgaccaggcctttagaccgcaaacaggtcagtcactggatgtggcaggaagggacgtgaacttggaggaagtggctttctacagctaaggccattcctacagaaaatgacagccaagggtgatctgttgacagcacttccagtggatgggaccagtcctttattgcctgcataaattttcctgccaagtatagcatgttgaccatcttgccacctgtagacaatgtttgcagcatttgtagttctttttcttctcagatgtccatgtccctatccctacctccttggctcttttgagcaacttctattcaatcctcaaggcccagttcaaattcttcctccataagaccttgcctgtccagccctgctcattttgctcctcctgctcagaattcctttgctccttccttcactctcatccttcatccctcatctgacacattacacatatcctctcaataactacttgtcagatgtcctccattctcatgtttttatatatatttatctccccaaatagttgacaacagtggttcctgaaggatagttgtcagatcagcaacatctgctttgcctgggaacttgtatatcaattttttgggttccacacagacctgctgtatcagactgtgagtggggtcccgcaatttgtgttttaacaaaccctctaagtaattctgatgcatgctaaaatttgagacacttctataaatttttttttctttgagatggagtctcgctctgtcaccaggttggagtgcagtggcgcgatcttggctcactgtaacctccgcctcccagattcaagcaattcctcttcctcagcctcccaagtagctaggactataggcatgcaccaccacgcccggctaattttttttattattattttagtagagatggtgtttcaccatgttggccaggatggtctcgatctcctgaccttgtgatccacccacctcaacctcccaaagtgctgggattacaggtgtgagccactgtgcccggcctatacatttttttaaggttaagtatacaatkgtgtctcacacacatacatgcacacatatacactgcattccataatattcggttaattgagttttaattatagtggtagttaatgcttattgagttcctactatgtgctgggaattacagttagtgttatatgtgcattatctttttgcatttattgcaacagtcccatggagtatgaaccattagaattcctaatttacagatgcatgaactgaagcataggagcagtttaactaaatttctcaagattatacagctagtttatgtaatagtgttagaaccagtgttaaaactcaaacagtgggacccaggagctttctcctaatgactatgctttgtttttgccctatattctacctgggcatgtgatgtttggccttctctcttgctcttttttaaagcagcccctgatgcaaatggttctctccttctctctgagtgataacaatgggcaagaatagtgaggatgcttagaagatatttgcagctacaaattttccaaagaatgtctacatgtaactactgtatagagtaaggattcttaaccaggggttcgtatgtaggcaacaagatatctgaaactcctgaaattgaatgcaaaaccatgtttttgtatccattgtatatccatttttatagttctcctcaaattcacagagggaactttaacctgaaaatgttaggaatcaatgctcttgagtctgtggttttagaactggaaagaaccttaggaaatgcatggcccaggaatgctcataagttgtcctggaacaggtgccccactggctgctttagaaccatcttatctgtaacctgaagtgggctcaagactctgtatgtttcaatgcccagaagattctgatgcacaacgaggttttggaatcaatgttctgatccagtggttctcaaacattagggtacatcaaaattccctaaagagcttgagacacaaactgctgggcccagtcctctgagttcctgattcagtaggtttggttggaatttgcatatctaacagattagtccaagtgatgctgatgcctttgtcccaaggcccatactttgagaaccataattctattccggtttccatattaagacaaagaaagtaaggactagagagggttagcagatttttctaaggtaacatgattagctagggaaaagcaaggactttcactgtgttttacagcatcaaggaatctactcttacttttggatcattgagaatatggccacagagaactgaacctaaaagaaattgtgctttttccatagagtgaaatcatccaacatcaaggctatccctgtgaggaatatgaagtcgcaactgaagatgggtatatcctttctgttaacaggattcctcgaggcctagtgcaacctaagaagacaggtgtgggtcrccccatgtcaccgcaacacagcagtcttctctgcagtcacgatttccttgtgatttgaatgtagaagagagcctgggttcttagtgcagagtgaggtccattgttcaggtcaaaggatggtgtcagttcccccatagtctccatcaccaccaccgtgtccgtccccactgccaccaattatctcaattaaacatacagtgtttgcttttcaaaacactccttcaagaaaagttcatttcttgacttattttagcgcttaacccattccccaaaactcctcctatgtagacattctaaaatatttactgacaattccttgaacagaccatatcarcctctgattatgaagaattcaagcttctttatggcacctggtacccgctcctgtatactctgtattcctcatctaaagagcacttaaaatatttaagatgttgcctagctttttactaagggcttttgaaaaaygaaagttctatacatacattttattttattttattttattttattttattttattttatttttgaggtggagttttgcacttgttgcccaggctggagtgcagtggtaggatctcagctcaccgcaacctccgcctcctgggttcaagcaattctcctgcttcagcctcccaagtagctgggattacaggcatacaccaccacacctggctaatttttgtatttttggtagagacagagtttctccatgttggtcaggctggtcttgaactcccgacctcaggtgatccacccgcctccacctcccaaagtgctgggattacaggcatgagccaccgcgcctggctatacatacattttaaatgtttgatacatgtctccatagttcatacaattccacccttttgtatgtgggattttcagctattgttattttttaaacatttgttttcattactaaaatatgcctatttttcatttctatttggctggattctttttaatactctagcagtaggtttatagtagcaactatattgtctttcttgtgtataggtaatataatttcttgtgttattttgatatgccagatacactgataagtgctttatttgtattagtctcatttaattttcacaattaccctaagaaactgctactcacatatgttaagcaacttgcccaaaacgtctgtgctagtgcttgctagtgagttgtaaaacctgcactcaaatcaaatctgtctctctgccattatagcccrtgttcttaactaggaccagaaaatgctggacaaatgctattgggctttggtgtaaagaaacgttggggttctgttttactccaatttgtacttgtgtagctttttgaaaccacctttttttttctcactagctgcacagctgcgccttatacatgtctagcgtgcacctgccttagtgtctttgaacttaaatttctccctctggaccactgtttcatcagatgtctatgcagcttgccttggcccttctttcagccaactttatcagagttcttccctggccaccctattcaaarttgcagctctttgctacctattgagttctagccccttaccctgcttacttttccatatagcacttaccatcacctgatataatagatatttgcatgtttgtctattgtctgtctccccccagtcagagtgtaaactcagtgagagcagagacatcatttgttttgctcaaggctagaaccagtaactaaatgagtgctgagcacattctggtgctaataaatatttgcgggatgaattatagattttgtataaataaatgaatagcctggggacacagccccacgaatctcaggggagtggtaaaagcacagttcttccaagcagtcgagtgacttagcaattactaagcatgggggtcacctgcagcccctattctatggatggaatttgttttcttacatcctgttgattcagactgttcacacattgcccaggtgtttgaggttcaaggaatctgcctccttgttccagtccgtgcagaatacttccctctagtggccaatgttgttggcatgtgcctcttcagaggcaatctcccatatcaaaaaaaaaaaaaaaaattcaccaaccaagaaagccartgaaattcttattgaaaacaactgaaaaatgtttactgtaaagcttatagcttgtggtagcggcctttttatctttatcaaagaatcttagttggcttcaatatcaagagagaaaataggctgggccatcctcagaaatgacagctgtgtaagtgtagcccttacacacttacctgctgggtgtaaattaaatagaagacctaggggatgtttgaaatgatataaatgagccattcctcttgttaggggaatcacaagaacaaactatatgactaagtagaaccaaggtgaccttaaccatgggaaatgcccggactctcaaggggagcattgatcaccttggtttgattgtcctgtgttaacacagctgaggtcacctccctgagaactaagaggatgaactaaatgaccagattagattttcaaggaaaatctaaaataacactgagttccttcctcctggcccttcactcacagtccacagtgacccacacgttctctcccttgagagacaaaatgaggcagatggaattcatgaagactgtcaagatgctggatgagtttggtgtagaaggcttttgtcctacagggagactgcatgtgtgtttggtgcccgtttatagcaataacaacaagagctacccatctgatctgaggtcgggcagcatgctgagtgcttaatgcacagtaccgcatttaaccctcccctgccaaaaccctgtgaggtgggcaattgtcctcattttgctaatgagaacactgaagctcagaaagtcacttgctttagagaattataacaataataatgaaagcaataaggctgttttttactgcaggcttcttctgagccaatactgaggtgtggatattgcattcatgatttgatttaattctcacaagtcctgttgagggcatgacatattttttactcctaatagggcagcaccttattaatctttcagccaaatttgctaatgtcaaaataatatatatgccttaatttattgaacatattagaattcttaaaacccttcatccttctctattctctactgatattcttataattctttattttgatataatttccaatttatggaaaagtcctgggaatagtacaagggacttccatatgccctttgccctgatttaccaactgtttacagttttaccccatttattttatcattatctctcccccatctcttacgtgtatcttaatactttttccaaaacctttgatggtaaatttgagacatacatcatgcctatttgcccctaagtacttcagtgagtattttctaagaacaagagtattctcttctataactgcaatacctttatcaaagttagaaaacaaacattgattgacattagtgtttaattcgtagtctatatccaaattttgtcaattgtcccaaagtcctttacagctgttttccctcctctggtccataatctaatccaggatcatttactatacatttggccaccaagtctgtctccttcataaacaaacaattcctaaggttttgtctttttgatttttgcatttttgaagagttttggacagggatttaatttgctttatctgatgtttcttcatggtgtgattcaagttatatgtttttggcaggaataacccaaaagtgaagttatatctttcttggttcatcatattatgaagcaaataatgttggcttgttccaatactgataataactttaatgacttcattaaggtggtatctgccaggtttttctaaagttagtatttttccttttgtaattaacaaataagttatgggaagataatttcaggatatgtagtattctgtctttaaattttactcactaattttaacattcactgataatttcaatctttctgaatttgttagtgggtattgtactgtaaatcaatgttttgtatttactaattggcattctgtaaataagagcttttccttccaattatttatttgttcatttatttattggtctctatatggacttgaacattcttaatttattcaatgggatataattatttactataattattttgatgctcaatatttctgtatttgaacagtgggagctccttcaagctggcttgtgggtccttttgacatgaaggtctcttaatcactaaaccattatatatatgtggtatacatataccttaataatcatactataccatctactggggcactttcaatatttctgaagagcccagacaagtctgataataattacacaaaacaaagaacagaagttaaactttatagattctttttctgccgggcaacatgccatccatttcttgtgctctattttattaaagcataacaaaaatcttattttactgatgaggaaatcaaggcacacaccaaaggtcaagtaattggccaagataactaagctagcaagcagctgaatcaagatctgaacacaggtttgtttgatttgaaagctcttattcattactggacaacaagaaagggagagaacatttcatacagttgaaattttctctttttgcaggttccaggcctgtggtgttactgcagcatggcctagttggaggtgctagcaactggatttccaacctgcccaacaatagcctgggcttcattctggcagatgctggttttgacgtgtggatggggaacagcaggggaaacgcctggtctcgaaaacacaagacactctccatagaccaagatgagttctgggctttcaggtatatgayaatctcgagaacagaggtagacatgtctgtctttcaaaaaaaatgggtaaaaaattacggcttctagtatttggttgatttattttggttgagtcatcattatcttaacatgatatcccccagttttcttaattaactagtgattccttggttgaagtagtgaggaatgctgagttccccatgtagaaggtgggtctagctaatagggtgagaatggtggttggtgtcaggtgactaagattggaatgagagaagtgtagatcaatttcctcatggggaggggcgggtaatagtataatagtactccagaaggaaaagagaccaggcagcattaaaaaaaaagaaaggaaactattaagcctagtgtgttagtccgttttcacactgctgtaaagaactgcccgagactaagtaatttataaagtaaagggttttaatttactcacagttcagcggggctggggaggcctcaggaaacttacaatcatggcagaaggtgaaggggaagcaaggcacccttttcacaaggctgcagcaagaagtgctgagcaaaagggggaagagccctttataaaacaatcagatcttatgagaactcactatcacgagaacagcacaggggaaaccactcccatgattcaactacctccacctggtctctcccttgacacatggggattacagggattatggggattacaattcaagatgagatttgagtgggaacacaaggcctaaccatatcacctagggaccatcgatttgacttacctctcatgttcttacaaaagatttttaactcttttatttaaattacctattgatgttcaactcactttttatggctatcagagacggaccacttcagcatctttacaactattcctgtaaatgaatctgcagagccctgtgcggttctgcttaacagtagaacaggacacttccactagcagttgcgttatgtgctcagtaaatattcactgaagatagttattgctacgtgataacatctagagaaaacagcagtttgctgacagcctgtgactccagaggcacccatgcttcataggtttgaaagaaatccattctgagtgttgtgagggacacggtaacaagctgtcagagttgacaactcaagggcttgtttgtaaacctggtgtsggggggagcttttgtttgtttctgattataatttttcatataactttgtcttttccccttgtagttatgatgagatggctaggtttgaccttcctgcagtgataaactttattttgcagaaaacgggccaggaaaagatctattatgtcggctattcacagggcaccaccatgggtaggttcaaagaaaagcaggtttgtatactcggaagaaatgtgagcatacgacactagctatccctgaaatctgtcaccttgtgcttccttcagacctgctcttttcatcttcagaatcatgtagtccccagcaatgtgtctagcatatagacatatgtgctasatatagcatatctctgtgctatatgtgtctagatatagcatatctctcaatataaatattttctcaaagccaacatcgtgttattcaattatttatttaactcattgagcacctactacttgaaagcaaatatgctggtgtcataaggaccttataattttataggaraggtaagatgcagtcacatatatacttattgaaatatgtatttaaaagcaaaatatacattttatgagttctaaaaatatttcntattcatgttgacatatttcttcttttgcaggctttattgcattttccaccatgccagagctggctcagaaaatcaaaatgtattttgctttagcacccatagccactgttaagcatgcaaaaagccccgggaccaaatttttsttgctgccagatatgatgatcaaggtatgagactcctcagaaaacttcctgtgtacgtagaaaaatcttccagcccaatttcctaaaacataaacttttaaattacagtcacatcttttctgtctgtcatgtctatgtcacttcatattttcacagggattgtttggcaaaaaagaatttctgtatcagaccagatttctcagacaacttgttatttacctttgtggccaggtgattcttgatcagatttgtagtaatatcatgtyacttctgggtggattcaacaccaacaayatgaayatggtaagtgggagcctagtaaattcccagcatcccagcataaagctgggagtcatatggctcacccctggagggagagctaatgccagtgaagactcagagtaatgatatattctcagtaactcagttctctgcaaactgtaaggaaataagggaaatgcttcagtatggactgaaacaaggttaacataagggcattgctgatattaaatcacagattatagatggaagaggtctgaaagcagctttactacagtgaattaaattaaaaagagcaattagcacatgttagacaacagagacaactgtcatgcatcatccacctctaccctgcactggggtcctgtaggtttgtagtttaagttctttgatggaacatcagggaccttcattttggcttaggctaccagttggtatcactgggtgggttccctaggaagcatactctgagatggaggttaatgtgaacaatgatttgggtcctgctctagggataatacctagagaaggaaaagaaacaggactaggtaggtgaaaaagtcaagtagtgatgcagtctcaataggagacttagttgatcctgcagggatttttgaagataggatgacccttcagaaccgtctcaagttaggaagagagggttgggtctttatacaccatatcagtcagtcatttaatgtagccataccagtaacagggtagcactgggcaatgtatctgcctacaattggtgcaatcctcaaagcagactgagagtggagggctgtttgccagcagcactcccagcagctggggcaacatttccttaattctgaatattttttcttcttctttaagattaataatttgatttatagtaaggatatgaaaagtatatattatgtatcaggctaatttattacctataccaagcctatgagtgttattaatatccccactttgcagattagtatactaagatttagtagattaagtgactcactcaaattcacctaaaaattaaactgcagaactaggatttgaatacaggcccaatgctagagccctcatcctaaatatcactagtaaaattttttttaattaggggccagatctctgatgagaacctattctcagatgaaaaataccggtgtctggcaatacatttaatgacattttatttacgtgcatgtacatatttttgtttcatagataattgctgataacttaataatgttaccatttcttagtctgacaccctggagatttggtcttgacagggtayacatcttgtgagtttttctatgtcccccagaatactcatggtttgttacagagccgagcaagtgtatatgctgcccacactcttgctggaacatctgtgcaaaatattctacactggagccaggtaagaatgttgaatttgcagtctttgctaaatgtcctgttatattttgtgtagaatagtcaaaggacaccatttagataagccagggattatttcacacttattctaagatgaaatgcagtatcgtcgatgctattttgatggagaatttgatctagatcactgaaacttytcaagaaatgggaagaaaggacagaagtagcctaagaacttctttagatcttaaaagtatgaatttagatgatccaagtgagacttctctctgtctctagacacctcaaagatgtggctggagataattatgtttctacatcttctcttcagctcctccaacaatacagtcaagtagaaacaaaaatgctaatgtggggtctgtcaaaagagatattcacaggagtccttcacactgcaaactttacctgcaattacaggaaacacacacctctgtgtgtctatgtggtgtgtgtgaaagagagggatgggggaaggagagagttctctctgttgacaggtagggagagacagagagagagagagcaattgtaccatcaaaaccagagaagaattataagttcaattaaattttggttgctatcttccaggatcaccacattgcacaattccagggcacgattccccattgtagcccacacagttgtggaggatacccactcacattaattacaatgaagatgcacttcctggagttgctaatgcaatgatcaagaatttatgtagtccctctttcttctcaaaaggcctcattcttgtcttaccattttcctgagacgcttatcccaacattgaatggaagagcagctcaaccattgctctctccttccctcatgagtgcacactgggtagcacatttccaccaccccaccacgcttatccactgagacgttggaattccttgtaaatttttgtctccttttaggcagtgaattctggtgaactccgggcatttgactgggggagtgagaccaaaaatctggaaaaatgcaatcaggtaagaaaatcaaataccatctgctgaaaatatatacattggaaatgtatgacagggacgttataatgacagtttattctagatatgggaataaaatatgaaaatttaagcagaaaataatggttcatgtttgactccatttgaaaatggttaagttcacagctgatccaagaaacctctctgcttttacaatrgagtaggaggcctttttagctgaggctgtctccctaaacaaggtactgggcttctcaggagcaagatgaagtagatttagtcaagagaagagtgtagtctatggtggatactagaaggattattttagaattaaaaaaaatgggatggtggcagtaagtttgtttcatggcacagtaaaaggaacattaaatggcaagtgaggattgctgtgtaagttttgcctctgcactataaacttctgtaataggagggaggctgctttaatttttcaggcttcaatttctttaccttgaaaataaaaattttgggcttagaaaatccataggcattctccctagttatactttaaatgaatctgtaatttgcaagttacattttttaaaaatgttattacattacccaagaaaatatgtagctaatgctatgaactaaaattagatatcaaagtgtggagattcagaattgcacaggtatgccctttagaacataaaatcttctgaagatttttggtaatcatgtgtatgaatgtaaataaatatttaccatagaaacaatactggaaggggcagattagacacagcttagtctttctttgagaccctcacatcataaattaacatccgctgccatatgtctatctagatgtaaaatgctaggaaactggacaaactgtgcagtgcccctggatagygaactctcaatctctggtatcagctgcttctcttgaagtctttcttcactgtttcccaaaatatgtctttagagaaagtatttctgttcaaagatgtttttttaattatatttatttacttttgagacagaatcttgctctgtcacccaggctggagtgcagtggcgcagtctcggctcactgaaaactctgcctcctagctttgagccattctcttgcctcagcctcccgagtagctgggactacaggtgcacgccaccatgctcagctaattttttttttgtacttttagggatggggtttcaccatgttggtcaggctggtctcaaactcctgacctcaagtgatccacctacctcagcctcccaaagtgctgggattacaggcgtgagccactgtgcccggccctaagatggctttaatttatcaacatttaatggactgagttctagagaaattgattcatgcagaataggcaccagaaaatgggagtggaagggaagagtaaacaaacacacaaaaaaaatcatagaatcacagaaactcagagcgagatatgacattcagttcaatcttttcacctgtaagatgacaaaaaaaattactagccccatagaatttttcaaccttccttatccaaattaggccataactgagccacaaagagaaaccagagcatctaggattggagccaagactccatggtggatttcctgagtaagaaatgggccttaccacttctgaggaaagttctggatgctgattaatctcaagggctcagccggctaggctaattctactaacactgcataaatacggaaagttcccaggtattaggaatactaattggtatatttggtggggaagggtgaggaataaggattggagcaggtatttaacttttacttccctttagctcaaattacctgagtgccataggccatggttctggcaaatgcagtcaagccgggtctgcctcaaaggctgcctgggatcacataaagactgtgaagatgcagagcccttcccagcagattccttgcttttctctgtggaatataattcttctytcatgaaatgtttgtgaaattatcttttaaaagaacaggggcattatttttaaaaacaatttrtttacaaaatatttaataggaagaaaaaagaaatacaaggcattacatgtttttatgtgttttgtcatttgatctagcaagttattacagatattatccccagtcacagaagaagaaactgaggttcaataatgttaagtaattttaccttaaagtaagggcgggaacagaaattcttaacagagttgtgtggctctaacacccatgtacccttcaccacaacagatggcatgtttattatgtctatttgaaacataaattatgagcctgaaagtccaaatgttacctagagttaagaactattccttttctctagccaactcctgtaaggtacagagtyagagatatgayggtccctacagcaatgtggacaggaggtcaggactggctttcaaatccagaagacgtgaaaatgctgctctctgaggtgaccaacctcatctaccataagaatattcctgaatgggctcaygtggatttcatctggggtttggatgctcctcaccgtatgtacaatgaaatcatccatctgatgcagcaggaggagaccaacctttcccagggayggtgtgaggccgtattgtgaagcatctgacactgacgatcttaggacaacctcctgagggatggggctaggacccatgaaggcagaattacggagagcagagacctagtatacatttttcagattccctgcacttggcactaaatccgacacttacatttacattttttttctgtaaattaaagtacttattaggtaaatagaggttttgtatgctattatatattctaccatcttgaagggtaggttttacctgatagccagaaaatatctagacattctctatatcattcaggtaaatctctttaaaacacctattgttttttctataagccatatttttggagcactaaagtaaaatggcaaattgggacagatattgaggtctggagtctgtggattattgttgactttgacaaaataagctagacattttcaccttgttgccacagagacataacactacctcaggaagctgagctgctttaaggacaacaacaacaaaatcagtgttacagtatggatgaaatctatgttaagcattctcagaataaggccaagttttatagttgcatctcagggaagaaaattttataggatgtttatgagttctccaataaatgcattctgcattacataaagcatgtatgtgcatttcagtgtctagattctagtccaagcttgttggaaggtttacagcttgttgctaggagacctaatgactaaaaatttctggctcaattttctgcctccaaaaattaaaagctagggagaaaattgcataatgtcatgagcatgatgaaacaaattgtcatatactttatcctttaatcttgacaaagttaatgtcagacagtctctgcaactcattgacaaaccatgatttatttcttcagaaaattattccacttttacacaatttcaaagatgacagttgtaaattacattggtactattttgcaaaatctctgaaaccaaatcaaaggtttgtgtgtgtcaaaagtatattgttgaaggtatactggtgtgtgaaattcacttgtgtgggttttttgtccccaagggtcacctggtagctcagctcaatgccagtgaatcttaatttattaagacacgtttaaagacttcagaatctatatctacacactattacttccttcataaaataagtttcttaaatcctgtacacagttgaatatatattgctggatttgattttcattagagctttcaaggatggtaaatctttcattcttatactgtacttgttaccacatacaaagaggctggcttagttcctgtctgcagctatgtgagattcagtcttgattttcaaaattcagtcatatttttaaagtgaatttatttctactctgtgtcattcacagaagaagtgagacagatattttgatattcgcaatctctcacttagacaaataatccagatcctacctcattgtatagctctgtttcttttgaagaactttatccaaataagttacaataatattttacatctatcaataaaataaacaaaactaacaagcttggcaaccaccttgtatttacaaaaggatcatgaagatttttttaaacgaacattttcatagttgcatagtcttgctcaaaccaagatggcttttatttgtaaaccgaaatctctagtggtatgctggtaaacgaactttatggaaagtaaaaaacaaaaaaacaaaaacaaactctgatttgtcaatttgccaatttytgtggtgtaaacacactcaccgctgacacttgatagatgtttttattgaaattccttcaccaaaggaatatttacttgtgaatctctaagcccacacacatacacaaataccattctgtacaaacatacgtatttaataatttgattcttctgctcaatactcaaagggggctgggaggaacagtttgtctcctagggcatgacatagactggacagtctttttataagagtgatacaactgggaagggagaacgctgtttcagaagataactcagatcctcttcttcaggaaagactgagtttggaacaccagggcttttttttttttttttttttttttttttttttttttttttttttgagacagggtctcgctgtgttgccctggctgctttcaaactcctgagttcaagtgatcctcccacctcagcctcccaagtagctgggattacaggcatgtaccactgtgcctagctgaaacatcagtttctgactgaagtggagactacaacaactttagtgtttcccttagaaggattacggccatggtgaacttgactgagtaaacaatgctataaataaaaagctcttccaaaacattaaccatggtaagcatcattatccccataaaatggtggcatccaggttaaatggcccacagaccaaaagtctaaaatgaagatagaatccagtcgttaactttttctgtatctccatcggtgtggtcacaaggattacaatgctttccttagcattaattcaatctgggaaaattttwatmtccgtgcaatatccagtgagctctcaccatgctgaggggggaaaaatatacagttatttccaatagagtgcccaagatctcgtacgtagcttagaccaattgactctctgtgttggcaagggctttaaaaggcaatcagtcctaatagtaataggataacttcattccttaatgaggatgattaattttactgttgtttacgtcagaggcaaataatttacttcaacataaggcctagattagaagatgctgctgctagaggaacctcagaccacggtccaccctcccttaccttattctttattgtggggtctgcacgggcttccaagagcagagggataagagackggtttttcatttcacaggcataatgtaatgcggtacagccatactgaaacacaaagggccaaaacttcagctcataagtcgggccctccacagaccatagcatgtggcttcattggcaaatccttttcacactttgtagtatacaactaagcagaaaaatagtctgcaaaccattgatagacaactatttctagtacttaaaaaatttttcgccgggcgcggtggctcacgcctgtaatcccagcactttgggaggccgaggcgggcggatcacgaggtcagaggatcgagaccgtcctggctaacacggtgaaaccctgtctctactaaaagatacaaaaaattagccgggcgcggtggcgggtgcctgtagtcgcagctactccggaggctgaggcaggagaatggctcgaacccgggaggcggagcttgcagtgagccgagattgcgccactgcgctccagcctgggcgacagagcgagactccgtctcaaaaaaaaaaaaaaaaaaatttcttctctgtctcaatgtatatgtatgttagtgtcatataagccatcaatctctgcctttttgttttccattttctgttctaaagaatgcaacttaaaaaagctgatgctgaattgtgccaaagtttctttgtcgcatgctatatgcctcggtgatcatcaccttgatcatgtcaccatctttcccttaaagagtctccacatggccctttacataaacattatcctctatggttttggtgatgattcctactgaagaagtcgggtgctcttgctgcaggacacctgcaagatcagtgcagttctacagagacatttcccaaacgtgatttgttatagcttatattatgtgttataagctagtgcatctactctgttggtactaatttaaaacactacaggtcaaaaaaattatagctagggcattagtgtccaaaatttggcctttggaaaagtagccaagcaaccatggtgctggtgagtgaagaaatagtacctttggctatcaagacaggtttagctctggatcccattccctagaaacacctctaaaattataggagatcatgttgcaattatttatttttattaagtggtggcatgacaaatggaagttctggctctgaattttgtcatgtgaaatagagtctaattatccaaaaatacaaaacactgtcttacctagaaagtagattttaatactcagatagtttttgaaaaaattttggtattagaagtggtgtctgtgtgtgtacctgcatgtgtctcaaactcctgagttcaagggatcctcccatctcagccttccaagtagctgggactacaggctagtgtcactgtgcctagctgaaggaatgcaatatctctatctagagagagaaatacacataaattgctgagaaaatatcctagagaaattttggtcacaggcaggaatattaaatctattgaatttaaatgaaaagaccaagaaaaaccttcaacaaacttttaacttcatctttaataatctcttacttaatatatttcaaagctatctaaagaaatggtaatgcacagtaactgtcaatacaaatttatccaaaagttctatttgaaataaaagggaatataaatttcataaagttattttcttttgctctctctctctctctctctctcacacacacacacacacacacacacacacacacacacacaactgcctgcatttaaacatgataccagcataggcaaaaccgaaatgatgtaaataattgatagaaacaggaatggggccatggtctctatcataaaacaatggtaatacacacagatgtgcacacacgtaaaatatgttaggcatcacaaatagaatgttagtattttggaatcaaatttccacttgcctactttttcaataaggaactgggaatccaaaattttattcaatcaccataagcaaaacaccatagaaataaacttttgtctttctgtgatcattgagaaagaaagatgagtgcaagagcacagaggtgaaagtgaaaacaacaccttatgctcataaacaggaagaagtgagcggatgctgctactgttgttatcactgctcttaccatcagtgggatttttctttgacctttgtcttatttatctgtagtttgcacacggggcctctcatcagtgggttgggattttggctgcagtggcagctgttgccattcaatgagcacttactacattctgagcatgtgctaagtgctttacatgaacaagcccaatgagataagtattatccatatccccattttaccgatgaggacactgaaagtaaaataagtttacaacttgctcaaactcatagaagtaaaaagtggcaagcccagagtttactcatgggcattctcactccagcttcttaactattatggctggtattttgttatcggagccttagttttccttaacgtctcaacaacattaaagccaattattttaaaaatgctttataatcaatagaggtattattcccatgagttcagcagaatataaataacctcaaggttgcctgtcagtgggaaaaaaaaggagaaaataaaagaaaactaaatgtaaaattgtctaggaaaataaagcaactgtacagatgacaaatacgctacctacaaataccattttgaatattttttcaaaatggctaaaagtataaacttacacaatctgtagcattaacttcgacrccagcatcaagtagcattcgtacaagagcctcattctgctttgtctttgatacctattacaaatggtaattataagaaaggcttatttacaaatagtttctccaatttatgcctgagactatttaatcaataggcttcattttaatcccaacactcctatgcatgcatgcacccttcctaaaatttcccccagcttctcactcactctaatatcaattaattaaagccaggttctcagactgtggtcctgaagtagcggcactgacacctaagaaccttagaaatgtacttctcaggtcccaccccaaacctacctaattccactgaggatggggcctagtacctgtctttcccttcctggctcaaagctgtgcaattacttcccattgctctgaggacaaaagtaaac

SEQ ID NO: 93360 - DNA, 13479 bp, Homo sapiens
ggagtgagagaaaccagcttctgctctcatagtgtgataaagtccgcagtttttaagtgttctttgggaaaacacagccctttgaattggagccacagtattggcagggtaatgatgatttaaacaagaactgcttttctcttctttaaaatgtctttggcaaaagcaaaaacaaaaaactattattaactattagggctaaatatattcgtccctctgtatccttggcatattggttccaggacccccgcggataccaaaatctgaggatgctcatgtacctgatataaaatggcatggtatttgcatatcctacacatatcctcctgtatactttaaatcatctctaaattacttataatacctgtgatacaatataaatgctgtgtaaatagttgctaggctgtgtttttaaatttttatattctttttattgttctattattatttttaatttttttcaaatatttttgtcccgagggtgattgaatctaaggatgcagaagatatggaaggctaactatatctgaaaatagatatcaaaactcatctaggaacagtgcagaattgagaattttttaacagaaacaatctgcttttaaacaaatttcctactttagtatttcccctttgatatcttttacatttaacatacatttatagagcatttaggagacagcacttcacattaattaacctcatttactacatacaacagatttgtaagggaatattattattcccgttgtgcaaaggggagatttaggctcagagaattgagcatcttgctcaaggtcttgaggcagtgccaggggtaggcgtggggaggtcaggtcctccttactcttcccaaccccccatcttcaagtcctccaagctaccacagtagctagacaacctaaggaaagagtgtgctcactgtgcaaatgaaactccagaagcttcagcaacactgcagcccctgcgactctcctatattcaatcaaacagctggtaaatggtggcacagacatatggagccagaactttctgacctgatgcttgggtgtgttcctattcctgctcttagaagcctaccttccggccgggcgcagtgcctcacgcctgtaatcccagcactttgggaggccaaggtgggcggattatctgaggtcaggagttcgagatcagcctgggcaacacagtgaaaccctgtctgcactaaaaatacaaaattagccgggcttggtgatacatgcctgtaatcccagctactcgggaggctgaggcaggagaatcgcttgaacctgggaggcagaggatgcggtgagccgagatcgtgccattgcactccagcctgggcaacaagagtaaatctccatcttaacaaaaaaaagaaaaaaaaaagcaagaaaaaaaaaagaagcctaccttccaacagctccacaactgctttcatttaggtttcattacgaatattttatttcctgctaaataaatcagagcagagtctccagtaaatgaatgcctcagaagtttctctgtctcaccagttggatctcataaacaaaaatcaagtaggtgaatttaaccatcccatcctcacccaatttgccccaacatttaacccaaatcccagagacttcaccaattcattcaatctggaaacatcagttgctcagctaatcttttcccctcttttcccattatcaggattagctacttattgttcttcctgttttgcttcaactgaaataaacttgagttctcatcctttctgtcagatggatttccaagcttaaaagctttgaatcagaatgacattaatcctgctttttctgcattgtggccttattgcttgttacagatatttgcactgctccatcttactttctgagtttcatggacgttctcattgcaaatgagtctgtgttagggagtttgtattttctcaagaaactggaaacctcattgttaaaaatctcactttggcaaagaaaattctagtccacttgtcaatttttataaaatcttatttataatcaaaatcagatttcaactaacatttacattattagcattgcatgaaggtaagtgtattttctgtagagactgaccctagggcagctgcacaaatctctgcaaggaggttcctctttagtgacaatgagtcagatatgtattaactcagaaatgaatttaagaagaaaaaaaagtttgtcatcttatgaataagtgtttcatcttggtttagttgataaagcagcagctctaaaaataaaacttactgtagatttgctcttttttcttttattttaaaaaccaaactcttactcttaactttgcctttttgcatacctaaatcaaccttttttttaattttatttttaaagatagagtctcactatgttgctcacactggactcaaattcctggactcaagcgatcctcctgcctcagcctcccaagtagctgggattacaggcatggccaccaagctcttctatagtaatatataattttttatcttttattttttatttttacaaaagcttattcttaaatgtacaacaggctccaagacaacacttcattccagctgtaggtggcaaaagacattatggcaggaaatacagatgtttaaatacgaatgaaatcaatggtcaccatcgactcaggcacaaggaacagcttactttttgccagatttcttaattccacctgtgtccaggggccccttctttctggccttcactttcagctcctcgagttccttctgctcctctttttgtttctgcttaaaagccttatcttcctcgtccatctccttggcctgcgtcttgggctgtttcaagggcttcttgccaccttagcgactggacatggcaactgccgccccttccccagaccctgccactggaaatcctaatatataatttttaaaaatgattttattttgggaggtagaggcaggcggatcacgaggtcaggagatcgagaccatcctggctaacacagtgaaaccccgtctctactaaaaatacaaaaaattagccaggtgtggtagcgggcacttgtagtcccagctactcgggaggctgaggcaggagaatggcgtgaacccgggaggcggagcttgcagtgagccgagattgcgccactgcactccagcctgggcgacagagcgagactccgtctcaaaaaaaaaaaaaaaaatgattttaggcattagtatttggaaggaattcctaggttggagagatggtgagctaattgtttgggtctacatatgagctgaaatataaatttcaaggaagtttaaatgtccatgaaatcagacctagcttttcaaaattttcacattgacaatgattgtctaataaatctatccttctacactaactaaaaacaaatttttttttgccacctcaaccttcaactactatgacattttgtatatttcaatgacatttattaaattctacctttcattgaagttttctttgtgtgtaaaaagttactgtgtaatgagaatcttaaacatagaacacaagggtgatgcatctgtgtatccttcatggcaccaaatagagctttctgcttttccctgccctaatccatccgatatattattgttgaattcattttcctaaaatttagctctgattaagttacttgttggctaagcacttacaacagtttctagttgtttactgaattatatgttcctgctcacctggcatagccttctataatctggccccaacctgtcctttctagctttatctctatggtattttccactgaaacttggctcttcctaattctgagaagaggtgctgggattttcctttgtgtatgtctgtgtgtgtgcacatgtgtgtgtgtgtgtgtgtgctattctcatgaactgcagtgtctcatacagagaccaatctcaaatcaagtccacaaagccatgtctggtttgcccatagaacacatcccttcttgtttctgatctttgcagtacttggtctaaactactcttgtgtacttaagtcactataacccactttagcttgaatgataatagtctgtgtgcttgttttatctcccagatttgacaataagcatggcatacttgaaagaacatgagctatgaggttagaaaaacctaagttcatatcttgcctctgtcacttatgagctgtgtgacttcagataagtagcatacttttctgaacttcttttttaaaatctattaaaaataattggttggccgggcatggtggtttacacctgtaatcctagcactttgggaggccgaggcgggcaaatcacttgaggtcagaagttggagaccagcctggccaatatggtgaaatcccgtctctactaaaaatacaaaattagctgggtgtggtggcgcacccctgtaatcccagctactcgggaggctgagacaggagaatcacttgaacccaggaggcaaggttgcagtgagccaagatcacaccattgcattctagcctgggtaacagagtgaaactccgtcccccaaaaaaaattattggttcactttcctgttctctcatatttggagttatcataaaatcattttaagtaaaaagattcttaccacccaacccaacctcatttgtgaatagcaaaaagcaacaaagacagaagggagtaaacaagagctaatgaagaaaaaaaggaaagattgaactgaaaatctaggaaggtttaaagaaaaatgaccagtatatgtcagaggtgtttagctgagaaaagaaagtggaagaatagtattgtttgtttggggttcaattactggaaggagttgtatcaatggtctgtacattcgctgggtcaggaagcaatgtccgtagtcactcgaaacaaagctcctgagagtcaataagtcaacacacttctctctgagtctgcccctcccctactacgtcttttagaaataagacattgaaaagaaaaaggaccatccagcatatgttgggaaatttactatcttgtctccccaaacagaaggtatttctcatattgtttaagaacaactttctgaaataaatttgccattgtttccacaagagagggaaataactaatgttatatttactatgttaataatagtaaatataacaactctagacctttgtatttgtatttattatgagccaggcactctgccaagtgcttgtgtaatcttctcagtagccctgtatggaagactttattttattcaccccacagatgaagaaactgaagaagttaaaagatcttgcccaagagcactaagatttgtacccacgtgttggatcctaaaacttgtgatgtttttactccatcatattccctcttagcaagatagtatgctattataaactagtgaggagctgcagctgactatccagaccaagaaaatgcagatttccattagcaaaattgctggagaatcaggcagcccttcctgggcaaatgctagttaccttcatggtctctttcagcccttcatagagtctcttaaattattgttacctccaactgttgtctcctaatagtcaaataaccctgctactcagagtactccacaaagcttgtcagaaaggcagactcaaagcccctggccaatactgtattatatacttaatatttgctaaaggaatagatcttaaatattctcactaaaaagaagggggtgggtagctatgacagacaatcaatgtgttacttcacttgattgtggtaaccatttcacatatatatgtatatcaaatacattgtatacctttgtaaaccaaaaataaaattctaagccccccaaccaatggaatggacccctcctctgggccaagggcattccaaagttaacctggggctgggtgcagtggctcacatctataatcccaacgttttaggaggctgaggagggaagatcacttgaggccagggaatcaagagctgcctaggcaacatagagagactccatctctactaaaaattaaaaatattaaacaggtcccggcgcagtcaccggcacaggctatggctgcgacttccctcatgtccaggttggctgcctggctgctgcagcccgtgcacagctgctccctctgcccycgccccttccacctcacggcagttacagatgaagctgttgtaatttctggaaggaaactggcccagcagatcaagcaggaagtgcggcaggaggtagaagagtgggtggcctcaggcgacaaacggccacacctgagcatgatcctggttggcgagagttctgcaagtcactcctacgtcctcaacaaaaccagggcagctgcagatgtgggaatcaacagtgagacaattgtgaaaccagcttcaatttcagaggaagaattrttgaatttaatcagcaaactgaataattatgataatgtagatggcctccttgttcagctgcctcttccagacatattgatgagagaaggatctgcaatgctgtttctccagacaaggatgctgatggctttcatgtaattaatgcagggcgaatgtgtttggaccagtattccatgttaccggctaccccatgcggtgtgtgggaaataattaagcgaactgacattccaaccctagggaagaatgtggttgtggctggaaggtcaaaaagtgttgaaatgcccattgcaatgttactgcacacagatggggtgcatgaacgtcccggaggtgatgccactgttacaatatcttatcgatatacttccaaagagcagttgaagaaacatacaattcttgcagatattgtaatatctgctgcaggtattccaaatctgatcacagcagatatgatcaaggaagaagcagcagtcactgatatgggaataaatagagttcatgatcctgtaactgccaaactgaagttggttggagatgtggattttgaaggagtcagacaaaaagccggttatatcactccagttcctggaggtgttggccccatgacagtggcaatgctaatgaagaataccattatggccgggcgcggtggctcacacctgtaatcccagcactttgggaggccgaggcgggcgaatcacgagatcaggaaacggagaccatcctggctaacatggtgaaacccccgtctctactaaaaatacaaaaaaaaaaattarccgggcgtggtggcaggtgcctgtagtcccagctacttgggaggctgaggcaggagaatgacatgaacccaggaggcagagccaagggctctgttttttccagaaattttttaagagtttgagttaatattgaatttaagcagactttctgattaaaggtctttttttcttttttaataaaacacatctgtctggtgtgatatgaatttctgaaattctgtcttcctatgactcctagttgtgacctaacctgagtttttttcttatttaatcaatgtagatattcctatattcagtaacacttacttctatagccttaaatagataatttttttcttcttcttcttcttcttcttcttcttttttttttttttgtagagatgggggtcttgctatgttgcctgggctggtattgaactcctggcctctagcaatcaatcctcttgcctcagcctcccagagggctgggattacaggcatgggccacccacgcccaaacagaggtttaaagagcattggagaaaccagcctcatcctctagtcgtttttttttttttttttttttgagattgagtctcgctctgttgcccaggctggagtgcagtggcgtgatctcgggtcactgcaacctctgcctctcgggttcgaacaattcttgtgcctcagcctcctgagcagctgggattacaggtgcatgccaccatgcctggctgatttttgtgtttttagtagagatagggtttcatcaagttggccggactggtctcaaactcctaacctcaagtgatccacctacctcggcctcccaaaatgctaggattacaggcatgagccaccgcacctggccagtcctacagtcttatatcccaacaggttgtgccaagctaggagcttaatctgtaaaatacttgaggcagggataggttccttgtctattttggctttgggctaagcagaagtagctcctgctctaggcagcttgaggcagaaagagaaagaacagttgaattgacctacctccctccttgttcttctgccagctggtgttattcttttgatagttctctggagttgaaagaaatttagagagtttgctggagatgtttttgtgagtgaggtatagctcatgtctataagtcatgcctgcttacttacctagattattaaacatggagcaagatgaccaaggtgaccaaaattttattgaattacagttgtaagtggaaaaaatgactgacttcctgcatggagaagtattatgtcaacctgttaaaagctatggaaattaaaatgtttgtgtatatacaaaatatacatgacatgtaaggtaaaattacagtgatcaatttacaacaaagaaattaacagagtagttttccagcttgtttgattaatcaagcaggtttactcttgaatccatagcatttctacaatttaatttggacaaagttctatccctaatcagccaggttttaaaactgaaatgttaagggtggatttttagctcccccaggaatggtgtggatgatgataaatacttttttaaaaaattaagtattattgtttataagacatgggttccagctgtctccctggctggagtgcagtggtctgatcatagctcactgcagccttgaactcctgggcttaaactatcctcctgcctcagcctccgaaatggcttggactacaggtgtgtgccagcatgccyggctaagttttaaacatttgtttagagatgggctcactatgttgcccaggctggtcttgacctcctgagctctattattccccccacttcagcctcccaagtagcgggattacaggtgtgagccactgtgcctggcaagaatttatacttaggcataggagatgtttctggattagttaagaaattctgctatcagtaggagtagaggtttagagttttacctcttggaagtataccttggaagggagttctgagattaaatgtaatcaaacacttactgagagctttctatggaccaggcactacactagactctggggattacagaggcaattacctgtcctggtactcaaggtgttaatgatctagtgtcatttttctttaaaaaagaaagcacctgcatttttcatcttgagcaaatatagtaactctaaccaaagtgatttactcaaggttcaagtcatagttgttttggagaaagtaagtgtcagatgcactgtggctgtcaggcacatagtaggcattaaataaacatggttggtgttcactgaatgtggattgaaggtaaaatgactgatcttaagtttcgtgaggaataggtttgcttcatgaaactggtttttatcttcccaaatagttttcaatcattcatttaaagtggtaggttgattaatactgcaaagttatgatgtaaaatgtgatattacctctgtcgaacctgtattgttcatgtgaatgggagtttgactttgggaataaacattgaaaatttgcaggaaggacccacccaaatgtataatgaaatgtgattccaagtatgaaaaaccagtgataatttaaaggatcattttgttgataaaaatatatatatatatagaacaggtgtggtggcacatgcctgcagtcccagctacccgggaggctgaggtgggaggattccttgagtgcaggagttggaggctgcagggagctataattgtgccactgcactccagcctgggcatcagagcaagaccttgtctctaaaaaacaaaaacaagacctggcgcagtggctcatgcctgtaatcccagcactttgggaggctgaggtgggtggatcacctgaggtcaggagttcgagaccatcctgactaacatggagaaaccccatctctactacaaatacaaaattagccaggcgtggtggcgcttgcctataatcccagctgctcgggaggctgaggcaggagaatcgcttgaacccgggaggaagaggttgcggtaagccgagatcataccattgcactccagaccgggcaagaagagcaaaactctgtctcaagaaaaaaaaaaacaaaaaacaaaaaacaaaggtagcctgaaacactaattcaagccatgatgggagtgggtagtcggacatgcatcatagcctccaccctttggaattcaggcacaactgaccagcactaacattaaaacagaaaccttaagatggacaaagcagattctttgtagcagtaagataccaacatgacatatagcaggccctgaaagatctcaaagtattttgtcctaaaatatctttctttgacatattttgaaatggccctgcaaagctgtctctcgtgggaaaaaatttacattctataaagaatccttttctctttctgggtctttttcctgatacaggagagaattattaataactaagagtctggcaccttttgatgtctgataggaaacatttacaatctattctctctgaagcctgctacctgggggcttcgtctgcataataagaatcttggtttccacagcaccttatcttaacccagaccctttcttctatggattctaggtcttttagataaaccctttaaccaattgccaatcagaaaatctttgaatccacctatgaactggaaggcactctgctccccttctcttggagttgtatcctttctggcccaaaccagtgcgcagctaacacgtattgattgatgtcctatatctttctaaaatgcatgaaaccaagctgtagcctggccaccttgggaagatgttctcaggatctcttgagactatgtcatggccatgtccttaacctttgcaaaataaacttctaaactgattgacacttgtctcagttactttttgggttataccttaaatatatacaattttatttgtcaattataccacaacaaagctgaaaaaatgagataaatcacatatgaaagagtaaagcacaagtagaacaaatacttttttaattgaacaaaaataggaggggcctgcacaacaaactatgaaaacatattctaagattattattgtattggtacagaaatagatagttgtgtcaagttctgcatgacacgttattgagtgaaaaaataagatgcagactaagttcagtatacaaatgttaatcacaccataaaatagcaatagtaaaaaaaattaaaaggtcctatgtaatttataagcacattaaagcttgagaaacactgaggaatatggtcctttccatgaggagtctaaggtcttaaaccttaggaaaccattctttcctctctctttccaccacagtgttactcatttgaatttctctagcacccagtaatacagtgctagtgtattaggctaatgcagttttagaaaatgcaaaaacatactaatgttaagatggttacaagaaagttctgaaagtgacggacggcatcttctctgccttccttatactgaggccaaggaactcagtcttacgcagccatgtgtcacataacaatgtttcaatcaactatgaactagatatttcacagtgatcccatagattacaaggaagctgaaaactcctatcacccagtgacatggtaacaatgaagtgctgtgtttgtggtgatgctggtgtaaacaaacactgttgtataaaagtatagcaatacaattaggtacatgcaatatacaatatttgacaatgataataagcaactttgtggctggtttatatatttgctacactatactttttattgttattttagagtatactcctacgacttataaaaagaaaaaagttaactgtaaaacagccccagccaggtctttcaggaggtattccagaagaaagcatggttatcataggaagtgacagctccttgtgtgttattgcccctgaagccttccagtatagatggcaagatgtggaggagggagacagtgatattgatgaccccaaccctgtgtaggcctaggctattgtttgtgtttgtgtctaagtttttaacaaaaatttacaaagttaaaaaaaaattaattgaaagaagctttgagaatgaagatatagagaaagaaaaaaatatatatatattaaagaaaaaaatatatatatataatttttttaatggagcctcactctgtcacctaggctggagtgcaatggcgcgatctctgctcactgcaacctctgcctcctgggttcaagcaattctcctgcctcaacctcccaagtagctgggactacaggcacgtgccaccgctccagctaattttttgtagttttagtagagacggggttttatcgtgttagccaggatggtctcgatcaccgtgcccgcaagaaaatatttttatatagctgtacagtgtgtctgcgttttaagctaagtgttactacaaaagagtcaaaaagtttaaaaataatttaaaagtatacaaagtaaaaaagttacagtaggccgggcgccgtggcttacgcctgtaatcccagcactttgggagactgaggagggcggatcacgaggtcaggagattgagaccatcctggctaacattgtgaaaccccctctctaccaaaaatacataaaattagccgggcgttgtggtgggtgcctgtagtcccagctactcggcaggctgaggcaggagaatggagtgaacccaggaggcggagcttgcagtgagttgagatcgcgccactgcactccaacctgggcaacagagcgagactccgtctcaaaaaaaaaaaaaaaagttacagcaagctaagcttaatttattattgaaataagaaatacttttataaatttagcgtagcctaagtgtatagtgtttataagtctgtagtagtgcacagtaatgtcctaggccttcacattcactcaccactcactgactcacccagagcagagcaactttcagtcccgcaagccccattcatggtaagtgccttatacatgtataccatttttaaatattttatactgtatttttattgtactttttctatgtttagatacacacgtacttaccattatgttataattgcctacagtatttagtacagtgccatgcagtataggcttgtagcctaggarcaataggccataccttacagcctaggttgtactaagctactccatctaggtttgtgtaagtactttctatgatgtttgcaaaatgacaaaatcatctaaggatgcatttctcagaatgtatccctatcgttaagcaatgcatgagtgtaattagaagttattttctagtcacccatagttgactttttgaggtgagtagtattcctctcatatagaagagctatgggatgcgcatgtaaaaatatactttgaggaggcaa

SEQ ID NO: 93361 - DNA, 22794 bp, Homo sapiens
ggtagatttttttgttttttgttttttgggttttttccttggaactttaaaaaaaaaaaaaagacagagaagaccagctccaggaaaagaaaaagaaaaagaaaaaaaaaacccaaaaaaatacaacttctagttgtcagaatcggaatgcttatcagttatgctgggagacaatgaaaacatcaaaaagcacatacaagccataaaaaattcaggtcctctgaagcaatgtgggacacgcttggttgtgctcctcatttgcatgccagtacccacagtgctttgcaagctcctagatctttcggagcagccccagtgtctgagctctagggaacaaagtgaaaggttggagcgtgcttctggggagagagggacgtttgtgtctgcacagaaaagcaaggcgggtgtgggtgagagaacttctccccccgtggtgattagcagccagcctttgagggcttaatcacaggcttgagagctgtacctggccttttgtcttatcgttctgttgcttttttgccttcctcttcttccctttccccagaatgctgcaacggtgaaggtagactgtgcagggaagaggagaaggatgccaatctttagaagtcctggttgtgctgctatatcccttgcctggaattggagatttgtgtgcagtgtgtatcttctggtgctggtcctcacctcaaagcaccttggcctttacatctgttcccatggacagtccatgtttggtcaatgtgaagaacttagaggtgccatcgtgccttcggctgggggcaggggttccccttaaccttgccagtggggcagcctctgacctcactcttcccacccacacacattgcctttccctccaaaccttgctcttcaaagagtccagccgagccattgtctggatggtccaaattctcgaggtggcttggggatacaggactcaaactaagagctgggggaggagagaagtaaatttggctcctgaccgggccccctcagccttctgggtgtatcacataccaccctcatttctcctgccctttccaagcctgtcctgtggggtcaggagatacagaagggttggtgactattatacaacttgattttaacaagaccaactgttctggggcattacaaaatacataaaaaataaaagtaaagctcaatctttgaggttgctacctggaaagtttttctctgggtttgtactttgatttttgagctgtgcttttctcaatgctgcaaaggagttcttaggctagattaatttagcagtaggaagatctgggcagaagagttaatgtgtatacgtgtcagctctcaacctaccccctgaaactcccagcttcagaggtaagataaaagtctgcccctacccacaatttagaagcaggctgccctgcaagccggatccagtcaacagatttgtttgcttcagcctgtacacactgttgtacagtgtgttgaatcagtttccaacattttttgaatcaggggctttatagcatttcttaagacatctgaagatctggccacacaggccgacatttctcataggaaccaccagcctgggttgcatagatagagccccctaagtggtagggggttgggggaggttgaatcttctcctgctgggcctgcagtctctggtccaccacagtcccaaaggcctttggtcttagactgcccactccacttccagatgttcctatcccgctcttgcaggtctctgcacgctcagccttggctgggctcatagacaatccctgagtttttccactttgttatccatagcattggtataagggtgtccaaaccctcagctgtgacaacttttcatagtggggatagagaggaggcaagactgagggccctgactcacaagccctcccagcttttctgtcccaaataaagcaaatgcattttttcacctgctagagcccgaggggttctctctgcccccacccacctcctcctggaatacatatttcctttcctctgatacctaaagtattctggggtgaggagtagtttgcaagatttggatttttaaaaattctttcccagatttgttgtgtctaatttgggctgcaagcggtttttggtgtcaatgactaaccactgtttggtctgcacagccatttctgttgaacttggatagcgctgaaarcccagtttcccccaaataaagtctaaatacatttacacatttattcccacatgcatctttgtgtttctgcctgtctcctcacacctcacacatgtgtgtggatgggaacgtcctggagagaaaaggggcaggtaacttaagcttctactgtgaacttcagaagagaaaaaacatcagcaagttgacccagttggatggtaagagataaagatgcttccaagaaaaggtgttagaatgagagtttggattggaatttggttgtttccttgtgatctaacagacaaataatatcactagacagaaaaatgggacataaaatagagagtttaggaaaatatgtgaaaaaggtcactatcaaaattacccctctccccaaatccagctgggattctttatcaaaatcagagctttcagtaggtttaatattcaccagtttctgagacagttataacaacaggtgatgccgggctttaataacacggatgatgacagttaccatttacatattgactcctttaatccttacaacaactccataaaagtgatatctcatatacccattttacaggcaggaaaactgacgcttaacatgattaagtaatttgaccaaagcccgagaggtggaaagggatagagctggcatttaaacccatgctgccctccagcatatcctgggctgggacagcagaatgggtaccctccttgccagctggctggagtaagaatctgacagacagcccaccttggtcatgactggcttggggactggcacagtggagagcccgagggagacaaatggcatatttggcccacaattccactgctaaaagtgaccctcagggatgtgccatgagagtcactgccatgagaggaccagtggctcctctcctctctgatgaaaacttggacctttggagattagccccactctaggctatttgatagaatgggccacagcctgggcaattcaggtgagttttgttgttgttgttgtttaataagacacggtctcactctgtcacccaggctggagtgtaatggcacgatctcagctcactgcagcctcaacctcccaggctcaaacaatccccccacctcagcctcctgagtagctgggactgcaggtgcctgctactaagcctggctaatttttgcgttttttgtaaagacagagtttcaccatgttgcccaggctggtctcaaactcctgggctgaagcaatctgccctcctcagcctcccaaagtgctgggattatagacatgagccactgagcctggcctcagggtgattttttcagcctaaatacctgtggccaagccatgggacactgaaagtgctcactgcctgagggtgctggggtctgactaagctgatgcagccatgcctgaagcaaggcccagatggacagaaggtcagaacggagagaagccacgtcttcctctgtgtcttatctggagacggttgggagggtggaacggggaggctgaactctgaagcatatgactggggaccatcagtgactacgaagttggggctaggtgactatgtagtgactgtcagatgttggcagctgcttaaacaagctgagctgggctgaaggctcagcttttatataccccttcccatagacattgagcacctaaggggggaggcattgtaccggggaccgtgggagagaccaagatggacaggcgggttctctctctagccacttacacaattcctctttggggagccagctctagaagaaactcaaacttcagtgagtgacagcaagtcattctaattgggaaatgtgcacccagggtcagggatcatgtgtattcatctttcccatgccccatgtgaatcacagagctgggcctttagtgggagttaagtaaatgtttgtggatcaatgactgcttcagtcaataattgaatttttaggggcttttggaaggacttgtgggagaggaggaaattgagtgtatgttgtatctgttaaaattaaacttggtgctagtaacagacatctgaattaacagttgcaataaataattagaggtttatttttctaccatataacagtgtctggaggttaagaatctatggcagtatggcatcttcacgtccatcagggacccagccttcttttatctttctgctctttggtcttaaactcatgaattccaaccccaagattgcctgacggtaacaagataactactggaactccattgattacatccatgttttaggtaggaagaaggagaatggggagaaagacagcctttctagaaggctccattgacctccaccaacatttcattggccacttctaatttcgagggatattaggaaatatattctcttgtctgggcacattctcaatctgagtaaaatcttgcttctgttaggaagaagggaagaataaatcgtgggtaaaaaactgcaggctctgctttgcaagattgggtcttctttatggagaaggagaaggaaaggtattcagcaacacaacacttgtttcactcctgtcctctgagatgcacaggtttgggacattctttattgtgacctgataatgtggcaaatataaggcatcggagcctggggcacttaattagttccttgactattcaaatcctcctgccaagggcttggttaattgcatggacttctccttcattattttcagctgtttaaagtgcctctaagaacactcatcctctattttgtgtaatgaagcctctggtgaaaaatggagtctgacaggtatgtggacagaaatgccctgcaggggcrggcagaactggctgtgttagccggcaggtagatggacaaatagatggataaagtctttggtaaacatggagcattactcaacagcaaatttaccacctcttgctgactcaaaccagctcttgcagaatacttaatgacttctgctaaacaaaacactagagtttctcactttttaaaaagtctacaaaaatgaaagctactgtgtaaaatgagtgccaaatttccactcatatgtttgttcagctttctttgcttttctcccaaaccataacgaaatagacgctatcaattttcccaagatggcaacctaacagctagccaggtgttctcagataagaagggctcccttgacacaaagagtttaacggggttgggatattttccagttttcttttccgagggctagggaagctggattgaggtttctgaagaggagaggcaggatggtgaaatgggagcccgtgggctgcttctgcctgttgttcctcttgacaaacttgctgaaggggtggatccccccctgctgaaaccaccagcttctactgggtgtgctggaaattatcaatccttgaaggaggtgaaattatcctaaaccccaaacctcaccaatattccagtccctggagaaaggcctactgaaaggagaatgaattatttatgtcatccatactagtaagttttacaaacatcttcctttccagtttcactataaactccataccaataggaaaatgtcattattactccctgttctagccctttgcccagaacataagcagtgctcagtttgcttcttggttatgtaggtaatagcatttagtttctttctggaacagcgtccaacttggcttctcccttaccttttgttgtactttgacatattttctcctagacattttctttgtgttgtttttttttttcagtgactgatgctctactggatatgaaatcgtgtatgctttgtcaagtagcattttaggatagtatgttcccatttgtgttagtataggctaagctgctgtaacaaagaggccacaaaacacagaggtttaaataaaatagaatgtatttctctccatacgacaatcttaggatagtccagggcaggtaggcaattccgttccacaaggtcataaggagaacaggctagaggagcagccctctcttccttaacatgtaatttctgaattttggtcccagtgagtcctgtacttttcatcatttccgagccagagagaagagggaaaaagaatagaagacaggcaaatttctcataaaaataaaatccagaaggcacacatttcacttctgctaacatctcattggccaaaacttagaacctggctatagttacctgcaaaggaggctggaaatgcagtctctagctaagcaatcatatgtcagaaattggcatttccaaatacccagtggatattcatcaggatatacaaatgagaagttggaattcctgggaattcttagaaatttctgaaataataagttatccttttaaaaaaaaaacttttattttaggttcagggatacatgtataggtttgttataaagataaactcgtgttattctgaaaagacttccatttgcagacatcgctgctgcccagaactccctgccaccagccatggccaaccccactgtgttcttcaacattgcaattgatagtgagtccttgggctgcatctccttcaagctatttgcagacaaagttctaaagatggaagaaaatttttgtgctctgaacacyggagagaaagtatttggtgataaakgtccctgcttttacagaattattccggggtgtgtgtcagggtggtgacttcacacaccataatggcactggtggcaagtccctctacagcaaggaatttgatgatgagaacttcatcctaagcatacagctcctggcgtcttgtccacggcaaatgctggacccaccacaaatggttcccagtttttcwtctgtactgccaagacagaggatggatgacagcatgtggtctttggcaaggtgaaagatggcatgagtattgtggaagccctggaacgctctgggtccaggaatggtaagaccagcaagaagatcacagctgctgactgtggacaactctaataaatttgattgttttatctgaaccaccagatcgttccttctatagctcaggaaagcatgcttccaccccatttgctcacagcatcctataatctttgcacagtcctttgggttccatattttccttatcctcttccatgtctagctggatcgcagagttaagtttataattacaaaatgaaaactaagtaacaagaagaaaataaaagacttccagcaatttttatactctttagtcattactgtggatatctaaaagaaattggtttaataaataagaaatattacatttagcaaatttataaacaactatagcctgagataaaaaaaaaatcaaacattagaaaataccagtgaacatttttgggtaatattcaaagaatgtgacattcagatctcctagcaaggttaaagcactacacagaatcacacattgaaattgccaattaagggcgtattttgcttcccaaatttgttatttcctagaacatcactagcaggatttgaataaagtatacatacatataaacctaatactgyttattttatttccaagaatgacttgccattagcatcagtcagggccaagaacacacacttagaacaggmcaatggctacaagcaagattgactgatcagctcttgacctatgtgctctcctatgtgctatatgctcttccacctgccagcctttcctgctcttgcttttcatttgacattgatggattcaaaccagtgatgtctttatgttgatcattaagccttgattcctgcaggataattacaatactttttcccaatttcttgactgatttttctttcgagatttggagaaacataaaaaattctcaagaaatactgggaaggaattccagcgtggaaacactagtcagggtgtatgtatgaagcaaagggaggaggttctattactaaaagacaggagaaaatgggcactcagagtcatctctgctcaggactagctaacaatttataggctcaatgtgaaatgtaaatgtggaggactcttgttataaaactattcagaatttcaaggtggcagccatggagcattaaaccaagtgtagggcccttgtaagtgtggagccctgtatgactgtgtaggacccacacccatgaacctggccctgtctctgctacattgtgtcatttagaaatctgaattgatgtcsgttttagtggctgcataatatttcattgtgcagatttaccataatttctataacaattgctgtattcttggatatttttatggcattgaatgaagcaatcttttcaacagccctcaggagctgcagaccactgttgcacgtgggctgttacccacagggtttgagtatgagctaaggcaagagaagcagaaaccaggaccagatgggaactcccaggaagaaggcagcatggtcatgagcaacatcaaagacatcaaagataaatcaagccaagacagggtcagaatacatcagtaagggaagaatggcagacaaggcaaatgtgggcctgtccttagaggtggggcctccaataagcttcccaaggaatcttgctcaaccaagggcagttgttgccttttgcttggggcaacctggttcttcccagtgtatctttgagctgatctctccgaatttcaaagagcccatgcctgctcaggccatctctattcatgttggatgactgtctctcttataaactctgggcagactacgaatcagtccttaggggctaggagaggagaggagaggatatgctggatgatcactttctgcaagtctccagaacctcctgttgacttctgtgtgatggtcaacytgagacgtcttgttcagtgcaaatgaatgtgttctttttggctgacacatttagtaggaacaaatgaatgtgaaagagtaggagatgctataaggtagggaggagaaaagcatagggaacagttgtctctgggtccgagacatctctgacactataatttataacccaaatgatctcagtcaatgcgcttagcttttctgtgcctcatatgtaaagtgggagcaatgtcccatttatctgaggggtcaacacacctttgctgtaaagggccacatagtaaaataaatattttgcacttttcagggcctagagcttttgtcacaactactcaactctgccattgtagagtaaaagcagctatagacaatatgtaaataaattgtggtggttatgttccaataaaactatatttacaaaaacaggtagctgacaatggtttgccaaatcctagcctgtttcatagaactcttgtgagaattaaatgaggtacgtgtgtcaaacgctactgcaggccctccaggataagagtcattgtcatgaggagtaggacagacagagaagagcaggtgggagagttgctcacagcctcgcaggctttcaggactggccccccgtcatttgctaacaatgyctcttttgacgatgtccaaagggtcttcctcatccactttttcttcctaggagccaaagtaccaaaaggaggaattttgaggctctattaaacagttataatgaaacatttatcttctatattagtcattctgtgtaattatttctgaggatgaattctttccaagatatatttacagacacatggctgcaaccatgagacacaccactgagaattttccagctcttcttttccatgctctatgttcttttttattcttccattcatttttaaaacattttattgtggtaagaacgctttacatgagatctacattcttaacagatatttaagtgtacaatatagtattgttatctctaggcacagtgttgtagagcatatctttagaacttattcatcttgcataactgaaattttattcttgttaaataccaactcttttcctctctccccctagtgcctggcaaccacaattctattctttgcttccatgagttcaactattttagacacctctgtatgttcttaaaaaaaaatctctccttttcaatattgtcagctaagtcctcccaggggaacacttggggagaagttatctccarcctgagacccccttggtaagctgcaaaaagttggaggtcactcagagtaatggtgtctaagcagaacttgatttctgcattttttttttcatcatagaatctcctaaagagcattttaagatggagaatctggtcttgggtaggacctaggaaactgtcattatttaaaatgccccaggactgtatagtcctagctacttgggaagctgaagtgggaggatcatttgaacccaggagttacaggctgcagtgagctatggtcgtatcactacgctctagcctgggcgacacagcgaaaccctatctcacaaataaataaattaatagtccccaggtgattccgtggcccagccaagtatcttcttagttctaggccagcctcctccacttaacctctctgtaatagttcccaaactccactcttcaaaactcctagccccacagttgcctgcrttgcctcctcttttctttgtctgcttgctttgttagccagaaggcagagagcacgaaggcatgttagtacctgcagtgatggctctgcactccaagaaggaaatgagttctcatcggcttggccagctgggaatgctggaactggtattctcagcctgtggactcaagagagcactgggccaggagggtttcagtgtttccaagtcaatgccraaggcacgtacaccggtggatgggaaagacattgatttttcttgagataatacctcaagtgtatttgttcagtgtctttcagaaacaaagccttgtctgatttatttttattgtttttttgtttgttccgagaagacaaagcttgtctgactaaagcaaacctcagtgttttactgttcagtagctcctgggagtcaggttgttcacatccctctgttaagtgcattgatgcttcaacagatacttagtgagcacctactgtgtgtcattgtgggctatagatagctttgggagagtcaaaagacccggtggtttctgagatggcagcctggctcctggagcctgcagttccccatggaggggcctcttagttctaatcccagtcctgcacaaagaaaccaatcccagacaaaagtattttaagagcacttggacaaaatgctcagcaaaacaggtttgttgtctggccttgatgtctcacttcctgtacctaattcttgccttagttccagcaagcatttattaagtgcctgccacataacactgtgctaagtgcttcccacctgctggctgatttgattgatcctcccacaatcatagcgggtgatatggtttggatttgtgtccccacccaaatctcatgttgaattgtaatccctattgtgagagaaggggactagtgggaggtgattggattattggggcagatttctcccttgggactgttctcatgttcatgagtgagttctcaagagatctggttgtttaaaagtgtgtagcatgtccttgtttgctctcttcctcctgctccagccatataagacgtgccagcttcccctttgccttctkccatgattgtaagtttcctgargcctccccagcctcctgtacagcctgtggaaccatgagccaattaaacctcttttctttataaattacccagtttcatgtatttatttacagcagtgcaagaatggactaatacagcaggtatgatacccataagacagatggggaaattgaagcttgagagacgatttgcctgacaacaaagctagtcctcccaactcctgtgctaaacagactcccatagcttctgtaactacccagcttctaccatagcttctgtcactacccagttaattgtgctcccaggtcagatctcgtcttctcctttaagccctcaaccctggcctttaaaaatcaagtatcctgtcaccatgatgctttggtggggaaatagtgcattcattattccaaaagaacaggccttgtgactagaaaaccactcctttccctccaggtcattattctttctggggaatcactaaatcctgctacgcccctgcttctcaaagtatagtctctgcactagcagcagcagcagcacctatgaacttattagaaataagtaaattttggggccccaccctggacctactgaatcagaatctctcaggataggctcaggaattgtgttttaataagttctccaggtggcactgatgcatgctgaagtttgagaaccactggcctagatgggatgcctcaggtacttcaataatagcacagtagtgtgcacttaccacagactgctggctctataagatatcctgacaagggacaacaaagacagtgagggtggcacttctgtgttcaamaatgtgtgaacattgcatattctgcttcccccttggaaattcttaaagatattggcatacttaagaccagaaagagtcttgcaataggaagagctgcttaactttactcaatcactatctcctaaattgagttttaattttaattatggagtttttctacttttttataatttcaacttttcaggggatacatgtgcaggtttgttacacaggtatactgcatggtgctgaggtttgaggtacaaatgatcctgtcacccaggtactgggcatagtacccaatatgtagtttttcaaccctcaccctctagtaacccccaatgtctgtgttcccatctttatgtccatgtgtacccaatgtttagctcccacttgtgagaacatgtggtatttgattttctgtttctgcattaatttkcttagaataatggcttccagctgcatctatattgctgcaaaggacatgatttcattcttttttatggttgtgtagtatttcgtggtgwgtatgtaccagattttctttatctagtccaccattgatcagcacctgggtcaattacatgtctttgctattgtgaataatactgcratgaacattcaagttcaagtgtctttttgatagaacaatgtattatcctttggatataaacccagtaataggatgctaggttaaatagtagttctgagttctttgagaaatctccgaactgctttccacagcggctaaactaatttacattcccacgcacagtgtgtaagtgttcccttttcttcgaagccttgccagtagctgttattttttgacttttaaataatagccattctgatgggtatgagacagtatatgccattgtggttttgatttgcctttcactgatgatcagtgatgctgaggattttttcaaatgtctgttgcccacttgtgtgtcttcttttgaggagagtctgtttatgtcctttgcccactttttaatgggattattttttgcttgttgaattgtttatttatagattctggatgttagacctttgttggatgcatagtttgagaacgttccctcccattctgtgggttgtctgtttactctgttgatagtttcttttgctgtgcagaagctctttagtttaattaggtcccacttgtcaatttttggttttgttgcaattgcttttgaggacttagccataaattatttgccaaggctgacgtcatgaatcttttcttttacaaaatacctgttgatatcccaagcaactagtaatgtctagcacactttgaagtgttgatcactatgatcctcaactgtagatgaccctatagcttgagcatatttaatcagaattaaattccaatagccatatcaaaaattgagaacatcatacagaattgttttaaaaagtcacttttggatccatacagaaccctgtgttgcacaattccatgggacagccctgtgaacagggtcccccggagttgggcaaccctgaagtatgggcctatcatcaaatattggattaatgaaaggcaaaggaactaaaatgtttccatctatcagaaataatttagaatccaggggcatrggggagtctaaggagagggtttccaagatatttaactctcttaacttcatggaaaatatttcaggatgaactttgccaattataactaagccaataaatacaattacattaaatgtagtcatattcctgctcctttgagcctagctaattttacattataaaagcatttgatgagaacactttgtatttaggtaacatctttcatccccaagtctccaggatctacttgagagatgattggcaagtaaattccccaatgcagaggtccctcctctggtggaatggtgagtctctaayagaagaaggaaatttgctgacactggagtcactggctaactattgaagatggtatcaaagctaatcagcagacagaagagccagtctggaggacatgactgtgggctttatatttctgtgaattaatttaagaaaaataaaaggaatagttatttcttgttctctttgtggtgctctaagaatttcacatttaatcatgagatgcctgctacctccaggccccactcatgcctaagaagtgccccaaattactttgcattagatgctggttccaagttcagcagggaaccagaaatgttagatgcacataaaagttgggcatagggaggaggtgagaagggccagctttgagttcccttctacttggcaggtgtcttctttttctcttattttcaaacaaagtttattatttcctcctctatgagaagaatatattcttattatagaaaatttggcaaaaatagaaatgcaagaagcaaagaaactcccatgatccaaagagaatcactattaacaatttgatgtatttccctccagtcttttttctatgcattttaaaaaacaggattacagtcacactgtatgtacaatcctgattccaaggtattgtggtacaacctaggcatatgcccatgtttcttttcaaactccacattaacaaatgacaccatatactcttgaaggcaaggayggggtcagctcttactcatcatagtgacacgaggacctagtacagaccttggcacacagtaaatgttgttgaacaaaataaaaatgaagagtaggtcatgaagtggatataccagaatttatgtaacctggcttccaatgcagacatgaaagtgcctccaattgtttgctgtgttaggcaatgcttaaattttgttgtgcttattttctttttctatgttgagattattacctagagcagatactgtcagcatctagctgttttccctcaacctttctgaggggcacctgcagacagtccatgggcagtctgctggcttcctgtgtcacctgtctgagtttgttctctgtcggttgaagcatacttggtctatggacatgtggaatagcctgaatgtgctcatgttaatgtccctgagcaaccctcagccaatgggagtgggagttactgggtaaacwttccagcttccttgcttctcagrgtgacaactgtaaggtgtgttctacacagtctgtcaagtggttctagaaagatggaagccccaactagtcacagtgtccaactcattagcgtgtccatatattggctttcctctcatccttgctttccacattctccattccctcatcatgcttcctgggatcacctcccaaagaaactgcttgcaccaaacctttgtctcaggctctacttcaggggacccccagctaaatattattaacgttggatagagtctcagaagcagaattacyaagttaaaccagatggattccttaaagattcgggacacatatagattggcaagtaatttccatatgggggttttcagagctcttttactaatctctgattatactcaaagaatctagaccctgaactagaccctcaggaagaggaggaaaagaagtcaaagcacttacctgccaggtctgcactgtaggattgttaagcagtttcgtttgagtttgttcttttgttgttcacttttctctgttgtttgccttgcttcattttctcctgtgttcctggacagaggccagtggttatagaatgttcccttttgtctctacaaatggaaaaagggggaattgactgcagcagagaaaagaatctgggaggaaggatgagtgaaacgttgctttggaatatttcagccttgggtctctgtaacaaccagtttggtattttcaaggaaaatgaaagaaatagactgtgctataaacaggtttttgtcatcattaaacccttgcaatctatgaagagtatgcactgttgtgttccaaaataaagctgcatgtttggggattgtcatagtgacctagaaatcacagtttctccagggagacataggaatgaagtttcctaacagctttaccgctaaagccatggctgcacacagaaaaaggactgagcctgtttttccagaaatgagagacaaattaccctttttcctaaggttgcctggacattccaagaaagcctggtcaatctttgctggatggacatggaaaatagacggttgagcacttaccttttgtgtccaggtacacaaaatccttatctatccagtttttgcacattacatgtgatggagattttttcttttgtttttgttgtttacagaatgaagagaaggatgccttggtcaaggtcagcttaaagtcagttgttaacttagacgtgcccttcctccaaccagaaaatggaaaatgtcagatgcctcccaattgtcctgagtccgtgcatcctttctaaaacttccccaagctcttccccactcttgaaaattctagcttactcatacatccattttttgggggaagggaatcacaccacacccacaaactggatgcttggctgcctgcaggaacaactccagcagagttctaggttgggctgatgtgggagcaccccatgttgtggtggaggagcttatgtggcagagacggcttcatgtttaccaaacttgacttctttttccttctaggatgcacagctagacaatgcatcccagccgccatcactgttccgtggaccacgtgattggcagagggaagatctatgtcatttccagccctggctctgtcttctccaccccttcacactctgtctttccaccactcttacaagtggctgtgcagcgctcccaggccgcatgggatgagggaaaatgatggcaaaagactggtccttaagtcatggcacaggagtgacccacataagagaactcctggccagagacatcaacacgagacatcacatgactgagaaatagtctttcatcatgtgaaggcattgacttttggagttatttgttattgcaatgaatctactctgactcatacatattgcaagtatctgttgcctcttggcgtgtgtatgagttcgcctacatggcagagtcaattctgctgtctgtcccaccaagctcaccaaagctatttgcatgaaggatccttcagtcacaaaacagtgagaagggcatgtgaacagcatgcaatcaaagcatgttctcaatatcatgagtgcacaggagtggaagtgttcagttcaactgtgaccacagggatgagaggccacatggcatgaggagggtagtgactccaatcagatgtgcaacccatagaaccccagactaacttttggactatctttgcacttaaggaagcatcagcctggcatccattagcaacccagaagcagttggaatctgtattgcagtcccatcataatgcaaagcaaaatttacaattcttttccccttcttctgagatatagtgcacaccctcggctgcttcccaagcctctcttctcctctatgccaaacccacccccttaaacctctccctaaacccattccaagctgttattctaaacttctccacctcttcctgccttttcccgactactcttttgtcccagtaaataactctccaccttctcctctgcaaatcaagccggactttctggcctgcctggacttaacatttcctgttacgactcataggctcaattcgtgagtcgatcatagacccagaaaggtccaaaaatgaaaacagattcttcttaggggtgtgttgagggagtggctataaatatttacacattattatcattactttttttggatcacagattgtcaactccactgcttgtgagttaggcaatcttgggtaaattcttcaccatcccttagcctcaatctcctgccttgtaaaatggggtttattgaccttctcaggattgtggtggggagtaaatgagatgtggtatgtgaacgtagtttgcatatacccagcagtaagcaatgttttttctgccctttctgaactcgtggctcctttgctttatgtgagcagagttggaggtgcaggcctagcccaacgacataaaggaaggtaaactgagatgccagtcgtcagcagcacccggttttgataccagctcctctggatctcactcttgagttccctggtcaactttcaagtgaccttgaagggagaactgcatttcccgtgcctccagcagagtgtttccaccacaagggaaacatgcccaccccttgtcccccagggtgggttgcgaaggttaatgaattggtatttgtgaagtgctttgagatctgtggatgaaaggccctatgaagtcaaaagcgttgggatgattattaaattgccttgcctgaggtcagacagcgcaggactaggggagctagaaagggaagactcgtttcctttcttccattcccctgctggaacaactaagaccgtaacctgttcttgttaagatgggctgtccctctgtgggtggatgtcctcgggcctcacatcctgtctcttttattcccagcaccctggttaggaccaggctctggctcctcaccagcctgctcattggaatgccagacagctccctcgctcttggggagagctctggtttgctgggtttttagaagctcagggaaactgtcgtgtgagagacagacattttcacttgaccgtgagacccttcttgagaaagaaggggcagtttctcctgtgccagctggacaccaaaacaaaggaggagctttgctgtggctgaatttggggggttgcattctgcaccaaccagctcttttctaaaccccattttcttttctctgtctctctctctctctctcttttgctttctccattcaaccagcttggcagttgcaatatttgttttccaaacatttcctccatacctttgttttttccttctcccacattggctgttgtatagacacctcattgctattcagacacctgtcactttcrgatgtcagtgtggctgttgccacactgattagttaagatgaagaaaaaaatgcagtggcatataaataaaaamttagagactgtcacattgtttaaaaagggcccacctcccaatgccagatctcggcagagcagcgtccttctctttcctaggtaacccagctaaggggaccacttataatgtcttgtttttagtgattaagtggttaatgatttaatgaactaaaaaaaaatctcatttgttgcttcccttggacttggaaaaaacctcaaagagctgattttctgtgtacctcagtccaatattgctacctgctgggatacgaacacagtctctaaataaattgctagtggccttaggcgggtggaagagtctccctttgatcctgctcgagcggatgaagtcaaatgttcaatcaatcaatcacgttcataacttgcagctacaatcgagctgacaacagcctattatttatttttaaaatcatatatttcattattgcaaaacacacaggctctcacgagggggaaaagactaaattattgataagccatatagatgacggagtttgttgtttctgacacgcttgtcactaactattgtcaggaaggatttactaagatgtagagtcaggaaagttggcragggatgtacgtcgtgccaaagcagagatgaggagaggaaactctaatggcctctctctctcttattgaattcttgtaggtaaaaggcagctgaaggcagaacaggtttctattgcaaagcaacacttgaaaagcccccaatttgattgctacagagcaggagatttggttctcaaaatagccatgcgtttgggaaatgaatttttgctggtgtctgtgcattcctggaaataacaatcgtagctctccagcattcccacatgggccagggccaggcatatttattcaatattgtgtgttggggcgggggcgggggaggcgatgtgcaaacgcagcctgaagaagctggcgtgggggaggccagctttggtttcctcttgttttcggaggtgggagaagatgctctcctgccgtacctccgccaggcccctgagctggcagggcgtctgcaatggaggtgtcttccctacagacctgcgattgaacttctctaatgggtttaggggaaggaaaagcagtcagaaaactgctgaccactcctttccgtgtgcttctctcttttctgttttctgggtcactagctggggaggtcgtggcaagctgagatcttaaagctgccattgacccccttgtctgaacagtgatgagttggactgaaaactctcccagacgccgcattgtcacctggttgtcacctccaccataagaagggggttgctcctggatttgctggaagaaaaagccccctggtctaaaggaagaggagatgttttgttaagggaacttaaatgtgcacacagacagatccaatcctagagaacaagtaccattaaaatggaacaaaaacagccatggaactaaagattcctaacttcccctccctccccgcccccactggtacttcctgaactcaagtacaatgtaagtaaaatcgaagctcctttggaagttcagtgaaaatttgacttgcactcctaaattattcgctaattacaagatgatctcccagttgctggggtggggagagacagtgctacgtgtatactctagaactaaaggtttctcaaggccaaagggcccttcagaattaatttttccccccatttcatagatgagaaaactaaaagtcagagaaattggaatcagacatccagttagcagcagataggggaccagacccggggcctccaaccccttccctgaggtggagccggacaccattaacagagcttagatcagaaaagaggcaatttgattccttatagagtgctctgtctcccacgttctgctgcctgctggtggagtattccagcatgcattcgtctggttttaacatactaacttcattcagaacccaaccagaactctcactcaatcacatgtgctttcgcaatgctgacccctgacaatgagtaggcaagggtattacaggattaggatttggaaataacttctgaatccataagaagacaactgaacccctcttctgggagtcgggggcccttgctcccagctctgtactaccacttctctggtgtgatgggcttggcggaagctgccccttctgggcttctgtccaggaggtgaggagtggtcgtgacaaagtccttgaccacatttcagccaggctcctcgccctctgctcaaatatgcatccacctcagccccagtccttgctgggcctgcacatcccagttttagagaaaaccctgctgagttggtttagagaaaatctcccacccttgatatctgttcatcataggctggcttcagcaagaatcctcttagtccatttagcaagaatctctcccaacattggatgaatccccttagcaattttccatccactgactccacacctccaccccacaaacctactccctgactatcaatctccactggctctgttgctgttgtattcggtatggctctcattccatgctgaggtctcttttcccctaccccaacagggttctgaataaaattcatttttaccacttgaattactgtccagttctgattctctttgacaatctacacatccttcaagtcaacttctaagtccaaaattctgcataaaattctatataaaatcctattcagtgatattttccattcaatttatttatttatttattttttattttttatttttttttttttttgagacggagtctcgctctgtcgcccaggccggactgcggactgcagtggcgcaatctcggctcactgcaagctccgcttcccgggttcacgccattctcctgcctcagcctcccgagtagctgggactacaggcgcccgccaccgcgcccggctaattttttgtatttttagtagagacggggtttcaccttgttagccaggatggtctcgatctcctgacctcatgatccacccgcctcggcctcccaaagagctgggattacaggcgtgagccaccgcgcccggcctcaatttattttttgaacattttgccacctaggatggcacgtatggaaactgagttgaccaaagccattgatgcaccggaataaaccatttcttaccatcttcatgatacagtagaaataaatcttcacagaaaccaaaaaacaaagcaaaacaacgacaacaacaaaaacatggcttcactggaacaaagagagctgttgaacttgggtgtggcatggaatctgtctgcacctcagtttcctcatctgttcaatggggaaactgatttcttttctccacacccagttggggcagattgccatgaggatctaaacccaatgcataagtgaggggagggaaaaaaagaagctt

SEQ ID NO: 93362 - DNA, 84106 bp, Homo sapiens
ctgagaagtcataggtcagggggccgtatctggtgagagccttcttcctggtgggaacgctgttgcatcccaaggcagtgcagggcctcatatggtgaggaagctaggcgtacttgctcaggcctctcttcctcttcttgtaaagccaccaattccactcccatgataatccactaacccattcataagggcagaagccctgctcttttgagctgacactacaaaccctccaaatgatgggaacatttctctgcagtgcagtcacatgtaattccattgaggattagctttgctcagtcctagcaaaattatgtttttgagaaatttattttacaagggacgatcaggtccactttcatttgcttaatttgttttcaagaaatgaaagtgatgatcccaaccgtagtttccaaatcgtgaagctgaaggttaaattacaaagagttcctctgtcctcaaattttacgaaaattagccaactttttattacctctctttcctgagttcctttccaactgtctactggacatctccacttggatacccataggtaccccccaagactgctatgcattgttgcacaggttgtgaagtgcacaagggggccacatctaagggggactgctatggtctgaatgtccccagtattcacttgttgaaatttgatccccatggtggtggtgttaagagttggggcctgctgggaagtgattaagtcatgagggcttgtcctcatgaatgagattcagtgcccttataaaagggcttaacagaaggtgttcacccttttaccttctgccatgtgaggacacagcgtttctcctctctgaagaatgtagcaacaaaggcatcattttggaagcagagagaccaggcccagaccagcgagaggtttgatgtttcacatcccagcctccagaacttgtgagaaataaatatctattgttatctattgtttctaaattacccagtctgtggtattttgttgtagcagcacaaacagactaagacagggatccttcagaatgaggtccacatagatttctaggtctattatggcagtctcttggcatatggcagccaaaggttgagctttaacaaaattggttatactatgacaattttatgactaacagaagtccagtgttgttaggaagggttttcttttttctaatatacacaaaggcaacttatgggcttggacttagggtgggtcaagctcaacatgtctagaatgaattcatcctggtcactgacctctcccacctgcttgtcatcttggattccttttatcagtggctaatatctcctttacccagttttccaagtctgaaacctcagtgccaggcttggcccacgttggcatctccttccctcctcacttcatgtccaacattccatcagtcactgagtcctgtccaatgttagggttcatgcatcaggtcttccttgattatgacaacaacttcttaactgaccttctcacggccactcttgcccctccagtccatcctccatcatgcaatcctagtgatctttctggagtggaaatatgatcagttcacccctttccaagatcttgctgtggctccttgtcacctctaacagggtttctcaaagtgtggtcctcaaaccatgtatatcagaatcacttgaggtgctttatcaaatgtggattcttagcacccaccctagctaactactaaattttcagattctctgtggtgaagctcatgaatctgcacattaattgatgtcccaagtcattttcatgcgtgtaattttgaaaactactactttctacataaacatggcataaacatgcataaacatgtcacaaacatgcagcatactcatatacatttcccacttccccagcaggaactgcagagtgcagctgggcattcaaaggaggcctttcctgtttcctggtgagcatcaccacgggcctgagaagtcactcttcaccttgcctcccaccacacaactccagctccaggtggcatacaaaaaccatgtgcctgtcctcttagagtgatttctaggaatgcagtatagtcagcccagcaactatgactagacccccatgtgggcagaagggggtggtagggcctgtgtgtgtttggagacaattcaccatgactatctccggtttcagcatggtcagggttctctgaggaaatacatttacagccacgttagtaaagttggtatgaggagacattccaatccagggtagtaaatgtaaatctccacaaaggacatttgtttacatctgatcattcattccaaggtaacgagtaatctctctccctgcaggggagaatgggtaggtcactagtagccagagtttcctgcgttggggttttctctcctgtggtgtatcccattacatgtgcagatactatctagcctcctattggtcaaaggcagttacaggccagcccccattcaaaaggaggggaaataggtaccacctgtttttgttttgttttgtttcgttttgtttgagacggagtctcgcactgtcgcccaggctggagtgcagtggcaggatctcagctcactgcaacctctgcctcctgggttcaagcgattctcctacctcagcctcccaagtagctgggattataggcatgtgccaccacgcccggctaatttttgtatttttagtagagatgggctttcgccacgttggccaggctggtcttgaactcctgacctcaggtgatctgcccacctcggcctcccaaagtgctaggattacaggcgtgagccaccacgcccagccgataccacctcttaatgtaagagtggcaaggttgcactgcagaacagcatgccaccctgtagagactggggttcaggatgcagatccaagatattgctgtggctgctgattttgctgtgaataataaactgtctttgtttcggatccagaggctttatattttctctcagagtgttagagtgtggtgatcaactaaattttcagcttgctagtagggtaaaatcttagattataacagcttctgacctactactgtggagtaccctccttggagtgtggctgtgatttgtgcatggattcctatagctgaatggggaagggagctgagcaggtaggggattacttctctggatcattcatcaagagcaatgcttgggtgctctattgctgcacaaaaaatcaccccaaaacctagtggcttaaaaccataattcattagttttcaaaaatctgtgagtcaattgtatgattcatcagcttcatgtggtgttggctaggccaccagaatgactgaaaggcttgaaatggcctcactcacatagctggcagttagtgctggcttctggccatgctgcctggggaactcagctagggctattggctgagagctttggttctcttccatatgggcctctccctgtggctgcttgggcttcctcagagtatggcagctgacttccaagaaggagtatgcacagaaagcaaactggaagttgcaaatcccttaagggttagccttggaaattatacagcatcacctctgctacattctattggtcaaaggggttacagggccagtccacattcaaggagaaggtaaacagaatccacctcttgatgtatgagtggtaagatcaccttgcaaaagagtgtgtgggatgggggatattattgcagcagtctttggaagcacaatctatcaaatggacgtagatgggggactatacaatagtatttctccaagtgcagcaagccccgcatcagaatcatgggagcatttgctgaaaatgcagactggggctgattcttgcacactaacatttgagatctggtgagctgcagaacaaagcccaaacttcttggcctaccaccagtccagatcctcacttatcttgtctgactttatgctccagtaacactcgatttcttggcattctcttgcacataataagctatttaacctacagatagagtttggatgtttgtgccgtccaaatctcatgttgaaatgtgagccctaatgttggagttggggctgagtaaggggtgtctgggttgcaaactggattgtgaacatcctgaaggtggacccctcaggaaaggctttgtgccctccccgtggtaatgagtgaatcctcgttctatgagttcatgcaagagctggtcgtttgaaagagtctggtgcctccctcacctttcacttgctccttctctcaccatttgacatgcctgtttcctcttcgccttccaccatgattgtaagcttgctgaggcccttaccagaagcagatgccagcacaatgcttcttgtacggtctgcagaactgtgagccaaaataaacttcttttctttataaattaccaggtctctggtattcctttacagcaaagcaaaacagattaatatacctactaatccacacctttgcccataactgtgccttctgcctggaataacttgactcctttgcctcatcaaggatttactcatctttaaagattcagttttatgtcacctttttggggaagttttcctgacctcctcttctcctatggattggggtaggtgttccacatcctgtgcaattgtccccattatagcacttgccaacttgtaatgtcattgttaatttgtctgtccccttcactggattgtgaacatcttaggcagggatatgtcagattcatctctgtcctctaaatcctaagtgtacttaactgaattggaagtatgacagtgtcacagtgaattcctctttggcctaatgtttcttaaagaatatggtacttaaaatatgcttaaagttgcactgttttctttctgacaattctcagcacagctaagatgcttgcagctacttgtaacaaaatacccaactaaaagtgggtgtcttagtgtgcttaggctgccaaaacaaaataccatagactgggtggcttaaacaacagaaattttctcacaactctggaggctggaaagtccaagattaagtgtccagcagggacctagtaagggctctgttcctggcttgcagatggccaccttcttgctgtgtactcacacggccttttctcagtgtgtgcatgtgagtgcatgagatcaagctctctggtgacccttcttaaaaagcaccagttccatcagactagagcttggccctcatgacctaattgcctctcaaagaccccatctccaaataccatcacacagggaattagggcttcaacatatggacttcagggggatgaaaacattcagtccataacagtgggttaaccatttgatttaataattttagaaagccagcaacctgcagtcggtgattctccagtgtgagataggagctattattgtctggggatcttcctttccttcctcctagccctcctcactctgtcatcttcttaccccaggctcacctcctcttgtgcgtaagatggctgtcggggcttcaggcatcatatcctcaaagttcagtttgaagttattaagctggtggggcaggatgggtctgggatgggcatgagtaactccctgtctgcagatctgccttttaacagtgagcaaattgttccctttatatcttcttttccagacctgggtcgcaggcctcctgtctacacccagagcaatcacaggcaaagaggcttaatcacgagccacacacccactcccaacttaatcaggggtgaggtgagaggggatgagctgttggatattcgaacccaaacaaaatgagcaaggaaataaatctagcccagaaagcaaatgtcctaaatgcctcaccaagatattggcttgatgttcatagcagtgattttttaatcaacagaagttaaatgttactcttaacataaaccatgggcggaagctccgagggcggcatcagaacacttggttgccctacagatggcaagggggtgggtttgtggcggggcggcggggtgcgtatggagggggagagtggagggaagaatggggtggggaggaattgctaaaatgcacggaattgctcctgcttcaagatgtcaagaccgagggagcttgagctgttctataccttttccgggaaggacaactgaggtgggaaatcatttttgatacttgaatgtcttcaaacttctttttacaccccacgtctctgcagtcaacccggtgtgactatagagtgaagcacgctacgcataatccgtttggggattccgaaccccagtggctctgtacgcacccaggtcgctggagcaggaggtcccagatccccgctgtaaggctccgtgggcgagcgcccaggtggggctgggcgaggtgggggttcccggcgccggccccgcgcgccgccctccccgcccccgctcccgccccccgacccccgcgcgcgcggccttgtgggtaacgcggggccgccaggtgacagctaatggcggcggccgcctgaggcgggcgggcggtatagagcgggcggcaggaggcaagcagcgaaaccttcccggccgccgctcccgtcccgacggcggcttccccaaggcggcaggactcggcgcgccatggacaggccggcggcggcggcggcggcgggctgcgagggcggcgggggcccgaacccggggccggcgggcggcaggaggcctcctcgggccgcggggggcgccaccgccggctcccggcagcccagcgtggagaccctggacaggtaagcggggcccgggctgccccggcctcccgcgccccgactcccgagggccccgcgcgaggccmgcccgccccctccccgcgcgctgcgcagggcctggcggtggcggggtgggcggcccctcttcatcccctctgggccctcctcccccccacccccggaaacctcagcgccccatccggggactgctgccctcggacctgctgcgggccgcgcacctggctcacttccgccccgagagccccagctcctggaaccccgggaggggcttcgcagctgtcaaaccacttccggcgccgccacctgctgcccttggcgatcgcttggctgtccctgcccaggccaccaatcctcttgggagggagatcccacccgggctctcctcttctagcatcaccttgcctcgtgtggttttaagaccccaattctgctgtggctgcttagggtctttgatggggggttgggagtgaggacggggagatgggaccccgcgggcgtgggagctggtgcagatcgaggcaaaaatctgagatggaaaacgtccaaactgctcaggaggcaagaaaacagaaccatttactttcagttcttcacactttgagggaaccagtttattgttttcatgaacacacaagcaagcctactgcttctgaggcagctgcagaactaagagaaatcagttagaaacataaagtgaccgtgtcgaactgggaggggccaccgcctcctccgacgacaagagatggcctatcgtgtaacccggaacatccagttttcccacaacttggccatttccctgacaccagagtgcactcaggcagcatgcactgttggaatgtagctcagtcagttttacatgcccattcctgcctgtcttggtcatcccattgtgccaaacttttgggagtttccaaaagcacagaaacaagaaacattcccttcacttttgtttctacctcagtgtaattacaatatattttaataaattaatcacccaagtggttagtgtcactgaaaaccagtcacagctaagacagcacttgaaatggtgaggacttcactcatctgcaaatattcaaccacacacgaggtctgggcgattcagagaatagcacaacacggcttttgctgccttaccattttgctagacttaccatctagtggagaatacaaaccaaccaacagtggaaatcgaatgtgataaatgagataggtggtagaggcgaacacagaagtactcaggatgggcatgcatcagaatcatttaagaagccaaaggagaccagaatgtgtcacccccaaatatgcctcatcttctggtttccttcagagattttgatgatcagggaaagcctgagaaagctgacatttgagtaatgcccccaaagaggcgagggatccagccatacagatacctgggggtgatagtattctagtcagaggcctgtgcaaagcccctgaggtgaatgtgagccaagtgttcctagatcagcgaggagactaggtgtcactagcagggagggagctagggagagacaagtaagggatgacgttagagaagtcacagagccagatggtggagagcctcagaggccatggggagccactggggactttgtgcagaggagtgacatcatctgttgtagatttcagtaggctctccatggtgctatgtggacaatagagtgaaaggggaaggagctgaagcagagactgtcagtaggaggctattgtagtaagccaagtgagatggtggtccagagtggagcggaggaggggagaagtggtcagatactacatgtaatttgaagacctgcagggtagagccaatggggtttgctgaagattggttggttggtatgagagaagaatctgggagaattccaaaattttagcttgtgggaaaattgtgttgctgagatggagaagtctttctaaggtggagcagggttagaaaatagcaggctcttcgctctggacatatcaattttgagatgccaattatatgtcccagaatagatgtcaaagatatagttgatctatctgagcctggagttcagggttgtctgggctggagattcaaactggggagtcatgggcttatagatgaggcttaaattcatgaggcaggtggagttcacagaagaatgatggaggtctggaaaagggaattgggctaggaatagggctgggtggattttcaagatgcttaccaggtaagagtgacccgacatggtgagcattcagatgtgaggggggagtgccgggtggactccaaggcaaacctcagctttctagcgtgtgggggccggataactggctgtgctgcgccctgagttaggaaacacaggagcagagtaggttgcggggctgagcggctgatgctggtttagacaggttgaattggcagggtctctgggccagactagtggacaggtcttgtaggaacatcagcattgagatcaggagagtccaggttggagaaacagagctgggagcctccagcctgtaagtagttattgacaccaggagtatagagggcaattgcacagactacagagaagggatgggggaggaatcatggcctcctttctcagttctgtcagctcaacaagctcagattcacacttttctttgaagagtgacctctagaatggaacctggctctatgggtgggacttggccatgtccctgggactatggggccttcacttctcttctgaatactgtaattaataatgaggaagctgtggtcctgtaagaggatgtgtcttgccaaagatcatggagttagctggtgacagaagcaggactcatgtccaggcctcctgtctgctaacccactgtgcttcactgtgtgtaactacattggccaggatgcttctggttgcaggtgacagaaaccacagttcaatctagcttaaggcaaatgagatgccctggctcacagaactgctccagacaggaggagagatggccacaggcacagttgaggtcaggattgcaaacagtgttgtcgggwctccccatctctctctccctctctcttttattttccctcactttttaatcgctgtgagttccttaagatggtaggggtggggtggggtggggagtggcctccagcagctctggatacagatccatgtatttcaggatccaaggggaaaagtctgggattggctggtcctaggtaactcacctacaagtgggagcaggtggaggaaggggtcamccttcttctccgctttcccccacagaagcctgtgttgtggggaagggcagttcccaaagtaaagaggaaggtctttatcagaagaagggggaaggcatgccgggcaggcaggtggtaatagcaggtcacactcatgctcagcagttgggtttctgcagtttcttcctgtatttgcaactggtgggtgctgacagaaaaaggcattatgacaagaaaagtatgatatacgtgggaatgaaagtgacttaacctttaaaaaggaaacaaatytctcccttttctctccttctccccctcaggtcgaaattgtggtatatagattcctggcatgtgataggaatttctgctcattcagtattttcaaccatacagataacctctggtctgttttgatcagagactgcaatttggatcactagcacagaacttcagttttctttcttttactatttgggtcattttccatattgcctggggattccaggtgtttctgtccttcagatatgtgagtgtgggtttaattagtgatatgattttttttttaaaggcctgaaacattctttacagtgaaagctacctgcaaggtaaacttttgtcggtgtttttagccctctagcttgatttcttagtgttttgccaaattgtgagaggaacccggcctctgggggcaattgttaaatctcttactgcgctagttggcttatgtggtctttcaggtcaggtgagtacagcctgaccacttgccagtcgtgtgaccttgggcaaaactggaccttaattttttcatctgtaaaatgggtcactgtgaggctgggcaaggctacgtgtgtgaaaatgctttgatgcctcagagctctgtgggagtgaaagatgacattttctttgcattgctgtgttttcatgtaaagcggttggctcgcatctgtgctgctggcttcagtgcagtgagtcagtcgctattggttgttccatgtcctgttgaggacagccactttctcacagggcatgtcacctctgtgcctcgattttctctcctcaaagacaagtcggctagtccctgttctgccttctcatcacaccatggttgtgaggctctgatataataaaaaccatttgtgcttgtaatcccagcactttgggaggccaaggcgggtggatcacctgaggtcaggagttcaagaccagcctggccaacatggtgaaaacccgtctctactaaaaatacaaaaattagccaggcatggtggcatgcgcctaaataatcctagctactagggaggctgaggcaggagaattgcttgaacccagaagggcaaagtttgcagtgagccgagatcgcgccactgcactccagcctgggtgacagagcaagactctgtctcaaaaaaaaaaataaataaaaaataaaaaccatttgtaagttgtcaaagcacttatagaagtgtaaggtattgttagtactacacagagaacatcatttttctaggctgtaatttataaatctcatgttcagctttacttttctgagtcactttgcttcactcaaaagtacactattttctagatttaaaactaccaacatgaaattgattgaatgtttgaaaagcctatgctgtaagataaatatttcacatatttctcccggctgggtgtggtggctcatgcctgtaatcctagcactttgggaggctaaggcgggtgggtcactcgagcccaggaattcgagactagcctgggaaacatggcaaaaccctgtctacacgcgcgcrcacacacacacacacacacacacacacacacacacacaaaagccgggcctggtggcatgtgcctgtagtcccagctacataggaggctgaggtgggaggatcacttgaacctgggaggttgcagtgagctgagattgcaccactgcactccagcctgggtgacagagtgagaccccatctcacaaaaaaaaaaagaagtatttcttccatataattttaatagagtaaaattccattaaatggtagagaatagtaagcttaactaacacctagaatcttcaactttgtttgagaaaattgggtgattcatttaaaattaacctggaatctaatcttatttcctagttgtcagtcgctatttcagttcttacataaaatgtgaaggtaaccaaagagtctagttagttcatctaaaaaaagaagtgttatcatattcctattcagtgctaattttttcactgagatcctatgatataacgttttgtaatccatgctattttttttagtcccacaggatcacatgttgaatggtgtaaacagcttatagctgctacaatttctagtcagatttcaggttcagtgacatcagaaaatgtgtccagagattacaaggtaagcaacattgagtgtttaattcattttcagtatgctaagtagccaagaarctttgcagttttaattcaagtgagctgttggccttttgatgcaacatggccatttgctcgagaataaggatgaaaggttctctgttgttagatctgaaatgtagaagagaaattttaccagtatccagtacatgtagtcatagttttgtaattgaaaggagaagctgtctttagatgacaatgattcttttaaaaatcaagttccattttataataataaatgcatatagcttctttgttagtattgtgagtttcaggaaatatcttgatgtacaatacttccctaacttcacaattttttaatttatgtattatctgtgagtattcagcattaacatgtgatactagaatgtataaaaacccttccagaatctcaaaagagtattgtatgggcagcctcatttttcagtccttactgaagtgaaaatctctttttgttcattttaaaagttagattccctgcttattctaaatttaagtgataagctccttgtcagcagagactagggcagttttaccactggcttcccaggcacaatcctggagcataacagttgctcaataaatattgaatcaattaacaaatcaaaaaaatcgcttgttccatctttgttaaggctaaagactaactttgttttaatgtcaataaactattaataggtatattaaatgaaatcacatttatatttcagtactgatgtttgcctaagttgaggtttctgtttattagtggtcatttttcctgctagtaagagatgattgatttttcacaagtgtgtgtaaaatgcatttggtatcccagactaccattagttaatagtctctcaatatcatggtccttgccagacatcaaatcttacaaatatcaagaattacagtaaagatcctaattaattcttaataggtactccttgtttaggagctttatcttcagttcctctttagagctcatagggtaataacaagtgcagaaacaggctcaggaggccaattaattgagatttggctatggtgctgtctcttgcctcatccaaactggcagatgctgttgattatgcctaccaaaggaaggcatagctgtggattagcagaaattggataatctgcccagctagaagagtgacagtgtatttcttaatcatttttcctgctatgtggtgttcatgtttgcccataaaagagcagctggggctcctggaccttaaaacctggtcgggcaaacacactgtctccaggtgggagaagcatttgctgcatcactgatgcgtgaatggctggtcactgagcagctgcggatcgcatcagttccagttgccctattgcctgcaccttagctgagaaactgcccgctgagtagagagacttaagaacccattttagcagagaatagctctcacacttcggggtgattttctttatggacaattatgagttaactgtaatgttttcattaaggttgaatagttgttagtgttgtgtgtgtcctataaaagattgaatgtcgactgtgtgcatagctttctaacattgcatgaatagatcagactgaatctgtactttaacatgaagcaactaagttttttcaatctcagtctatttacaaattttgtgtagctgaattagctcatgttggaatggttgaacagatggtattcagaaaaaataaggcttkctttcttttggaaattaaattttaagttcctacatcagatcatagctaaagtctttgatgaattattgtaagggggcatgttttataattgtctttgttatatttgccctgcagccaaatctgaaaagttggtgttaaatttataactcaggggttgttacactttcttcaaggagagtttttttttttacataataaatacataaaatatttctaaaccacaaggataattgtacatgttccctataaagtagttcttaaaatcagggtaaccaaaatgggcctttgggacccctctggcatgggagctattgcatggggttgaccctgaagagccagataaagttccttgaggatttaagttgcagtcatcagctgatatttgaaattatctgttgtgtaaatgtcttatttgaaatacacacttaatttgggggctaatttattatagattaaactcaacatcagtaattaaatgggagcagatgtttatgtggagcagaatgcttggcatcttatttgaaatgctgattgtcttctgagttgtaacaggctgtcgagaatggttctatgtcatcatcatcatcatcatcatcaaccctctaacacatacaggctctggggttttgtaatgctttttgacatgtcatccatttaagccttaaaacaacctagtgaatctgggtgtggtggtctgtagtctcagctacttggaaggctaagatgggaggatcacttgagtccaggagttcaaggctgcagtgtgctgtggtcacacttgtgaaaagccaatgcactctagcctagacaacatagagagatcttgcttctttaaaaaagtccattgaggtagctattactacaatcatcatttaatggatgaggaaaccgaggcctagagagatgaaatgacttgcttagggtcatacagttagacttgggatttgaactcaagtcatcctattgaaaagctagagtgattttaagattttgtcccacccccattcccatccactgcttttcgatctttttttttcttctttttcttcttcttctttctttcttttttttttttttatagagatggggtcttactacgtttcccaggctggtcttgaactcctgggctcgagygatcctcccatctcggcctcccaaaatgctgggattagaggtgtgagccaccatacccagcctcatccactgtttttcaaaatgtgacccttgggtcttcccaagacagcattctctggagcacctgtaaaaatgcagcttcccgggctccatcccagatttactgaatcagagtgtctgagggagggaaacaagtgtctcatatatttcttatgcatgataaaatctgaaaacctaggcttcctgagtttctgtctgttgaaattggtgatgggaccctgcatttctggtatattactaagaatctgaataattagcaactcagatattggagaataattattttattatttactcatatcataaattgtcagtcagcccagggtcagctcatctaaagtacagtaagaatatcgctggtatcacgtgacatgagtttagatggtatgtccatggacgtattttagtagctatgtaattattttcttgtgtattagaaaaatcagcacatcaggcttgtgatttagtagatgttatggcttagagcaggcaaagtattaaaaaggaatggattttaaatcaatataaagataaatacaaaattagtatgggcagttggcagatacagcaagccaaacttgttgaggtggtatgtgaaatggcaagtttggcaagcattgtcccagctgaaagagtagatagctattatactgaattgtgtggcagctaaattaataaatgcctgatttaataccgagtcatcctgaagattggcctgttaattaagactattacacaaaatgtaataaaatatttgttttgcttgtcccccctccactaccaactcaattgctttcatttttactaggctaacaaatggtaaaaaatttctcttgaatttgccagaaattttaagaacaaaatttgaatgtaatcttctgtagattagatgaaataatacagttacaaatggaaacatttttaggaactattagtagaagtgacatcattgatcacagcttccattgtttggaaagtaggactaggttatgaaaagagaacatgatggagtagtacaaacaatattggttagcttgtgaccttgtatagtctctgaggctcagtttccttttctggaaggataaaggggcttggattagattattcacctctaaatgcctttcttgctagaacattattcaattgtgttcaaaagaatttgatctgggccagctttatgaaaattaggacactatagttttaatgtgatcatcttccttcctcttgcttcatcattatcatcagctcttctctgttctccttccctcacccacacacacacagtagctrtatctcttctctaaacattctgaagaaaaatgagaaaatggagatggccttatactaagtttaatcattggatgggatagtacagtaattacatttggagggaagtcgaaggcagagtataggaaagacttcattatgcttgagctgggtcttggttaacatttcttaaattgggccctagtctatgaaaagggaagctttagcatgaaccttcaaaatctacttctgtaatctatagcctggccttgtgacttataaatcagagcttgcaaactcagatgccttcatggaacagttcacaaatctaggcagacatggaagagtgctgtagagaactggagagtacagaatgcccacctaacagcaattaaatttttttaaaaaccataggcctccagttttgtaaccactgtaatagatagaagagtgctatcctatcatggtttttgtgggaaataattatttcttaaaaatgttaagatttagacttctgtttctggaaaaaatggagcaaatgtattttctcttattcttygtactaagtacaactaaaaaccttggacattatctgcaaaataaacataagaatactctgaaaggtagaaaaggcagactagctagggacctcaagacccaaggaatgacatggttgtgagtttcctgggtttgtttttgccacgtatgtcccagactcattgctgaagaaaccagtgagtcagaaatgccaacaggcgcagataagaaaagcctactctgtctagccagaggaccaggaaaggggcacctagcaaaaagaaaacacactaactactctactccagccaaacaccacagaaaaaaattatgaccccacacccaccccaccaacaaagccagttgggagagcctggtttccacccttgccaggctataatgaggcataccaactccctgcagtggtggtggtgtcaggggagactgagtgaagagtcatgactttcactgtcatctattggtaggcaggttgccccttctactgtggtgtcagtagaggccgtatcaagggcaacaatgaggcacccctttttctctcagccagggaggtttctgtggaagcctagctgggagctagaactctcacccttgctcagcagtaacgaggagccctccactctgcagtgtcagtggaggctgagtacggaacctggactcctacccctacctagaagtaatgaagtagtgctcctcttctgttggagcagtgtcagagaaagccagcttaaacaaagggtttgaataagatccagggtcttaaaacataatgccccaaatgtgcagattttaatgaaaaatcacttgttatactaagaatgaggaagatctcaaactgaatgaaaaaagagaatcaaatcaacagatgtcaaaactgagatgatagagatgttagattttaaagaagtcctcataaaattgcttcaataagcaattgcaggtatgcttgaaacaaacaatgaaaaaaaaaatagagaagtttccacaaagaaatgtaagagacaaagaagaaccagatggaaattttaaaactagaaaatacaataaatgaaataaactcaaaggataggttcaacaccataatagagaggacagacaaaaagaatctgtgaacttgaaaattgaacaataggaatgacccaatttgaataacagagataaatgaacagagcctcagggaattgtgggagtataacaaaagatctaacactgatgtcgtcaaagtcccaaaggagagagaggggatggggctgaaaaagcacctgaagaagtaatggctggaagctccccaaatttggcaaaacacataagcctacagattcaagaagctgagtgaatcccaaatgagagaaatcccttcaaattcacacaaagacacattatagtcaaatttctgaaaactgaaaacaaagaaaaaaatattgaaagtaggaagagaaataacactttacctataaggaaaattaattctaatgacagtggatttctcatcagaaaccatgaaggtcagaaggaagtggcacaacattttccaagtgctgaaagaaaaaaatcaaccatgtaaaaatatgctacaggaatgaagaggaaatcaagacattttcagatgaaggaaaactggaagagaagttgtcactagcatacctatcctaaaagaatggctaaagaaagttctctgaacagaaaggaagcaataaaaggaggaatcctgagaccccaggaaggaagaaagaacacagtaagcaaaaaaacctcctaaatctaataagtgagtttagtgaggtcacaggatacaagacaatatagatataagattaatatacaaaagtgagttgcatttctatgtactagcaacacgtggggaccaaaattaaaaacacagtgccattgacattagtattgtaacaatgaaatacttaggtattgtcttagtccgtttgctgctgctgtgacagaatgccacagactgggtaatttataaagraaataaattttttactttcagttctagaggctgggaagtccaagtttgaggggtgagcatctggtcagggccttcctgctgcatcatgacatggcaggagacatcacatggcaagatagagcaaacctgctagctcagatccgtcttcctataaagtcaccagtcccatcatggaagccctaccctgatgaccatatctaatcccaattacgttccaaaggccttaccttcaggcaacatgaatctggggattcagtttccaatacatgaaatttaggggacatgttcaaacccctacagtggctgtaccattttacattccctccaacagtacacagaggttctgatttcttgatgttcttgccaacagttgttatttgtgatgtttgtggtttttgttgttgctgttgagacgtaggagttttttaatatgttctgggtattaataccttgccagagatgtgatttgcaaatattttcttatgaaattttggggatgtattccaaccatagcaagtataaatctaataagacatgaacaggactcataagctgaaaactatcaaatattgattaaagaaatcaaagaagatctaaattaatggagacacacagtgttgttcatgtatttggatgattcaatatagggaagatgtcacttctcccctaattgatatacacatttagcacaattcctatcaaaatcccagaaagattttttgtagatacagatttaaaacttatatggaaaggcaaaggaactgaagtagctgaaacaattttgaagaataaagtgggaagaatcagtctaaatgacttcaagacatgctgcatagctacagtaatcaagactatggcagaggtacagacacatagatcagtggaacagagcagagaacctagaagtcatcccacagaaatatgctcagccgattttttttttccaccaagacatgaaaacaatttaatggttgaaagataggcttttcaayaaatactgctggagtaattggacatctatagacaaaaaaacaaaacaaaacaaaacaaaaccttgatctaagtctcacatcttatacaaaaattaactcaaaatgaatcacaaacttaaaaatataaaacttttacagaaaaaagaaaatcttaaggatctggggctaggtaaatcattcttcttaaactttacaccaaaagcacaatccataaaaggaaaaaattgatcaaaatttaaaatcttttgctctgtgaaagactctgagaagatgaaaagacaagctacaaagtggaagaaaatatttgcacacctcatatctgacagatgactagtatttagaatatataaggaatatttgaaactcgacagtaaaaacatcaaaccatccaattagaaaatgagcaaaaaacatgaggcatctcaacaaagaagatatacacatggcaggtaagcacgtgaaaagacgttcaacatcatttctcaataggggaatataaattaaagtcacagtgagatatcgctatatcctattggaatggttagaaatttttaaaaagtgacaacaccaaatgtggagaaccagattattcactgattgctgatgggaatataaaatggtacagccactctggaaacacagtctggcagtttcttaaaaatgaaatgtgcacctgccatatgaccaaacaattgtactcctgggcatttgtccaagagaaattaaatcttatgtttgcataaaaacctgtacctgaatgtttttaacagttttattcataatcaccgaaaactggaacccacccagatgttcttcatcaggtatattgttaaacaaattgtagtatatccatgctatggactatattactcaacaataaaaagaaataatgatacacacaggcaacttggatgaatcttaaaggaattacgtgagtaaaaaaatggcagtaccaaaaggttacatactgtatgacttcatttatatgacattcttcaaatggcaaaatgatagaaataaagacagatgagtggttgccaggggccaagaagagaggaaagcagggagggagtaagatgtggctataaaaggtcaacagtagagttcattgtagtgatgaaatttttctgcatcttgattgtaatcaatgccaatatcctggttctgatattgtactatagttttgtaatatgctacgactgagggaattgggtgactggtacatggaatctgtattatttctcacaactgcatgtggttctacaatgatcccaaaatttaaagtttaattttaaataagtcaagatttttagactgctgaatgattctatattacatgtaaaaatttgtatcattgtatttataacaactgaaaaatatagttatactaaaaaagatgttagaagttaactattgtgtttcttatgttagatttatgtaacaactgaaatatatagttatatttcagttatatatatataactatttaacaactgaaaaatatactaaaaaagatgttagaagttaactattatgtttcttataataaatttagttaacgacaagatgatgcagtatgcttgctttcttaaatagattaagatcactatcaactttttttgcaccttctcataggttcttgacatgtttaggagttgagggaggggatgtggggcatgtgaaaatagttgtggcacaagttggggcagctgagactcatcaactgaaaaaggttacttatccaccccaggtacaattatcttaactgatttaaccctgccaacaatctgcaagggaggtgctctcgacatctcccatttagagaagaggagactaagattccaaggtgggtgtgtggttcgcctgaggtcctgtggccagtaagtaggtgctggagctgggatttcactctggagtgtgttcttttaaccactatgccgacttacctccctcagcctcagtttggcagatgttttcttaagtcttctaatgaggcctagataccccgaatccttcggagttgggaactggtagggtcctggcagtcatcccatagactcccctcattttatgtgtcgaaactgaggcccagaatgcaggcattaggaagctctgtatcatcagcaagagctggcttccaggcctcctggcttacaacctattctcctacggcttccatcagaatcacatttaagaagaaaatgaagctctgtgcatgtgtctgaaatggcttatttcaggagagggacatggtgaaccagagaaaacacaataggtatcaacttagagacttttgggtaagcctccattgaccttctcccctccacccccataccaggaacactgaggatttcatggcagtaagtaaagaattatgtgagtttaaaagcagattatcatctcacccctttgcaccctttttcaagttagtttctcgttttagtggcaaaggcctattgacaaggagttataactcccatatatgaggtttgtgttaggctgttctcacgttgctataaagaaatacctgagactgggtaatttgtcaagaaaagaggtttactgggctcacagttctgcaggtttaacaggaagcatggtgctgggatctgtgtggcttctggggaggcctcaggaagctaacagtcatggtggaaagcaaaggagatgctgacgtctcacatggccagagtgggagcaaggcagcgggaggtgccataccctcttaaataaccagatctcaaaagaattaattcactagctcaaagacagcgcccagccatgaragatccacccccatgacgcaaacacctcctaccaagccccacctccaacactggggattagaatccaacatgagatttagaggggacaacgtccaaactatatcagggttcaattgcacaatttggttctgcagtggacaatattttcataaagattttgttgtgaatgtttttagttttcagtttttactatcaatttatagacaaagcatccaaacattaattgtagttacagaatggaggttgggaggtagagaggtggaggaagggttagtggtattgatttcttcaaaaaacctgaagggagttaagagatatttaacatttgaggggtcaaaataggtttagggctgtagttcaaatggtttaatgatagaggcgccatgctgaggcagtatagcagagttgttatgggcacaaatccagagccggacttccagggtttaactgcttgctctgccaccttgaactcagccagattacttaaactgtgccttggttttctcatcaaaacatggggccagttataggtgtttttttctgtttttgttgttttgttttgttttgttctgtttttttgagacagagtctggctctcacccaggctggagtgcagtgtgtgatctcggctcactgcaacctctgcctcccaagttcaagtgattttcctgcctcagcctcccaagtaggtgggattacaggctcctgccaccaagcccggctaatgttttgtatttttagtagagacgggtttcaccrtgttggtcaggctggtttcgaaatcctgacctcaagtgatccacttgcctcggcctcccaaagtgctgggattacaggcgtgagccactgcgcccggccataatagtttttatcttataaggttgttctgagaataaaatgagttaatacagtgcttagaagagtatctgaaacataaaaatcatgagtgttttttatgatgcagcagctgctgaaggaaaacaaaagaactcaaaattagcatttcaatcagcagagattgggaagagggagatagtagtttgagagttaattttctcatcttttaaaatgggaggttaatagacactttaaagttgacaaatcaagaaatggaagcataactatcacaatggaagcaattctcagaattaaaaatagatctagttaagtgtggttattactggggaatgaagctctgggagacttactgttttgagttattaccataaacatatactacttttatttattatcaaatttcttgatgtgtagttaacaaatgataaacctcaaatatttaaaatgtgcaatttgataagctttgacagaaatacacacatttaaagccatcaccacagttgaggtaaacatatccatcctcccaaaaaaagacacatttaagcttctcagtctgaatagtctgtgtttagtaacttatgtatagactttgtcttttagctatatcatcacttaattcagataccttttaatgacttcaaagattattttaatgataatacagtgatttttttgaatctgtatcatgcgatcttatgcattctgagtgaaaccataaaactagtaagaacctccagtgattcttttctgattatttgttttcataggacattcagtggtcagaagataggatttcagactttgaaatggggaacagagatggttaaaatcttcccaggctattacaactatttgctttttaaaaattctggccattccctctgaccagggctttctgagtgtgtatgctgcatgttcaattaggattcacaggcctcaggcacaacaagaatattgttgctaaaatcagtgtscctgctgaataaagctgggctttccctcctctccgggaacagccacttacctcttcccgcgtggagcccccctttggccatgcagctggtgctggggcggggagcgggcaccctcctctcagtagtggccacattggagtccccagtatgaattggaaatgtaatttcaatagaaagcaggttaagctttgcaggtaactcagctttatgataccatcaatgcaatatagctgagctgtgcttgctctgggtccaaggtggggatttctgtggttttttggttttgttttcctgggctggtttgggcatataactgccttttttttttttatcattggtttttggggaaaatgcattcagtattccaaatggaaactaatgaactttttgaacacagcctgttcacaataacttgtaatagcacttgacagaaggggtttgcgtttaaggtaatgtagttagtcttagcctaagggcaacatgtttctccaaatcatagacttccctgaaaattataggacaaatgtgttaggattgatctgatattgaatgaaacttagagggcaaatgtgttatgattgatcttgttggttttacttagaggattatgatgtttcttagggaataggctgttgaacttaatggcatctttcacaggtcaatagtaacatgtccatgatgatgatattctgtattttaactaacaggttttcaggaggcctgatctaagggtaaggatatttggctttcagcggatgggcctcctacttgtgtgtgtctgtgctttatcgaacacttagtctatttagtgttctttaccttctcactggtttttatgaatcactcagatcaatttgctctgctgtgttatagctttcagtgttcactagaaacgctttatttgttacaatgttttcatgtgcaataaaagccaatgtgtgtgagggcgggatgctaaaattgttaccagtgtgcaatactgacttttgttgtactacatgaattatgaccaaatggatattcatgactggggttataaggctggggctactgaggtctcttttaatcttgtttattgtgtaattcatgctacagaatttagcaactaaaaaaaaaaaggttagttggctgtcctatctaagtaagatttcaagtcatgtttgtgtttgcatgttgaatccaaaaaagcagaagtgctaatcttgaagctaaatttagcaaaatcaatcccagttactattttttaaaatacagatatagtgggttacagcttatattttcctcatgattttccttccctttatttcagaacattcataaagcaagacaaagattggtaatgtgcatgcatttaacagacattgaaaattaacctatttctattcaaggaaaacaatgtggattttgatagtataataacttcagtttaaaagttttaatcttattgaagccaatgaagtagtacaaaaataagcaagctaagtcttgttattctagctggttttcctttgtttagtcttgttttcatcatgttttcttttgcttgtgggaatcattttctttcattgattcacactgttaaatattagtgcttggctttacacttgcatgaactttgaaatgttgtattttttgttcattgagttttctgtttctaaaaacttaattactcgattttctttatatttaaaaaatggaaatttcaaaaaactggctgcactgaaaaattacactgccttgaagtaygctaaactataccaactgtgtactaaattcaatctgatgataaaatataaaagtacattaaggagttattgtactttattgacaaaaatggaaggtgggaaatagtamattcttttaaagctttactagttcttcactggttgcctttgtaaaaacgataatcattgcaaccaaagtttcatgaagcaaaaatatatataggctaaattttaatatttttagcctcggagacttgatagaattttaaaaagagattacaatcttgtcatcttcagtattcatattcttttttaccagctgctgaataaaaagcccaatttttaaagtttcaaaaaataatagattctataaagaaattaagaacagtatacctttaaagggattggaaaaaattaaagatgtgtggccttttagctgtttcttggaagtgcgttgatagagtaattagaaatatttaatatgatattgagttataaatcacagaatttaattagcaataagcaataagaaacagacatgtatatatatgtgtgtatacacacacacacacacacacacacatacacatatatatataatctccagcatgtgatatatgcatgtgtgcagtggaattgatccctgagcaatgtaatatgaatacttactgtgtttaaaatacatgtctataaactgcctttgtattttggcttgactttgccctttaccagttttctgtggtatgctttattttctgtgagcacattatgtgcctgttattttgtttctttgctatatgctgtctattgcttggttttgaaaagacagtacattctttgaaatccatgatgtttgtttgcttttcatttttctaccccaacacaaacacagaatagatactccattttaggctgtggatgctatagatggcctacatgttatttccttaactccaagggggaaaatgttgtgatttgcaaagtcatgaaaggtgtgtcgacttttacatgcttactgtctccttaaaaaagaaattctgtcctttcacctgtctgtttgcacgtgtttctctttctcctctttgccttttcttgtccatgcacctggtgctgtgcaggagattcaggaagaacacaatggctacccttctgaagctgaagctgatcaggtggcaagttctacgtgttcatctgtttgtagctacagatygtgtatttagaagccatttcattctagacttctagataataagcaaagctttccagatgcctctaccacaatagtagtgccctcctgtccaaatttggtagattccatatgacattatttgcaaaaattggtttatccaacattttgtcaactagaaatttgtttgtctgtgtttcttggtttgcccagatagggttattgatggggttaatgaccctccatcacggtaggattctgcagtgcctttacatagacatagaggggacagatacatatgctaagggtgctccttgagggtgcacactttgctttcttcaaatatgcatgatctatgcccaacacagtacctggtaccatgtagatatttgtggaattggtacatatattaatcagaatacaaaattattcatagagtattcttgagtgcttactctgctcagtacctctagaccctctctggagtcttttaaagctgcagtactttccccaatgcttatgtgaaacaaagagaagagcagctccagggatgtgtggcatgccccaggtgctcagctgcaccattgtccaccatcatccagccccactctcctttggtgaccctggaagcaacttgaagagcccagtttgaaagccactgcttttggcatgcaaccattatataaactatccacctggcggcttggattcaggctgaggagaaaagtagcggagaggccagggttgttgggtgggctggagccctcaggaacaaattcagggagctggcagacttcggctagaccttcagggtcactggaacaaagttgggatgaggtcatcagagggaattccccagctgggcaacactttgagccatggcaccaagaggaatgggtgtgtttatgaaatcaaatttagttcataagaatattccatcctttgattgtgctgaacatgggttggataaatcaagggtcaaatcatgtcctgtgcaaccttgtagttgcagtaaaagcttaatgtagcacaagtgtgagtcccttctcctaacagcagcttcataaagggaatctactatactcaccaaagcaaacaaaaaaacctccaagcttttaaaactcttctcttgagtttctatgctaaagctaaatgtgtttcttttacaaaaggaatctcctacggggaaatctgaagcaattgggtcacttctttgttttattccagtagttgttcttttttgccatttaaaaggcatgtcccagatttatcaattagaggtttgccttactatgtctcactgacatataaatgcacagaagtttcaagccaaacttgacatgactatgggaagagaagagaaatgcytgattttcaacttctatcttgagagcattgtgtattcttaaaatggtcctaatcacctctgtctcctatatgcaacattttattagctagtcctggattgaggactttaaaatgtttgatgtggcttgctctaaatagagagagtcatacctttcctaagctcctccagattcagttgattaaagcagcttgctttagtaattatatttcaaaataatctattttcacttatttttaacatataagaaacttaagtctgtataatacatgataatatttagccattaaaataggctttaacaacgtaacatttgaagtaatttaaaactctgatattgattaaaatagctttctcacttcrtgagatgctatacagttagtcactagttcaggcrataaagcagartttcaaattaaggcttctaagattggagatcttttagtgtttctaaaaccagacatttataagtatacctgttagtttatgctttattgcataaaatatatttccaaaacagatgtgagtataaaaatgaatccattaatcgttctccacacctacccttaatgtgtttacttccaaaaaattttggcagaaaatgtctttaaaaaccagtctgggctaaaaatttgaattgaattaactgtttggaggtaacgatgattcctaatctatattattttaaccatgcatctttggataaggaggaggatggaccatgtcattttgtggtctcccagtagaactaacatagccctgaccaacatttaacattgaatttgttatttatagtttggctttcttccctgtataaaatgtgatgaaactactatgtgtagtatttctaaattgacctttaggtcctttaataaaacatagtgaaatattcttgtaactatgaaaataattactattttgaattttcaataatttagaattataaaagacatccatttaaaaatattttgctttacaaaattatgctgaaagcgtagtattattcgacctattttccactgaacactagtggcctccgatgttaacaggtggaaaaagcagtcccgatcaaataggtatgaggaatgcattatactgtggcgccctcttgcggattcggtgtgcattgacacactaaagatgtctcactaaaaaaagcaratgaggccgggcgcggtggctcacgcctgtaatcccagcactttgggaggctgaggtgggcggatcacsaggtcaagagatggagaccatcctggccaacaatgtgaaacccctgtctctactaaaagtacaaaaattagccgggcgtggtggtgtgcgcctgtagtcccagctactcgggaggctgaggcaggagaattgcttgaacccgggaggcagaggttgcagagagctgagattgtgccactgcactctagcctggcgacagagcgagactccatctcaaaaaaaaaaaaaaaaaaaaaaaaggagaagaaaaaaagcagctgaacttgttttgcttaacccagcatttcccaaacttttatttatttatttattttttaagacctattcacatctcttgggaaagtaatgctctatgaaatacagctttggaattgctgggggttctgatcaccttattcttattcatgacacattatgtcagagatgccaaggagaaagtgactggtttccttggcagcgtctcacagggtggcggtaccttggaatagaccccgagttcaggctttggtccctagctttgtagttcaagaacaccattttctcacctcccctcaattatctggcactatccaaccaagctcacaagggagtggctactgggctgcagtgccaatctgctaatttaaaaacgtgggcgtgtatttttctggccatctaaggtatccttttcctagcatcattgtagccaggaaacctagtaaatcattagcaatttgcttggtgagtatgaaattactgcaaagtaaattgtcttgagacatgcctgacgaaaacaccctgctccgcagcagggattggaatactgttgcctgccagatgagagcacactctctcatggcctggattgggtgaacactgacaacttcactcttcatgtccctggtcatacgctttgtgcatgcatgtccgtgtgcacgagcacacacagacacacacacacacacatagctgggctgcagtagcaaagcctaggcctttccttagttgtgtactgtaccgagactgttctccggttattttcattagacttctggccttcccaaactttctcttaggctgggtcatttctccagttagctaagcacctatagctcatgttggtttcatttgtattagtttcatgctcagaaggtaacctttttctggccttatttgcaaattctagagacaccttttaatagctatctgtgtagtgattacagtatctttctgtcatgtcaagccatttctgtattaatgcttcctaactgtgaaatttaaatatgttgtaacaatttgctagaatatgcagcatggtgtcttgtgatgctaagcttttaagttgtctttgaaggggttgggtgcttattttgcacgcttctgtagccttatagtgacatcacagaacaccgaaattcttcacaggtatacggaaagtgagatttactcccgtttggtgtcyttttttttttttttttttttttttttttttgccaggctctaagggatggaaataagctggcacagatggaagaggctccacttttcccaggagaatcaattaaagccattggtaagtttagtgtgtacacttcgctttttgagatccataaaatgaaatggcacttaatttgcaagtggaggtgatgtatgtgctggagatccgccagaccaacttaattaggggacaaatggactagatctattcatcctcattagtgtcatcatgayctaagagatagaagactgcagaggatcccgttaagttccaattgagtatttgatggcgttcccaacagaagaggggcctgacttttcctggtgaactgaaagctgattagacactcagtgtaatgtcagttcactgctttgttggaatccttcagtataaggaaaatataggagacctatatcatgttttaataacagttttgagaactcagcaaagaaattttagtggtttatcagatcccaaaaagtacaattttggtgcatggcaagggcttgtgttgccatcctggcttttaaaggtgatggcatgaggsctcccatatccctccatggtgtactgccaggcctttcagggagtagttgattgtgccatgggtggatgggaggggcagctggatgcgatccgttcatctcatcacttggttgggttggacagtctggttttctagactgtttccttcttccatcatggctttctcccaaagaggcgcactcagtctcagagtatagtcatcttgtgccaagaatatttgagtagcggggctctcccaccagatcctccaatcaattattgctgctgaatatcctagtctgtgtctgtggaccatgcttatcttgtccttggttttgaaattctttatttccttgggttctaggacttcattctatcctggcagtcctctggmctctttgttccttctctgggcgttcttctagctctgccctcatactgttttcttaatgatctgtttaaaatgcagaggtaattatgtcatgcccctgcttcttcttcagacagtaaacaacacaggcgtaaaatgtaaaatgtgaagaggttgtttttcactttagttttataatttgtcagtgagtcaaagtgagctcagaaaagattagagctcatgtaggtrattgacaactttgcacatcagatacatattttgaatgagcagggagcgttataaaagcttggattgcaagctcacagttgttgtagtaagaagagaaggcttcagtggatttagctgcggtcctggtgctctttctctcccattttcttttcctttcactctggaaacagagctcagagagagagaaactcctgcctggccccactccaatacgaattattggaaatatcttagagttagatcttaaggacatctgcaaatccttaagtgatgtaaatatgctttatgctcctctggtggcttgcaaagggtaagtaaattgaccctctactttttaataaaatatattcctggaggcaaactatttaaataggtcattgtgaagtaaaatactccgtctaaagtattacttcagtttgtcattgtcagaatgtgaagagttttgacacggtgtayacctgagaaaccatcattcacagtcaaggtaacaaacatatccatcacctcccagttttcgtttccttattcccctttataatccctacttcctctgccttctccgccatccccaagcactataggctagcttatgttttatggaaatataatcatagagtatgttctttttttgtctagcttcttcaaatcaaataattattttgatatccatattgtggcatgagttaacagtcattcttttttattgctggatagaattccattatatggctacatgacagtttgcttatccattcatctgttggtggatatttgggttgtttctactgttcggctgttacaaataaagctgctgtgaacactaatgtacaagtctgtatgagcataccttttcttttctcctgagtaaatacctaatagataagtggctagatcatatgatagctatacagtttctttaaaaaactgctaatgtgttttctaagtggtcgtaccagtatacatttctagtagccgtatatgagcattccagtttttcccttccaatttgaatgccttttatttctttttcttaccctattactcttgattgaacctccagtataatgttaaagagaagaagtgagagtggacattcttgtcttctttctgatcttgggaaagctttcagtctttcaccatgaaatataatgttagctgcaggtttttactataggtgccctttatcatgttgagggagttcctttctattcctagtttgctgtgagttttcatcaggaattgatgttagattttctcaaatgctctttctgcattgattgatgtaaccatgatttttcttctttaacctatagtatcctgggttacgtcaattaatttttgattgttaaatcaaccttgcattcccaggataaactcagcttgcttattatgtagtatccattttataaatttttggatttggtttattaaaagtttgtttagaagttttacgtcaatattcatttatgaaagatattggtctgtaattttcttgtaattgctttgtcaggttttggtatcagagtaaagctggcttcatagaatgaattgagaattattctcttccttagttttccgggatagcttatttcttacttaaatatctggtagagtttaccagtgaagctgcttggactttgcgtttcttttgtgcgaaggtttttaactacaaatttaatttatttagtagttatatgactgtttagactgtggttttcttttgggtaagctttggtagtttatgtctttccaggattttgtccatttaatccaagttgtcaaatgattgtcataaagtcatttgtcatatttccttactctttaatatctgtagaatttgcagtgacatctttctcatttctgatattattaatgtgcatgtcttctcttttttgtttttctcatctggctagaggtttattgattttattgatcttctcmaagagtcagcttttggttttattattttctttgttttctgtttcattgatttccactctgatctttattatttcctttcttctgcttactttgggtttaattcactctttttgtagcttttgaggtggaaactgtggtcatttatttgagatttttgttattttctagtataggcatttagattttcctcccactgctactttagcagcatttcatcaattatgaccttgtgtttttatttgcattcagatcaaaatgcttttgaattccccttttgatttcttctttgacccttgagttatttaggagtgtgtcgtttaatttccatatatttgtgaatttcccaaattttcttcgattattgagttctaccttcattcctttgtgttaagaaaacatgctttttataacttgaatatttttatgttcatcaaggctcatattatgtcccagaatatgccctgtcttggtaaatgttctacatgcagttgaaaagaatgtgttttctgctgttgttgagtagactgttctataaatgtcaattagattttgtcgatctgtattcttagccattttctgtctatttctaccaattgtagagagagaggttttgaaatctctgaccataatggtggatgtgtcagtttctccttgcagttctattagttttgctttatgtattttgaagctgttattagatacatacatgtttaggattcttacatcctcctgacgaattgacctcgttattatcatgaaatgaccttctttattcttggyaatattctttgctctgaaatctactttgtctgatattattatagacattatagcttttaaaaaattttactaacatgatatacctattttcatcctttgaatttcaaactatttgtgtctttatatttaaggtgagtttcttttaggccacatatagttggttctttcttttgtctccaaactgacaatctctgccttctaattggggtgtttagatcatttacattttatataattagtaatataattaggtttaaatccactatcttgataattggtttttattagtctcatttattctttgttcttttttccctctttttatggttgaattgagtacttttgttttaaactttttttattttattattattattatactttaagttttagggtacatgtgcacaatgtgcaggttagttacatatgtatacatgtgccatgctggtgtgctgcacccattaactcgtcatttagcattaggtatatctcctaatgctatccctcccccttccccccaccccacaacagtccccagagtgtgatgttccccttcctgtgtccatgtgttctcattgttcaattcccatctatgagtgagaacatacggtgtttggttttttgtccttgtgatagtttactgagaatgatgatttccaatttcatccatgtccctacaaaggacatgaactcatcctttttttatggctgcatagtattccatggtgtatatgtgccacattttcttgatccagtctatcattgttggacatttgggttggttccaaatctttgctattgtgaatagtgccgcaataaacataacgtgtgcatgtgtctttatagcagcatgatttatagtcctttgggtatgtacccagtaatgggatggctgggtcaaatggtatttctagttctagatccctgaggaatcgccacactgacttccacaatggttgaactagtttacagtcccaccaacagtgtaaaagtgttcctatttctccacatcctctccagcacctgttgtttcctgactttttaatgattgccattctaactggtgtgagatggtatctcattgtggttttgatttgcatttctctgatggccctattttaggtacatgtgcatataggtaaacttgtgtcatggtaatttgttgtacagattattttattacccagatactaggcctagaacctagtagatattttttctgatcctctccctcctcccaaccttcaccttcaagtaggccccaatgtctgttgttcccttctttgcgtctgtgtctgtgttctcatcatttagctcccacttataagtgagaacctacagtatttggttttctgttcctgtgttagtttgctaaggatgatggcctccagctctatccatgttcctgcagaggacatgatctcgtccttttttatggctgcaaaattccgtggtgtatatataccatattttatttatccaatctggcattgatgggcatttagattgattccatgactttgctattgtgaatagtgctgcagcagacatacacgtgagtgtgtctttatggtagaataatttatattcctttgggcatatacctagtaatgggattgctgggtcaaatggtagttctatttttagctccttgaggaatcaccacactgctttccacaacggttgaactaatttacactcctaccaacagtgtgtaagcattcccttttctctgcaacctcatcatctcttattttttttttttactttttaatatgataatagccattctgattggtgtgagatggtatctcattgtggttttgattttcatttctctaatgttcagtgatactgagcttttttttcatatgcttattggctgcatgtatgtcttcttttgaaaagtatctattcttgtcctttgcccactttttaatggggttgtttgtgttttttcttgtaaatttgttaaattccttatagatgctggatattagacctttgtcagatgcatagtttgcaaatattttctcccattctgtaggctgtttactttgttgatagtttcttttgctgtgcggaagctctttagtttcattagattccatttgtcaacttttgcttttattgtgattgcttttggcatctttatcatgaaatctttgccagttcctatgtccagaatggtactgcctaggttgtcttccagggtttttacagatttgggttatacatttaggtctctaatccatcttgaattgatttttgtatatggtgtaaggaagggatccagtttcagtcatctgcatatagctagctaattatcccagcaccatttgttgaataaggaattctttccctattgcttgcttttgttgaagatcagagggttgtaggtgtgcacccttatttctgggcgctctattctgttccacttgtctatgtgtgtctgtttttgtaccagtaccatgctgttttggttactgtgggcctgtagtatagtttgaagtctggtaacatgatgcctccagctttgttctttttgcttaggattgccttggctattctttttggttccatatgaatttttaaatagtttttttctagttctgggaatgtcattggtagtttgataggaatggcattgaatctataaattgctttgggcagtatggccattttcacgatattgattgttcctatccatgagcatggaatgtgtttccatttgtttatgtcatctctaatttcttcgagcagtattttgtaattctcattgtacagatctttcacctccctgggtagccatattcctaggtattttattctttttgtggctattgtgaatgggattgcattcctgatttggctgttggcctggctgttgttagtgtataggaatgctagtgatttttgtatgctgattttgtatcctgaaactttatcaaagttgtttatcagctgaaggagcttttgggtcgagactatggggtttttactttttagaattctattttatgtcctgtgattgcatattagctataattgtttgttttgttatgtaactagttattttacatctttatgtctaccttcaaatgattgtatgctgcttcatgtacaggataagaaccttatagtagtatactcccatttgtcccctcctaccctttatgctgttgttgtcatccattttacttttacrtatgttataaaccccacaatatattgtttttgtttttgtttaaacagttatcttttaaggataatgataataatgccttagtctcctacagaagcacttgccaatccactccctgccaacttctctggcctcatattcgactgtcctcactgcacccattgatccaggcatactaacctctaacarcttatcactgtgcccttcctcccttccttctcttactccccctacccactttcctattgagttaagttgatccttttctgaacttccattgtaatactttgtgtccacattgttattttagcttttgtcaacctctagtgcagggatccccaacccatgggccgtggatcagcactggtccatggcctgttaggaacggggctgcacagcaggaggtgagcagcgggctagtgagcattatcgcctgagctccgtctcctgtcggatcagcggtggcattagattctcacaggagcgtgaaccctgttgtgaattgcgcatgtgaggaatctaggttgtatgttccttatgagggtctaatgcctgataatctgaggtgaaacagtttcatcctgaaaccatccccctacctctgccctggtccatggaacagttgtcttccatgaaaccagtccctggtgccgaaaaggttggggacctctgctctagtataatggcgatttttctgtgtggtatctctcacaggtcatgggctgctcatggacaggaacttcttccaattatacccagaatcccagcaatagaaggctctcagtacataaggagtatagaaaagttcaatggaagtattctgagaatttggttcaatgacgttaatgccttttgttgtctcacttggactcatatatagctatgtatattcttgtcattccagtggaatggcactttgggaaaacatgaagatgtggtatctttgtgatagaagtgagcttcttaacactaatgggaattaaatatgtcacgcacttaatagatattgacaaaaaattaaaactgataaggggataaggaatttgaaataagtctttttccatttcattgatgtggttctaggttttgtcttctgtaaaaagagtttcctttggagatgcattaggagacaatctttagttttcattagttttaagtagcagtaattcatgaaacagtagcccagggttttcagagtttaattaatgttttgaatatgattaatttatcacccagggaaaatgttaactacctaggaaaaatracagaatataacttcttatgaggccctttacttaaaacctcattaagtagcaaatcagaattttgttttaaaaaattgaaatttattagaagactatgcatctctctatattgaaagtcataattgatataatcctataaaatacaaaattcctggaaaactggaatcacaaatatatatttggaaaactcgtgttaagttttatggaagcacaagtctatggcagtagttgctactttggcctttttctttcagtgaaagatgtcatgtatatctgcccatttatgggagcagtgagtggaaccctgacagtgacggactttaagctgtacttcaaaaatgtcgagagggtgagttttttaaagtgtgttttattttaaaagaaacacttttaaaagaacactaaaagaagaaagtaaaaagtcccctgaaatcccattaccctgagataaccacaggttggattttgagatgcacacatttgcaaacagatgtttgtatcttgaaaacaaaggctgttaaagtaccgcttaaacctggaggggaaattccattgttgtctcaatatatatttcacaaggaatgctrtcaatcagacttcaatttagctgggacaaagaggaaatgcgaagtaaacaaacatgttttgtaacccagcaaagacttaaaatatgaaaactgttgactgacactaataggcattgatcttaatttttgaacctaggacccgcattttatccttgatgttccccttggagtgatcagcagagtggagaagattggagcacagagccatggagacaattcctgtggtatagagatagtgtgcaaggtataatagaaacgccaagtgaaaactaaaagagggcaatcagctctgaactttttctccctcagtctcttcatggtctttggacagtagaataatttgtactgctagtaactcaaatgttttcgggatagcaacctcttcaaatctcatatcgaatttaaactattatgtaaccctttgaagtaaaccttttccatcgaagtccaattgtcccttggtatcggtgggggattgattccaggacctctgcctcagatacccaaatccatggatgtccaagtcctttatgtcaaatgatgtagtatttgcatataacctaagaacattctcccatatactttaaatcatctgtatattgcttataataactaatacagtgtaaacactatgtaaatagttgttatactgtattgtttagggaataatgacaagaaaaaatgtctgtgcatgttcagcacaaatgcaaccatccttttaaaaaatattttccatctgcagttgttcgaatcctccaatgtggaacccatggataggaagggctgactgtatttctaattaacgtggacctataacctaagtgattgtttgtcacatctcagagaagtcaagtgaaaagcagagaccaatacatttccccagtttgttgttttaagactacgttcagaacaatgtggatggtcagagacttcctaaagggacagcagtggcccataaattctgtgattaaaaatgagattaagtttcttggctatcttggaatttttatgttgagctgggcttatttgtttattttgtacccttcttctaataatttaagtagaaatgtgtgtgataactttaatcacgaagtcatgtaggacccactcctaattgatgtattttattcccagtgacttgactttggtaatgtttaccaaaaaccctacctgaagtaccagaaaagagatcctgcctgcaggatcatcagcgccccttccaaattttgggttaggattccttacaatctatttattttgattcaatctctgaagatagctccctctggttggtcctagactgcgttcaaaaccattttttttttttccaaagaaccctttactcttccagatcatgaatctgttggcttactaaactcactttagtcactccctgacaactgtccttctcaggcagggttccccatatggaacaatggcaagcagaggggtgacttgatcggttctgcaattttgaaacatgtcgtcccctttctcatgacgcttgagtatcttcccattatccttagactaaaagaaaaactctccttacaagactgctctgcctgacccactttcctctgcagcttggtctcgaactgccctcctctcattctggccatcccagtcacatgggctttcctttggtggttcatacttgacacacccacccacacacacacacacacacacacacacatcccagaatctttgcatgtgctctttccttagcttgtaagcaatcttaaatagcaagtcagctcagtcagccaccaaggtgtatgtgtgtagccatgtagcttagagggagggcatgtcaggaaattatgttgcttaggcaggcatcctggggctcttttactaagatatttttatggctggggtgagcatttgctaacaactgctttaaatgttctctaacctagattactaaggtaatgctcccagccttctcagatcatgcctaagagctttacaaggtgtggggtttattttttaacaggtgatatacaattcaaaagatacaaaagctgtgtatagtaaaaaatcagtctccttccacccaccaccctgccaccctgttccactcatttcaggcacccactgtggccgatttctaatgtaaccctccacagatagcctatgcacatgagaatgtatgtatagtccttctttgaaaacataagtggggccaggcgcagtggctcatgcctgtaatcccagcactttggaaggccgaggcagttggattacgtgaggtcaggagtttgagaccagcctgaccaacatagtgaaaccttgtctctactaaaaatgcaaaaattagccggtagtggtggtgggtgcctgtaatcccagctactcgggaggctgaggcaggagaattgcttgaaccagggaggcggaggttgcaatgagtggagactgtgccgttggagcaggataaagtataaaaggagaaatgaattaaaaaaaaataatttccttatttatggcacggtatctggcttataggtgcctgatgtatgttgaataaccgagttttgctaattgtttaacaggatatgaggaacttgcggcttgcttataaacaggaagaacagagtaaactagggatatttgaaaacctcaacaaacatgcatttcctctttctaacggacaggtaaatacaccagagtaaaccttttctgcatgcatttgtgggggtccaaatatcctatgtttaattattcctttttccagaggtttttttttttcctctcttttttcctctgttggtgactaatattagaatatttgaaatttgtcagttctgggtaatgcttaagaaaagctgctactttgttgctgtaaaatttacagactaaaataggaatcttaatacactcagctcatattagaatgaaaagctttaatattgggtatatgatataaaaagaaatagtaacatatgtgttttgtggtttttgtgtccaggcactatttgcattcagctataaagaaaaatttccaattaatggctggaaagtttatgatccagtatctgaatataagagacaggtaaagtatattgcttatcaaactgaaaataataggttgagcatctttttctcttctaaaaggttagaaatgatgtggtggagaagaaactttttcgaacaagttatgcacaggtttaactgctagcttataggttctccatctttccttgattctctcttctccctgtgccaaaccttagactttgtcatgtttgttcatcctgtttccagagggtgagtgggactcaaggacaaggacgggtttaaaaaccaaatttgccagatggtttttattagatgttctggtaaagaattgatgagtaaggatccaaaccactgactacagttagattcgaagcatgtggtgtgactacatctgtctgatccagtgttcccgggtctgggaactcttcagtgcattgtcagcttcaaattattccactaagatcttattttcatgacgtttgtttcatgacgttgtctctaccttatatttggtataatgttttacgttacttattttagacattcgtaagaggtatctgtgtttctaaaggacttttgagtatattctcaaaaataacagagctcattatttatagaaaataggacaagaaatatatagaaatgtgattctagcgtataattttcatgttttagtatggtttggatattcttatgcttctttagatttttagaaatgtctaggaaatgggttttaccgaataaatatatatattgacttttaagttacaataaacaataaattataaacggattttagttgcaaataagaaatggatgtacttcatgcttagtactttttcaaagtgtaaagtcatgcatttcaccctcttcttctttctccaacaccttacagggcttgccaaatgagagttggaaaatatccaaaataaacagtaattatgagttctgtgacacctaccctgccatcattgttgtgccaactagtgtaaaagatgatgacctttcaaaagtggcagcttttcgagcaaaaggcagagtccctgtaagtaataaacattgtcatttatataggaatatatattgcgttagatctaatatggagagatttaagacaaaaaagaaactagtgaacaaaaatggaaagcagaaaaataagcttataaacctgaacatacctttgattctcaacaaatacctaattatrtaaacaatctgtttgctatgactccctcttttacgatttcctataactaagtataaggggaacttcagtcataccctcaaaaagtagtagagaatgacaaaggagtagcaacaacaagttakcatgctattgtattaccagttggcattgctggtttcactgaatcatcctagagaaaatgcttctttcttagatactgagcatgatgccatagctgcgtgggagggacatcattacagaagtagtagcagacagctgggagtaatggtttgagcccagagtttgcatctgttgtaatcctgagtcacttggccactggaggaaaatgagaggtggggtggcagagtgtcagattttataagagactgtatattcactttgtccttaccctgccacgtatattattgttgagatacaaagatgtttttaaaattaggagacaaggtaaaattagtcaatcaaattggaatggggctagattttagtaatagtttgatttaggatttgtttttcttagaatcatagaatattggggatggaaggggatttttagagctcatgtagtcagaattgtttcatcctgaccaaaacattgagtctgatggccactacaatgctgtgattggcctgcccactctcacttttgaagaaaatatgtataagagaccgtgcttgagaagggaacttgtttttcctaccaggtaattagagcatacattctttaggaactgtactaatatttattgcttaaaaacactaggtgttgtcatggattcatccggaaagtcaagcaacgattacccgttgcagccagccacttgtgggtcccaatgataagcgctgcaaagaggatgaaaaatacttgcaaacaataatggatgctaacgcacagtcacacaagcttatcatctttgatgctcgacaaaacagtgtcgctgataccaacaaggtatattcttaatagcactgcagaaacactggatattttcatgtcctgtctgtaaatcattatgcagttggaataactcattgatttcctcaccacctgaagttagaatcatttggagtcccatagctattcctccctggtgtatgctccttgggctgtgtttggtgtctcacatgggttgggatcttgtctgtttcattgcttctctacaatatcctgtctgctaaatcaattaagtaaagacctagaaagacaattatcatctaaaggatttagcattttaatgaaatgatcgtgaggtccttggaagtccgtttaaggaatatagtggttagttgattaattcatgtctggtctgaatttcttttagaatggaatcagccatgtgaaatgtgtaaatgtacaaagtttccataaatctcatggagcacctgtgtagtgtacctcgggtggcagtgagacatggttaaaaacacctccgttcccatgactttcatgatatcacaccctgagtttctctcgctcttcagcctggccttctccatctccttcactgatttctcttcccagtcttcaaatggcattgctcctcgaacttggtctggggtcctctttgctctacacagactcctggggccatctctgatgacacggctttaaacactgtctgtatgctgagttcaacttgagcttgacactgcagtttctctcctgtcctgatccctcctaaggttgagactggatttctatcccattgtatggttgacatctctgcttggctgtttcccagaccacaaaccctccgtatattccaactggcctgagaggcacgatggcaagttggtgagaccccttggctttggaatcagttacacctgggttttcctccaggttctgccacttggtgctctagaatcctgagccggttacttaacctctctctgtgcctcaggttcctcttctgtaaaacaggagataatatcagtgtctcatgtcatgggttgtgtgaggattaaaattcagtgagaagaatgcatgtaaatgacttagcacagtggtgagtgcatcctcagggcacagtacatgatgctgataagctcgccacccctgtggtcaagggtgttgcccaggtgtctgacttgagggtgaatagtggtgtctgttactgagatggggaagactgggagaggaacagggcagggaggaagatggggaagtattagttttctgaggctgtcatacaaattactaccaatttgttggcttacagcaccagaaatgtattgatcacaattctggaggccaattctgctccctctaaaggttcaaggggagaatctgttccttgcctcttccagcatggggtggctgccccagccttcctgggcttgcagccacatcactccaatctcttcttccgtcatcacatgaccctctcttgctctgggtttctgcgtctcctcctttctcttctaatgacacttgtgatgacatttaggttccacctgaaataatcctggatccttaaacacatctgcaaagaccctcttttcaattaatcttggaatccttaaacacatctgcaaatctcaggatccttaaacatctgcaaagaccttctcttcaaataaggtcacattcaccattgccagggattcgatgtggatgtctttggcggggccacttttcagcctaccatagggaggcatccctcagtgaggcccccttgctccccacatctggatcattagctgtgtcagtctttctacatctctgcctcccacctgtcaccaccatatcccaaggaattacaaaatgtgagaaaagccatattggtggaggccatcttcagactagccaacagggtgagggcagttcattgtgttttatcccatgcaggagagatagagacaggacactaaattgtatatctagaataattttaactatggcagtatatgtgtctaggaaacagtattttctaggtctccactggttctttatatataagattatgtcatatgcaagtcgagataatgtgacttcttcctttacaatctggctgcctttcatatcttcttcttgcattggtattgcattggttgatttttatatgttgaaccactgtcgtggattgaaaaatgtctcccaaaagtttgtccaactggaacctcagaatgtgaccttatttagaaataggatctttgcagatgtattaattatgatgaagccatcttggagtagggttggccctaaatccagtgcctagtgtccgtataagaaagccatgtagagacacaggcacacacagaaggaagatggcgatgtggcaatagaggcagagatttaaatgatgcagctagaagctgaggagtgccaaggacttccagcaaccaccagaagctaagagagagacatggaacagattcttccctataccctcctaaaggaaccaactctgccagcaccctgatctcggactttcagcctccagaactgtgagagaataaattttatgttgttttaagtcccccagtttgtgatagcacccttaggaagctaataaaacctccttacattcctgggataaatcccacccgttcatggtatgtgatcagtccccttcatatactcttggattgggtttgctagtattttgttgaggatatttgcatgtattttcataagggatgttaatctgtggttttctcttcttgtgatgtctttgtctagctttggtatcaggatacagctagcctcatggaatgaactaggaagtatgccctcctcttctagtttttggatgacccatcatctcttacctcacctacagcaggaaccttgaaattggacttctgcctcacaccctgcaatctcatctccacattatgaccagagtgatcttcttttttwaaaaaaacttattgttactatttcaattgataaatgaattgtatatatttatggtgtacaacgtggtattttgattgtgtacacattgtggaatggctaaatcaagctaattaacacaccattttttgtggtgagaacacttaaaatctactctcagcagttttcagatacagactacattgttattgactgtagtcaccatgttgtacagagtgatcttctcagtggacaactctgtgcacatccctcagagccgcaaggcagtgatatccaggttcctgaacagggtctccaaagccctccacccacgggtcctttccttcctgtctcgccacatcttccaggtccatgtctcagctatgtgaggttcttttcagttccttaagcacatcccactgttagctcagagatatgttgcagtcctaactccaagtacctataaatgtggccttatttcacaatagggtctttgtaaatgtaattaagttaggatgtggtcatattgaattggggggtgggggttaagccaaatgactgtgtccttagaagaagaggagaagagacagacacagacaaaggaaagaaggtcaggtggaaatggaggcagagatcagaatgatgtgtgtataagccaagaacacctgggrctatcggaacctggggcagccaaggaaggatcctcccctagagtgttcggaggaagcatggcactgccgataccttgaattcagacttccagcctccagaactaggagagaataaacttctgttgttttaagccactgagtttgtggttctttttccagcagccctaggaaactcatacaaggatataggaggtttatttgcagatgagtttgttgcttctttagtggtctgtatctcatagcactagaaagaatagaaaagttaattccagataatgtgatgtatttgttttgtttttcgtagacaaagggtggaggatatgaaagtgaaagtgcttacccaaatgcagaacttgtgttcttggagatccacaacattcatgtcatgcgagagtcactacgcaaattaaaagagattgtgtacccttcgatcgatgaggcgcggtggctctccaatgtggatgggacgcattggctggaatatataagggtaaagagatccagcactttatatgctttccagttaagacttctttrtgcctgtgccataaatacgtatatctccaagtgcctcttggctgtgtgcatgaactttcttattcaatagtttccatggacagcatcagactggggtctttgtggagggcttttgtgacatagtgaaaagggaaaaatgcttgccttaggtcaggcttttaaagaacttcgtggccctttaataaggaaccatatttactcctgtagtttttctccagtataagattttttcttttctttttatttttttaatgtgatgctaatatttcctagtgattctcagctgattgcctgccattcttgcttggtttattgaccagaacttccaaagctctccccagaattattttacattgttttacatttaattgaaattcaatgtagcctggtctaatgtgccttttttttctgaagatgctgcttgctggggcagtaagaattgctgataaaatagaatctgggaaaacatctgtggtggtgcattgcagcgacggttgggaccgaacagcccagctcacatctctggctatgctaatgttggacagttactacaggaccattaaaggatttgaaactctcgtagaaaaggagtggataagctttggacacaggtttgcactggtaagttcagacagtgaggtttatgctggactgttttgcggtatcatatggatgtaaacgtcatgtgtgacacacgtaagcgcatatatacacacacacgtgcaggctttctcttctgtatcatatcagacctgaattgccataataaaatacatggacctcaggcattgtatgttcctcatagggcgtttttattttagtgtatttatgcctttttaaaaaattgaggtaaaattcatataacatagaattaaccatttaaaatgctcaattcggtgtcctttagtaaattcacagtattatgtaaccatcacctctagtttgaaaacatactctggccaggcgcggtggctcaggcctgtaatcccagctctttgggaggcccagacaggcagatcacctgaggtcaggagttcgagaccagcctggccaacatggtgaaaccccgtctctactaaaaatacaaaaattagccagatgtgttagcgggcgcctgtagtcccagctactgagtaggctgaggcaggataattgcttgaaccygggaggcagaggttgcagtgagccgaggtcatgccactgcactccagcctgggcaacagagcaaaactccgtctcaaaaaacaaaacaaaacaaaaaccgtactcttcacctcaaaaggaaatgctgtacacattaaacagtcattcctcacttcccccagcccctgacaaccactaatatttctgtcttcatatacatttgccttttctaggtacttcatataagtggaatcctacagtatttgtcctcccatgactgagttacttcactaagcataatattttcaaggttcatccatgttgtgacaaatatcaaattttcatgattttttatagctgaatagtattcccttgtgtgtatataacacatgttgtttatctgctcatctgctgatggatgcttggattgttcccacctttgctattgtgaagaatactgcgtgaatgttagtatataagtttttgccataacaaggtaccacagactgcatggttgaaacaacagaaattaattttctcataattctggaggctggaagtccaaaatcagggtcccagcaggattgatttctcttgaggtctcccttctttccttgcatatggccaccctctggctacctcttcacaaggtctttcttccctttgggagctactggacacccctgctgtctctctgggtggccaaatgtcctcatctcataaggataccagtgagattggcttagggctgacttcaatgccctcatttgaacttcatcacctctttaaaggccccatctccaaatatggacacattgctgagctaccgaatgttcaggcctcaattttggggatcacaagtcaccctataacaacttgcttacaatctagggggttatatacctaggagtgaaattgtgaggtcatctgatggggcattcttgggctgccatttgtgttttagtccaactggcagctacttctggtctgtctaggccattgagctgttagggatctttctgaactgtgcattgaatgggaatactcctgaagtccccattagacttgctatggaaagcaggaagatggrtagtgcaaggatttcattggctttggtgtgagtgtgccaagcttccagctgtccctgcactcctggggtggagcgcctgcaagaggacctcccagagagaagggacaagtccgcagtctctgagctgcatgccctttgggagctactggcagatccctgggcatgtgccttcccctctcttgccttgattccctcctctctgaaatgggggcattgtgtgggagaaatgagtttatatgtgtcaaatgtttarggcagtgtttggcccatgctaagtgccagggaagttttaaacaacatcaccaattcctttgtttcttaccccctcagcaaaggctggtctcggtaaggaagagagagtgtgtggaatctttccagatgtttgggccacctcagaagactcagaggccactgccttctaccttcctycccaaactgtatgtcctaggggagagaaagcttgaatgggtgctttgccagaggggtagtggtgaaggctgtctagcgaggtgccagcgatggcagcatgtactgggactgagcagaggtacatgcatcagggtgtgcctacagcgccctgctcccatccctacttgctaatcctggggctcactgcaccatggccacagtgaagccaataggactatcagattcctaatggcctcaatttactaagccaccactatgtgtttggcactgttaatgtgcagcatcttgtttaatcctgatagtactctcattcacagatggggaaattgaggtttcaagagtgtgtgttatctgcctaaagtcacacagctagttagggtggagccagcctttaaacagtgatttcaagcctgcaaccacccaccctctggatctgtgtactctactttacctggagttctgtgattgagccatcagggcttccagctgaggctgatcctgcccttgcctgcttgcctccatcatggaactttccaattgttcttccctttatcctgcctccattcccccctcttccctagatcattcccattggtgtggagacattctgttatatcctaaaacaaaaaccctcttgaccccacagccctcctcagctgtcaccctgattctctgctcttctttacaacaatgtcctcaaaactgttgtctgtactcactatcactatttctctccttccagactgtcttgaaagcacttcagccagggttccttctcacaatgcccgcccccccacaatctggtcgtgtcaccgtcatcacttgttttatttggcctgagcattcgatgctgttgattcttcctttcttccaaacactttcttcattcggcttctaggtttctttgaccttttgaatttcctccaactttcaggtcttccctcatcttcccaacctcttaatgttggggtgttccagggatgagtccttggatcatttttcttctctttgtggttaacctgttagtgatctcagccagtcccataactttgaatatatggatagcgaatctgtgatctcatctccattgcccctgatgctcctgtaactcaggccttatcaacccccttaggcagtctcctaggtggctgtcctagtctgtttgtgtttttacaatggaatacctgaggctgggtaatttagaaagaaaagaaatttatttggctcacgattctgcaggctgtacaagaagcatggtgccggcatctgcttctggtgagggcctcaggctgcttccactcatggtggaaggtaaaggggagccagtgtgtagagatcacatggtgagagaggaagcaagagagaggggagagggtgccaggccctttgtaacaaccagctgtctcgggaactaatagagaactcactcacacactcccccatccaaggagggattaatttatttatgagggatccacccccatgacccaacacctcccattaggctccacctccaacaytggggatcaaatttcaacacgaggtttaggaggacaaacatcccaacaatagcagtagcctttcygcaacctagctctgtctaatccatcgtccccattggagccagatggagcattccaaacaacagattggatgctgccactccacagtgtgagtccctcagcaccttcctgtagcacacaggtttatgaacaaactcctcagtgtgcactcaaagcccttggtgatctggccctagctacatctccagcctcacctctcatcttctttcccttgccccgtctaagcctcagctgtgcccagctacttgtggcttccttagtgttccccaccacattgccactggttatcaattcctggctacctgggaagcaggcatctccctgtccttcaaggtttatctcaaatgaaatgtcctttatgactatgactcacatgactgtccctccctgttccttcccctaccccatcctaggatggttcactcattcccttgtgctcccaccatacccactgcatacttggaagcccttggaacactttattgcccttgtgatttatacatctttgtcccttgactagaccacaaatgaattattcatcaagcacaagtacagtgtctcatttgctctggtctcctaggggcctagccaaggaccgggcctctaccagacaccatgacaatgtctgacattccgagggccaggcatgatgccttgcacacgccataggagttccatggctatctgttgaaagaatgatcctaaattgtgaactgtcagtgtaaaacagttccctaggtgccttaaatactgaacagcaggtcctacaagagattttatagtggggcaatgcatggagctactatggagaacagaatggcggatactcagaaaattaaacgtggaactaccacatgatctgacaattccgctgatgggtatataccccaaagaagggaaagcaggggcccaaacagatatttgtacattggtgtccatagtagctttattcacaatagcccaaaggtggaagcaaccccagtgtccatcagcagacgaatggaaaaacaaaatgtggtctatatatacagtcatgtggtgtgtgatgatgaggatacattctgagaaatgcatcattaggtgattttgtaattgtgtggacatcatagaatgtaccttacagaaacctagatggataacctgctaacatctaggctatatggtacagcctattactcctaggctacaaacctgtgtggcatgtgactatactgaataccgtaggcaactgtaataccatggtaagtatttctgtatctaaacgtagaaaaggtacagtaaaaatatggtattatagccttatgggaccaccattggatatgcagtcatcattgactgaaacgtcgttatgtggcacagttaagtggcactgtaagactaacatacagtgcaatgttagtcttaaaaagggaaattctggcatgtgctataacatggatgaaccttgaaaacatgctcagcaggccaggcgcggtggctcacgcctgtaatcccagcactttgggaggccgaggcgggcggatcacgaggtcaggagatcgagaccatcttggctaacacggtgaaaccccgtctctactaaaaatacaaaaaaattagccaggcgtggtggcgggcacctgtagtcccagctactcgggaggctgaggcaggagaatggtgtgaacctgggaggcagagcttgcagtgagccgagattgcgtcactgcactccagcctgggcgacagagtgagactccatctcaaaaaaaaaaaaaaaaaaaaagaaagaaagaaagaaatcatgctcagcaaaataagctagccacaaaaggacaaatatttatgtttccacttatatgaagaaactagaataatcaaattcatagggacaaaaagtgaaatggtcattgccaggggctaggaggtggggaatggggagttagtgattaatgggtatagagtttctgtttggaaagattaacaagttctagaaatggtgatggttgcataataacatgagtgtgcttgatgccactgaactggacacttaaaaatggttaagatgagattggatgtagtggttcatgcttgtaattcccagcactttgggaggctgaggtgggaggatctcttgaggtcaggggttcaagaccagcctgggcagtatagtgagaccccatctctacaaaataaagaattagctgagcatgatggctcacacctatagtcccagccactctggagtttgaggtgggagaatcacttgagcccaggagttagaggctgcagcaggctatgctcgtgtcactgcactccagcctgggtgacagagcgaggccctgtctctaaaaaataaaaataaaaataatggttcaagtgataaattatatgtcatgtgtatttcaccacaattaaaattttttttataaagaaggtaatacactgttactctgagatgttaatattgattttgtcatttatttgttttcatgtctttccaggtggcaatttcatagagtatttttgctctttctaagtgattgctttgtattttcttaatgagtttttttccccacatccttttgctcatagcaaattatttgaagcttctcttagaatcctcacccttcagctatctttttacttgtggcattttcagtgttttggcaatcctatttgtgtatttgagaatactatcttttaccttttggtatgaatctattgatatcttacaaagtatcaaaagatatgaaatacaatactggactgccttaagcaaggaccccacctttaccatttcaagattgagttgttggggttctctgagtcatgaagaattggttaaaagttgtagattgctaatcattattttgattctcagacttcctgacatttctgaaaaatggaaaaaatgtttttatacttgtagagaaaatggcattcataatgtgctttatgaactgctaattggcatcctacgttgacactgtacacttagtgtggtggctggtcttgaccctaccattttaactgaaaagtttgctagctagttgcttgtactttcttgatatcagctatattaaagagaaattataaaacaacatgtaaaaatactgtaaactgaaattttgttttctaaaagtaatggaagtcatttcgatttgatagacatttttgagtgcctgttatgtgccaggaattctattaggcctgatgagatgtgattcttaccactggacaacttacagtgactttcaagaggactataacatacgttaaaacgtttaaccttctgtttctgttcagcgagtgggccatggtaatgacaaccatgcggatgctgaccgatctcccatatttctgcagtttgttgattgtgtttggcaaatgacaaggcaggtgagagatttcaagtatatttctatatagtctttgctttaaatatatcttaaagattaaactattattgctgtttcattcaagatgaatttgtgtaaaatatgaccccattatttaacacaatttgattctaattcgcttagaaatataagcagaacattagaaacaaccaatttcacaccaaaagttacttgtctttgcaaatggtttttatcaatcatcttgtccactaggtccaaaccaaggccctactcctctatagattctgctgcttttgctccccttcaaaaggttaaggaagtacagtctcctgctgagcagttcatctaagatttggccagatgttagaaatgaggatggggatgaactgctagtacatgggattagaccaggcaatccaggaatctccacactctgccccagtccagagcctctcccacccaaggtcactgagggaaatgagtgtccaagaaccaatggcatagaggaagctgcatagcattttgctattagctggtgcatcgttcccaaaccccaatgcacagggccctggtaaagaagggagccatctagggatccccttcccttgagctggtcaggccctttggcttcagttcaaagtaggccataaggccatagttcctgcactgttttgttgtcgttgttttccccctcatctccaacatctaaacctgagtttggtctcctatccttgtgataagagacagtgccagggcaatggacctggaaccagagagagaggcaaaagagagtagtttccccagtgcctgctgcgcaacctggctgagggtggggctatggggtacagaacaagttagggggctgagatccagggtctgagccttctcttgctagtcattcaccaggagctctggccttggctgcttcagtcacggggaagggaagcagccaggacactgccggtgatctgcggggatgctaccaatagccctgctgctcttgattgatcctcccgcagccttatcaccatcagcccagggccttttcagaggacatctgcctccctactgcagaaagtctgtgaaatactaggcctgtttccccactgagagctactgttactgatggcagtgtgtgttggggcagaaggaaggttgatagtcatgatgctgcctgtgctgtccggctccccagcagctctgccctgaggaggacctggagaactcagaagatggctctccaccttgagtgcacacagccagcccctgggaaccttcttcctgtgagcctggagacaggcttaggtgtgtgtaaaagttccccaggtgattcagatgtgcaaatgagtttgacaaccagtgatctagcttagtgctccaaatgtggtcctgagaacttgttagagacaccaaacttcagcctcactgatgaccttccagtgctctgggtgtggggcccagccctctggttccacaagcccttctgggggctgatggatgctcaacttggagaccattgctgtagactaacattgctcaaaccttaatgagcacacaagtcccctgggactcttattgaaatgcagattctgattcagtggggctgaggcagagcctgagatgccacatttctgataagctctcaggtgatgccatcgggtcacagatcacattttcagtggcaagggagcacagagacatacctctagaaataaggaacaaaggggagggagtctgaatagccaaagtagatttcatggagtcctcaggccctcacttagaaattaacactgacttttacacccagcttcaacaaactgattggggtctcacatgatctgatggccaggtcacaggtgattaaagatagcctgttagagagctggcctgggtaagaggggctggtcccagaggtaggtgtgctgatggtgcatgtgaaaggtagcagcaaacacactccagaagcatgaagactggcctgaagccttactgttttatagagccaggcactgttgctatttgtgttgatgctgagccaataagaaagttaaatgattgtcatgttcaggttaggacaagaaagtatgaaacacattttagaaaaattgcataaaaaggttgaacacaaaaaataattgcagtgcttctaaagggatgagcaccatttcggtggatgtgaaatagcttattcctcccaaatgtggatttttaaacatcttcaaactgacctccattctttatactgcttagtgcctgttttcatgtctaagccatgtcatttttgtgcttttattggattttaagaaaaggggtttgaattagaagatttcagatgcttctcacagctctaagattctgtctgtgaaatgtgtgtataattaatttcttttaaaattacattgttaatgcattagcacagacatccatgactagtctttatcagttcattaagaaatgaatgagatatatagcaggtataagatgcagtcataggaaagattatttttaggttgcctactgttaagtaagctatgcagtgtaaaattgtcagaaatatcagaataaaatgaactagtctgtatgtgaacaaagaaactaagggaaaaataattgagggactctttagagtcccaaagacactcaataatatccatagtttaatacaatccttactcctctgggtaggtttaatagtcattgatatttttgttcctcaagaggtgcagaattggggccaggtgtggtggctcacacctataatctcagcgactcaggaggctgaggtagaaggatcgcttgaggccaggaattcaagaccagcctgggcaacatagtgagacaccccatctcttcaaaaaaaaaattaaaaaattagccaggcatggtggtktgcacctgtagtcccagttactcgggcggctgaggcaggaggattgcttgagtccaggagttcaaggttacagtgaactatgattgtaccagtgcactccagcctgggtgacagagtgagaccctgtctctaaaacaataaaaaaggaggtgcagaattttattatagattactgtgctatgtattttcggaaatcgtacttttaggtaaaaggtacagtttccaggagaagaggccaaaacaaactatgaattgcagcgacctaatctttcgtttatattactccacctgctactgtttcctccaatgagctgttttttgagttgagcttaatgccatgacaccccctgagtataaatggcagtcttgacccaacatgagtaggtggagcctttgttttccagttttcatgggtgccaatgggcttggactgagccctgcccactttgacctcccatatctggtacccagtgaccagaataaggcttgttgtcactgactctagaacacacctttccaagctcccaaatctacaatgcaggctcaggggctaggaatgaagactcattgtcatagtctgtttgggctgctgtaacaaaatatcataaatgaggtggtttataaacaacagaaattctttctcacagttctggaggttgggaaatccaacatcaaggccccagcagattcagtgtctggtgagggcttgcttcctggttcatagattagctgtcttttcattgtaacctgacatcatggaagcaacaagagagctctcttgggcttctttgagaagagcactaatcccattcactagagctctaccctcatgacctgatcacttcccaaaggccccacttcctcatactacaccttggggattagaatttcaacatagaaattttggggggatacagatattcagttcatagcacttatatggcttgaaaatatgtcaataatttgctatcttttagtaaacatttgtttttaaaagtttgagaattataaaatataggacaaaaccctggatctttcattcctatccttgatttaataaagctttagtacacaaaaatgtcatatatttgcttacaattcacaaattctgtggtgccaataatttatgaatagggcataactaagcagcatagagaagtcctgggaaaattggacatagtgtgcctggcctgttaaaagatagctatttgagccgggcacggtagctcatgcctgtaatcccagcactttaggaggccgagatgggaggatcacttgagatcaggagctcaagaccagcctaggtaacatagggagaccttgtctttacaaaaaaaaaacaaaaaacaaaaaacaaaaaaaaactagctgggttgtggcagtagtcccagctacttggcaggctgaagtgggagggatcacttgagcctgggacgttgaggctgcagtgaaccacagtcgcaccactgcactccagcctgggcaacaaagtgggaccctatctaaataaataaatgcatgaatgagagagagagaaatagagaaagatagccgtttgaaatgtgaggccactgtcagagttgcgaggggcaatcttaaaggctccaagaaaggatgaaccagtagatattgttagcatttcagccagagacatcacatcattgatttagttcatctaagaacaagggtgccagtaagaaccaccagaattagtttccagaggtttctgaagcagtaatattctgatgggattccttagaggagagttgtgtgtttctgagagcaatccttaagatggagagagaagcaaatcttaatccacggtatctgagcataattccttaagtcagctaatataatagcctggtgaagaaaacagtttcaggtggagtttggacagtcctggattgaccattgttctaattgaaaagcctggtgctagtctagtagtaaagctaaactaaaaaataaacttctctaccagtgatcctgatgtgatcattctggagatgtgaagatttgtcatgatagtgtgcacacagcactctgattgaagaataggtttttaagtaaaccaacttaaatacaagcatgctgggtagtactatttggctttgcttcattgagtaggtgatgaatattttactgtgtttttacattagagttctggcgcatggtaggcactcagcacatgcctgctgttagggtaattattatcacttccagatcatctcatggccacaacacaccagctactggctagaacctgctggcaatagtaatagtcttcactggaattctgcaaaatcccatcaagaattacctaaaacaatcaagacgatctgtggttttgctccctcactctgccaatatggtgaattacagtaattgatttgttttgtaacatagattttcatatgttaagccaggcttacattcgtaaagtaaaccccacttggtcatgttgtgttacctttttaaaatgtattgccaggttcagcttgctcatttacactggtaagaagtcaggcgtgctgtaatcccagcactttgggaggctgaggcgagtggatcacgaggtcaggagttggagaccagcctggccaacatggtgaaaccccgtctctactaaaaatacaaaaattagtcgggcgtggtggtgcgcacctgtaatcccagctactcaggaggctgaggcaggagaatcacttgaaccctggtggtggaggttgcagtgagccgagatggcgccatggtgctattgcactccagcctgggggacagagagagactccgtctcaaaaaaaaaaaattcaggggtgtatggtcatggagttgtctttgtaggaaggttcttaactaggagttgtttatttaatagatgcagagctattcggattttctattcttcttgagtcactttgggtacatgttatgactggatgtactgctccccttacccccgacctgggatgtggctgcagcggggaagctggcacaatagagggctcccctcatttgtttcccttctctcagggtcacagtccagtactgcctgttgccagtgtctgaaaacagtcatttcttatattgtatccagcttgctagatgtttctgacagaagggtgagtctgggctctgtcctgccgccatggtgagaagtggaagctacataagcttttctgggcattgagtacaacaaatttagttgctgctggttgtttctcagccagatctataagtttggacctaaaactgtaggtagttgaactttacatgggctcagtcttcctttaaatctttgactatattccaagttgtagtttcgctgtctttcataaaaaagtaatattacttttagaaattggactctatgactaaaccttatttttctcttcatttaagtttccttcagcattcgagtttaatgagctattcttgattacaattttggatcacctttatagctgtctttttgggacctttttgtgcaactgtgaacagcagcgattcaaagaggtgagtatgctgcatccttgtctgttgctttccctgtggctcaggcacctctcctcggaagtgctactgtaggagggctgaggggagggaggactgcgctctggtgctattgctgactgtaaatgccctcccagggttctggccagccccaccgcatgtgtctaacacaagccccttcctttctaggcatggggggctgggacccagcgagcccgtggctctctcaggagtagatgagtgctagaccctggacctcctgactccgagttcatgtagtctccgctgcaccaactccaaaaccgtgggattctgcttttcatcctctgtggtgttggccagatcatacttgaaggccttggaaatggagtctgctgattagccaaaaagcccactttaggtagcaagctaacacttttttacatcaaagtagtaaagaagcagttaccaaacttctcagagttacatctcatttctttctttttccctcagtgtgggataaaagagaaacgtggtcaaaagtgagaaggcattggaaaaaggcagcttaaggagtatatgatcctgttaatagacaaggaccaatgcctgtgagccaagtatgttaggacagtatagaattcaggagaaagcagtctgtcagtaacgcccgcctccccctctctcagcagcctccccacagttgacagtgccctcattctgtgaccccacctggtcctgcctctttcctgcctcctcggcctcccctgctcagtctcctctgactggctgccattttaaccagtctctaaagttggagtcacctgggcccagtcccaggtcctcttctcccctcaactcttgttccgtctttctaagtgactttgtctcgcctcagggacctaaatgccttttcctgctcctcccctgctcttttgcatctcagtacacagcaccactggccatccagatgccgaggccaaatacacgggagccaccttccactcctccctcaccctcaccctagctaccacatccagtcccctggtgaatgctgctggccttgtcccaaagtatattctttttctttctttttttttttttttttttttttttgacggcgttttgttcttgttgcccaggatgtagtgcagtggcgccatctcagctcactgcaagctccgcctaccacattcaagtgattctcctgccgcagcctcccgagtagctgggattataggcacccgccaccacgcccggctaattttttgtatgtttagtagagacagggtttcgccatgttgggcaggctggtctcaaactcctgacctcaggtgatctgcccgtctcagcctcccaaagtgctaggattattggcccaaagtatattcttaatctgccagttcttaactgccttacagctataagcctagctcaagcccctactgtctcacactcctactgtctcacatctggactaaggcagaaacccaggaatgggcttccctgattctctttctgaccttcagtagtccattctaaacatagcaaccacagcgagcattcagtaactgaaatgtgatcatgtgcctctcccctgcttcccactgcagttagagtaaaatccacactcctgcgggcccagtgtgatggggacttgctaacctcctaataaaaagaaaaacatttttaaaagagtgagttttgtgttacgtgaattatatctcaaagctatttaaaacaaataaaatcagaagcagaagaatgaagttcatatatagaattttaaccatggctttatcttttttttttttttttttttttgagagggggagtgcaaaattcattcttaaaaaaatgagctctcttgacacataatttacataccataaaattcacccatctaaaatgtacaatttcatggttctagcatattcacatattgtgcagccatcatcaatatttaatttcataaaatctctttatttctattttttgtagcgattggggtcttgctgtgttgcccaggctggtctcaaactcctggcctcaagtgatgttcccgcctcggcctcccaaagtgctgggattataggtgtaagccactgtgcctggcctaagtttataaaatttctgtcacccccaaaagaaatggcatacttggtagcaatcacttcccatttcccccacccctatcccctagcaaccatcaatctgctttctgtctctacggatttgccaattctggacatttcatagaaatggaattatacaataggtgaacttatatgactgtcttcctttgcttagcgtaatgttttcaaggttcatctatgcaccaatacatcctttttatggctgagcaatattccgttatatggatagaccacattttgtttatccattcattggttgatagaaatttggattgtttccacattttggtttttaggaataatgctactataactattcatgtacaggtttttatgtggacatacgccttcattcatttatacctacgagtggaattgccgggtcatgtggcaattatgtttaacctattgaggaactgccagattgttttccaaagcagttgcacacacgagcaatgtctgaggcttccaatttctccacatttcaccaacgcttactattttcctttttaaaaaaattatagccatcctagtgagtgggaagtggtatgttgtggttttagatttgcatttccccaacgactaatgatgttgagcatatttccatgtgcttattggccatttgcatatcttctgtggagaatgtgtattcagctccttagttcattttaaaattgtggtgtttgtcctttttattatggagttgtaagagttccttatacattctttatatattcaagtcccttataagatacatgatttgcaaaaattttctcccactctaggggttgtttttttttactttcttcatggtgttctttgaagcacaaaagtttttaattttgatgaactgcaatttatctattttttctcttgctgcttacacttttggtatcatatctaagaaaccattgcttaacccaaagtcatgaagatttgctcctgttttcttctaagagctttatacttttaggtcttacatttaggtctgtgatctgttctgaggtaacgtttgtatacggtgtgaattaaggatccaacttcattcttttgtgtgttggctatctagctgtcccagcaccatttgttggaaagattttctttccctcattcaattttcttgccaaccttgttgaagatcagttgaccgtaaatgtcagagagttcatttctgtgctttctattctgttccattgatctgcatgtctgtccttacgccagcactgctggcattgattactgtagctttgtggtaagttttgaaaatgggaagtatgagtcctcctactttgttctttttcaggattattttagctattccagatcctttgaatttttgttggtgtttctcttataaataaataaatgtatacaaattgaaatggtcctaattgaatgttcctgtatttagatagctcatgggaagtcagcagcagagtgggagaaaatgctgttggccttgccgttttctcatttgactttgtcattgtgcttgatccattgtttaacgtttacctgcctcaccatgcctgcacatttgggtgtttttgttcagatgagcaatgcaagtaggtacagtgtttctgaatagtgtactacaaaattaggggaagaagagataacttagtgatatatttacttgtctttatagagcttctccagcctgcaccacagcacattgtcctccagatagctatgattttccagcacaaggaaccttaactgtaaaatctattctcatttctcaatattaagagtcacagccaggtgaggtggctcatgcctgtaatcccagcactctgggaggccgaggtgggaggatcacttgaggtcaagagttcgaaaccagcctgggcaacacagtgaatccccatctccgccaaaaaatacaaaaattagccgggcatggtggcgtgcgcctgtagtccccagctactcgggaggctgaggcaggaaaattgcttgaacccgggaggcagacattgcagtgagctgagatcatgccactgcactccagcctgggtgacagagtgagactccatctcaaaaaaaaaaaaaaaaaaaggagtcacaaaagctctattttcttttagaggcagggtcttgctctattgcccaggctggagtacagcggcacaatcatagctcactacagcctcaaactcctggcctcaagcaattctgccacctcagcctcctgaggagctgggactatacttggctaatctttaaatttattttttttgtagagacaaagtctcactgtgttgcccaggctagtctcaaactcctgcctcaagcagtcctcgcaatgtggcctcccaaagtgctggccttataggcttgagctactgtgcccagcctacaaaagcaaaccttacaccagaattcaaaattatatttgttattggtgggtcctatcatcctgtggttgttagaaagttctcactctgcctttccatagacacagttgtcggatgctacctaacttcagcaatatgtttttccaggacagcaagcagtgtgttttcatttcatcccaccatgaggccatgagtgggaagaaggtggggctgggacctagtagacattcatgaatttttcagcgtttgaattcacttcattattcaagtccttttctcggtgtaatactaattcttgatgatatgaagaaaagtttatttccaatgttcttttttgtttttcaggatgtatatacaaagacgatatctttatggtcgtatatcaatagccagctagacgagttttctaatcccttctttgtgaattatgaaaaccacgtgttatatcctgttgctagtctgagtcatttggaattgtgggtaaattattatgtacgatggaatccacggatgagacctcaggtatctttttgtttttcttttcatgaatgagagagtttgcctttttttccaagtaaagatggtggtatgaaaatgtgttaatggtagatattaacataccatactgaccgtcttctgccctctcctgtcagggttcaatcctttgcattcatgttccaggaggttccacccatacgccaactctgatgatgtttgctgggttacagttaaaaagtcttagcacttctgtctcgtactgatgaggtacataaaatgctatgtgctccagtgcttggcccttcttcttataaactactttacctgcagatatgggggttggggtggcagcccttttccctgtttccacgtagaggtggtagaaaggcgtgtggaagatgcatcagggctacagtgtatagacyctgttagtccagcagtaggagggcaggtgcttgaatcacagaacaggtgcccctttgaagaagggggagagtttgcccctccccaccacactttttcactgtaatattttctgagattgaacaaaattagagaatggtgcactacaggggccagtccgccaagcctgtgtcctctctttgtgttcagtggctgagctctggctgcgggttcctgaagggctccccacatcctccactgtgtcgtggtttggattcagtcctgccccgcacccccagtctccacatgggtggccagggcatggttggttctgggtggtgaagaagacagatagaggcagcctgtacctccatggacagataactgtctgctgagacttttttcttttttatttatttattttttgagacggagtcttgctcgtcacccaggctggagtgcagtggcatgagcttggctcactgcaacccctgcctcccaggctcaagtgattctcctgctctggcctcccaagtagctgggattacaggtgtacagcaccatgcctggctaatttttgtatttttagtagagacgggatttcaccatgttggcctggctggtctcaaactcctgacctcaagtgatccgcccgcctcggcctcccaaagtgctgggattatgggtgtgcaccactgcgccaggcctgagatttttcttttgacttgaatactctcagagtttaactgcagtccatcaggagcgtgtacccagggcattgtttaatagcattgctctgtcagccaatgatacagaaatctgccttcctctccatcctcctgctccctcatccctctcacctagggtcttcatgatctctagatcgtctccacactccactagccatggggcagtctgaactgctcatgttccttttcagctgcctggccctggaacctcaaggatacgtcactatagtaccccggcctgccagctggaaagctccctcactggtggccttagctccatgctccatctgctgggtgcgccccgctgccccaggccgctgcttggccactcctcactggatcctttgccctctaccacagaccaggctagtcatcacttgcctcttctttcctagatggctttctattttgttccacaaagcttccactgcaaatgcttttctcctctggaccctctgagttggccctgccacccttacgacctcaggagtgttttccagaacactgtgatgggtgctcattcagcctagtacttgtacgctgggcctggggagttgggaaggagtcctggctgcaggggtgctcctgcatcctagggtgcccttagccacatctcccctgtacacgccctgcccctgcttgaagcagatcccccgtgtgaatgagccgccctttgtgtcttcacatgtatgaaaacaactagtgtttgatcacctctttcagctcttcccagagtcttccttggataggagagacttgcatctgtgtccctctcccactagccagggagctgctgggacttgtgctgccctggagcctttcccgttgagcgccctcttccctgctcacctagtgctctggcggccctatgttgattgcccaaactagcgtactttgagaaagagagtggaggcgctgctaataatcagtctgtagaattccccaagacactcgatactgcaccggcctgtttgcctgcctgctgcccctacacaccacaggctttgaaaccacagggccctcaggatctagcatggtgtttggcaactaacggagactcgacagatgtgactgaatgaacgcatgagtgaatgaagaggtgcgcccctctgctgcaggccrgttccccctgcacatctgctctctccagccccttgaacctgcatttattccttctccctgtggtggctcttgcccctcagcctacagaggactcacacctgcccaccctaaacctgtcctgtccccactggcctctccctcaggtctcccctccacacccagtcctctgggatattgggacagctttctacctactctccccgcctcagtctgccttgtgtccacgctccaccttcctccagagaggccttttgctcctgcctaacagcccagacatcaccttctgtggctgcccgatggctccagctccccacgccctctgccacttggccaccacctgagctcctggcatcaacttagcttccttcttcctctttttaaaaaaatttacatttctggccgggcacagtaacttacgcctgtaatcctagcactttgggaggccgaggtgggcagatcacgaggcagaagtttgagaccagcctgaccaacatggcaaaaccctgtctctactaaaaatacaaaaattagccaggtgtggtggtgcacgcctataatcccagctactcaggaggccgaggcagaagaatcgcttgaacctgggaggcggaggttgtagtgagctgagatgagattgcaccactgcattccagcctgggcgacagagtgagactccgtctcaaaaaaaaaaaaaaaaattacatttatctctccctttagactttgtgctctgcaagacatgtccctgcttgttattaattgatctttaagttattaatctaataactgcttgtcactagattgaatccttccccagatgagaactgagtttgaaggcgagctgtctttgaaatggtccatgtgcccaggaactatgagtgagcgtgagaggttgctggtcccattagcatcttctttcctggctttcagcccaagaagtctatgtgcagggtgacctgctgccctgtcactggagtccaggtccagcactgtcctcctttctgacttcaggtgcattatttgagatgctraacacaggggcccatcaagcacttctttccagtcagtggtcaacttgggaaccaaagcctacatcccccttccagcaccttcctcttcactgatgtgtatttctacttaggcatcttgctgagttattctgtcctgggtggcttctatttcatctattttggcaacagggaagatgggctacagagtgtcagaagtcactatgttactgaaatcacatagggttaccaggtgatattcttggtgactcaaaggcccgggtggttggtggagtgtcatgaacattagcagaaaatccaacagaaccatgcctgatctggagtgcctttggctaaacagagcctctcgattactgcaggagacccccgtacccctgccacgctcccccttgtgcagcaggttgcagaggtgaagaaatgctgaaccagcagagagggttagagtggtgtcccacaggggtgcacccaggctcagattcttgcccgccgcgtgaggcaggtaacagacctttcctaaaacctacaaactgcgcgacagatctgttcccagatgtggtcaggttctcactcatgtaggcgaagccacctgcaacatcatgatgatgatggaaaccacagcgacagcgcctataacctgcagtcctcttgtgtgccagtgggttctgtacacacatgatcccagttaacgctcccagcaattccacgaygtagagaatgagggaagggtcagagaagcagtgacttggttgaaatcttgctgcccagtgcgtgtagttgtggaaggatgcccccgacagggccagatcccgtctctggcagtgactcaccgcctgatctgcagcagggtcctgagcctcacgggsacctcacagggggttgctgagcaggaagtgaatccattccaagtgcactgtgctcggagggtagtaggtgtgtggtcctgctttttgcattctccctccattgtgctacacagaagagagaaccaaaaaagagtacatgggccgcagcttgttatcctgtatgcaacaggcatgtgtcggacacctcctaggtgtgggaatgggggtgggggagtgcattgaagacaggcagagatcagtggctggtgtgggtgtccagtgacagggcctgaggagccaggtgaggcagagagaaggaggaagagaggggaggggagggagtgcaggggggtaaacgacagggcagatgcaagcctgttgggcctcttttctctgagaaggcagtggctcgattggctgccgagaaaggggttctttgggcatccatcagaggatggctgggtgtggaaggcccaggggcgtcctatttcctttgggactgtcttgccttatgtcttgtgatgctagtacccatgcggcaaacatgactggcccttagatgggaattttctctaacacaatcctctgtttaagcctccgagttttctattccttcaggcatgcccttgatttgttgcaaatgaaaatatgtgagtaggccaggcgcggtggctcacgcctgtaatcccagcagtttgggaggccaaggcgggcagatcacttgagatcaggagttcgagactagcctggccaacatagtgaaacctcatctctattaaaaatacaaaaattagccagacacagtggtggcgggcgcctgtaatcccagctgctcaggaggctgaggcaggagaatcgcttgaattcgggaggcggaggttgcagtgagctgagatcgtgccgctgcactccagcctgggggagagagtgagactgcattccgcctcaaaaaaaaaaaaaaaagaaaaagaaaagaaataggtgagaaaagatgcaaacagctggtgaagagatgatagtggtgcgtttgagcagtgctgggtctgccctgggtgtgtgtcagtggtgtatttccctgcgtgtcttgcttcttgctgaggtcacatgcctgtagatggataatgggaacttgattgcaaggcgtcccttgtctgatcagaattaaatgatcctacagacaggaaaacgcatgccagatgggtcctaagggtaagagaggagctggtgccacctcccagaggcctgtgggatctgcctttgccatcacactccactcctgtcccctctgttcttcctgtggcctgcccaagggggtcatttcttctcagcccactgggtgctggttactgagcaccttgttattagagggacctggctgcccccttgcggtctcgctctcatcctccttccgtctcccccttccctccaggasggctgatcaccattggcacacacggtggaacagctcagtctttgagggagtgggggaaggacctggtgaaagatgagccagagggccaggctggggccagactgcagagggcctcgaggcccctctcagggcagggggaagaagtccctggaaggtgttaagtggccagtcacatggcctggctgaggcttaggagccagccctgtggctgctgtttacacatgggatcagagacaagggaaggctagggagctccccagaccccaccctgtttctccctcagcccagtcggtgacccctcactctggtcagccttgcccccagccaaagagctccaggtgagaaaagctgggtctcggatgtctggcctcctagtagctgctggggacagcttgttaggcgagtgggttgggtgctatgactataaaatagcaggactggatgtcccatatgccccgggaaaacctttcttgtttatattcacccctgccccacagttgatgggtttaaaagagaaaagctaattaaaggtgaggccttgcggtgatgctgagcaaggagggaggggttggtccttggggaggctccccacccccctgccggcactgcccgctccggggggcttctggcagatcctgctccggttgatgaaaacacagcttcaagttgtaaaaagtgctgatttaacagaaggattttcagtcagcagagctatttataaaaatgcaaaaatacagagataatggagatgctggaaaggggtctgcgtggaaacatttctgacgcacagtctttaggacactgctcgtgccgagtctgcacacggcgccctcggttgatccatggtgcgcagtgtccccgtgcctgcttgtcttctgagaaactgtgggagcctccccatggtgccttttcatcccggctcagcggctcggcccccggagctgcagggcggcctcagtggcagccaaagctcatgggatggggtcccattgtccacctgacgcgagatcggtcaacgcctcaggagactttggcckctccaggagtttggatggtgaaaagctcctgaagccaacagcatttccatgtggaaacgctgtggtaggaggatggcctgataatgcagctttgtctctgctccctccagatgcccattcaccagaatctcaaggagctgctggccgtcagggcggagctgcagaagcgtgtggagggyctacagcgggaggtggccacgcgcgccgtctcatcctcatctgagcggggctcctcgccctcccactccgccacctccgtccacacctcggtctgatgggcgaggtcagcctgctgctccactgtctcccggtggctcaggaaagggacctggcgatcactgttatggctgtagcttgtgatcttgtcttttaggattaggcccagggaccatttgtgtggctaggtgacagctcccactgttggcaaccgttaccctcctgtcagcggtttcacaggggagccgtctgtcacgcccaccctgtgaagcaacttctggcattcaggcagcttgggagaaactaagtgaacggaatgcagtactgaggttcaagaaagctgtacgccatttctttccaacttaaatccttcagtaacaacaaacaccactcacttcaagatgcattgccagccccgtggcttccctcagctcttggccacaacttgaaaactgtcttgaatgaagtacttggggagaagacaggccactgccctctgttccacagttttcttcatgcacggggtcctcctgttaacaattactgttgtgtacatataaggtatttttagagaagagaaacaggcctttattttcctatgtccttttttacgtttagaatagtcacccgaggggggatcagctcaactgtactgtgggagaaattcttttccaacaaacctcatgctcgtttttctgtggtgcaatttcaagggcaacgtgttctgtcctcacctcactctggtactcgcctcttggggcggctcagcccattcatggggatggcaccaagcggccatgctcagtcttccagccccgctgagggtaaaccgaggcctctggcagctgtgcacaggtgctggcctctggctccttcaaggagcactgcctgtcactcgctcctgggctgtctagccatgtctcccacccccactttaccgcagccagctgctgggatcaaagcaagtctgttcttatgttatttgcctgtatgaaatcatttctcattttatcacaattccttcaactcagcttactcgcgtggctgcctgttcatatttgaaagcagccaccgtgctgtggctttggtttggaaaagcatagcacgcacttcccttggttttcccttcccagagccgaccgcagctggtcagccctctcttcccgctcctgaacctttacttactgactttgagctctgtgactccgtcggttctcgcaggaattaactaacttaccaattggttcaatccacttgagcgccatagctctgagctcctctgtgtgacatgccacagatgactattgcacacctgggtcctgccccagcaggccatgcccctcccatgtgccgtgcctgttgctgcagctgccccccsaccccgccactggctgcaggaattcagcctttagaggcagaggcagctgcagcggcccctgaggtcaaaccccagtgtgactgcatagcagtgttagctggttggtttcaaactactggattccaggcaaaggcctacagattgaccttattatttttgaaaatatgttaagggttttttcatagagagagaaagaatggatttttttttaactgggaacctcctgattcttacggaaaattatccttctataagaagataccagagagatttattcaaggtaatttgataacytaaaatcaattctccattttttatcatatgtgggatttgttgctaagtcgtgttcaacaatagcttttatgttcctaacatatctgaaagcttatttatgaatggatatactggattattgatatactgattttttttttaatggggacatttgccattttcttcccagaaatatgtaatcccctggctgactaggactgttaaacatagtgtggactggatgatgccttcgacaaaccagagaagccaagttggggggagctggtgcctggagtgggccctgtgcacctcacctggcggaggctgggggggctctgtcagcaggaccctagaggagactctcattcgattttaaagaagcacaacgggtcattttcctttgtatgttcctagcgcagaactgtttctaaaacaacttgaagtatagttttgttatctaagcaatttttkttttaagtaagtaagtgtactagaatgcgaagccgttatggttcaggtttttaaaaactggtacagtattgtatytgtctcatctgttgcactgtatttcaatcatctgtaattaaaatgatcatatgtttrctccctggtcttttttaagtaagtaagtaagtatcttagtagatttttcctttgaggaaaatcggtaataaaataacatggattgaatgtttactgtgcgtcaagcacagttaatatatgatgatgtaaagtaactaactttatgtgatttaattcattcagtaaattgtaaatgtatcatgagtcttaagtaagtaagtaagtaagtaagtaagtattttggctgaaacaggaaatactgattgattgattgattgattgattgatgattgtaaagtcagaaacgccctcagctctaaccttgagaaaacgtggacgacttggggaaaggtctggagacacctgagaggagccagtcagggtgatgagtccttcgcatgcaagtgcagtgctctctaaggcctcagactgcccccaccccaaaggaaggggcgttcaccttttcagggccacgaaggcctggatgaaatcacaccaccccctgtgccctctgtgtgttgtcggtcttcttgttaagggtgtggggtccctgtccctctccacacacgttactactgagtgagccagagagcccggtattcactgggcacagaggatgcccaggggactgcttgccagccagccttccccagcagtgagaccatagcagctagccatgcagaactcctgcacgagacaggcatatggtggtctcgggtttgagaggacctgatgctattatttcactagaagccgaggttggcaaaacaaaatgaaaaaacaaacaaccgacctccatgttaaaacccagggtccactgcatcttgtttgttttcatgctgaaatgccctgaactgaactgtcgtcttctcaatttgaagccaacatgcgagctgatgagaaggacatacttcatcccaaacgggccactctccatgaggctgcaacaagtgacgaggtgcagggctcctttctcacccagctttctggttgaaaaacaactgcgcgttaactggaacctccactggttaccagcctgcttggaaggcggcagagcagtcgacttgggatttgtgagcctgggactttttgctgcttccaggccccggactgcgcaacccatgtagcccgggagcggccccgcagcactctgctcctgcctctgccctctctaaccccaggacattggtcgctccacatcccctggccttagctgcttgtacggtgaggagtcacccttggaagtcctgacactgagccagtcactgaggggtaaatgcaagaattctaagcttctcgagaaataccttcagctgggggcggggcggggggagggggaggagggcagctctgcatcataaattacttactttagggaaaagtggcaacacttgaccaagggcgtgccttaacaccatcagaagacaagaatctgctcggtgccattttatttaatgcaaacactagacagtttacaagtcacacctggacacaagcacgtgaacagatgtacagggaattctggaattttgagatcagtccccatttcttcctcagggccctggcactgaaccccagcccctgtcccagagcctcccctctgggtcccaccccagaagccacgcacacctccttccgcccagctttatctttccttgagctgtgacttcacccagcatgtgctcagagttgttacaaattttctctgccaaattaagctgacagagattggccactttcaaccagtcctttcagtccactgtgtctcccctctcgcttgggacaggcccatgctggccagtgcaaccttcagatagacacatggtgaccagagcccgccaggcttctgcaggtggcagtgtcgagcaagtgtaagatgtctgtgggaaggagaagctcctgaaatgaacgttctgcaaacagaaggctgaggggtcttccaggcatgtccagtcactaggagctgccaccggtgggcttgagtgccaggctctaggctttgtgcagaaagcacccggggcggggggcggtaagggagagcaaaatgggtctctctcaactgcagtcagtgctcctgggaacacggtctcacagacagcacatattctacgtcacagctctagggtttcaaggacttagccatccgacaggcctcaccataaaggtaaagtggacaacccctgaggtcacgctgtccaggtggcgacaggccacgcatgccaaaatcctccatagccacctccggcccagcaccagccagagggtggggccatcggttctcgacatacttggtatcagggagggacaagcctgacaaagttcacaatctggccaatgagtgtgggaggccctggaaacaggccaatcctgcaagccaccccacccttactaacttcctgaagcatgggaagcttctcgagaccaggccaaggtttctttccttcatggcaccacgcagaggcatttctgcagtgctgcaggtcccccttcagccacacagtccaggtctgtcagggattaaagggccgagcaggaaaaggggtggtaaggagctcaagggcacgcactgggaatggcctcacaaggcagccttgagacgcacagggctacaactgaccaccctccaccacaggcatgtttgcaaaacgaacacgaggcatgcgttagacagatgcatgtgggggctgcagattccagtggtttccttaagaaactggagttggctcatcccactcagcagacaatcccgctcagtggacagcctatgaaacgcatggggccatcatgcagaccaaagaggcccgtgagttttgtaagatcctgcctgtctggtgactcatatctgctttcagaagtgctttctgacacagcaaactgactatcagtagacaggggccctagaccctagcatgtggttctgtcccgtgagcctctgacaacagagctcaccgggacagaaccatatgtgggccaaaggaacattccaggaaaccagctctgctccagcccaaaccaggcagctccacgccaggtgaggggcgagtcatggggttcctgtgtttgccacggtgagcatggctccccacgcactctccctcagagcagacaagtaggctgaccacagagctacaaagtcacctgcgtttcactaaaccaagcgaatgtctctttcccctctcctcccccgccgcccccaattacatttttaagcaaacaagcaggattctggctttgatgctcgttcttgacatcggtcactcttgctaccaaaacagggacacagggtggagggtgagcacctctccccaacacaggataaaactcatctccggtgcagaaatgattgctaaagacctttctcatgtcaaccggaaggccacacccagccccctatggaatcagatgggaaacaggcctacgaattgcttcatacttatccggaagattcctaagctctcaaggcaggactatcacgagatgcatgtttgtacttaaatcactgaaagcctccgcttggaccggctctccggaagcccagcaacataaaacctgggatggggaagactgaagtgaaaccatcatcctgggtgctgcgtgtgtgtggtgttacttggtgctgaccggttcgctccttgcaggggctccaagtgggtgcaggctgagccccccacctgcagctccttgaggccactgtcaggggctgtctattggcagaaacctgccacaatgagccactccagtgtgcaggggtcacagtcccttgagttcaaactcttgtcccctaagcataaatgtcatcaggcctcagcatcatcttggcccccgcatcctgtgctcagtaaagctggaggcaggctggctttgggagttggtggctcagcagctcccgaggctggtgctggctttctatcagagctggctcttgaatttcggcaccaagtctcagcacgcttggggcagggcagagaaaccaaactcacaaacacccagagctcatccgggaaactcagaccaacaaggagccgatggcacagagcagcacagcagctgcgggtccaaatgaaggggtggggggagccgggtgacaagcggtggcaccattgtgcatgcctgcagctggacagggccctcagatccgggctggttcgggyggcggcggcggctctgcagactgcgtgtgcaacgtggagtatttcactaggggaaaaagaggccgtcagaaggaattctgctctgtcttgcacagaagaagcaaatacagcagcaagcccgtgctgggaacagaactgggtttccctttgtatcccctggggggccgcttagcaaccttccctcctgagcctgggagcagttttgggccggtcaaggggagagaaagagaaagctggacaggctctggaaacagctcagcctccatctcctcacctaaaaaatgagcgtgttcctgccagcgctgctggaagggttattttaaacaaagggctcaacctagcacctgcccacacagatgctggcctcgtggtggctaaccgtggcaaagctcatgacagtggatgcgacagcggaatccatttttccacatctgaacccaggcctattttagttcatttggtgcagcactgccacccgtcttcagcagcattgtagggcacctggctcccagtacacaccacacaggctgagcccctcctggtctcccaggcccagtccccacggctgctgcactgtagttccactggcaacactcgcctgagctgtcctagtctccctgcctgcgccaccaggcctcggctgctccccgaccccagcaagcctttccggacctcctcattggcatcccgtgggcacaggtcatatctgcctcgagcagttgggcactctaggcctgtggcctgaacttatgcgacctcaaattgccaacagctcctgaatccagaaagtgcttgatgaccacagaagggggagggaggggcacaggtgttgacaatagggtctgggttttacccaagttccctcttgcctgtggcaatttgcaaagggaaaagttctaggtctaggtgaaaagcttccccatggctctgttcaggatgtaattgtattcgctgatggggagcagaggtgcctggggctctggctcggacggacgaatcaagggcaggggccgagcagccgcaatgcccagaagtcacaggcatggcagcagatggccctggctgtcaccccagcatctttgggctcctgaaactgggaggcaggctcatcagggcaggcttttgctctggccggacattctagaagcagacgcctctgtgcttccctgcttctctagcacagttctgctcagtgctgggaccaactaggaaagcgtcagcaagggacagtgagtacaaagttctcaccttggggttcctcacataccacggcttccaggttctctcccttcacgtagtctgcgttgagaccctctgcaaagggaaaagggcagagttagtgatgcgcacaggacctaagggtccccaatcgtgactgagaactcctgaccaagtcctctgcagctaaaaaagcagcacagctcccctggggaactcaaaaccctgcaccctgagccacctgaacatccttatccggatgaagactgttcgtcccagaattcactgcccaggagttctcatcatcgtcctcagaaataacaacgacatgcagcgaaggcttccggcactccatcctcatagggcagctgccaccgcgtcaagacggcagctccgcccagtggagggggcgcccgatggcagggctcagcaccatccacaggtccgtgtgcgtgtgcggcccgggggccagggagccaatcgctatgagtgattgatggatgcagggcagggaggggcggatggctgagtggggctcagcatgtagatgcagcaaagcctcctgccaacatgcagcctcccagcaacacccgcgcggaggccaactgctcctcccagcagcaggaataaccgctgtgtccacctgagcttggaggggccagcccaccagcagctgcttcagtctagttagttatctaggctttctctacacctgttacaagagggattcggggactgtaccaagcattccctcccgccagcaagggccagtgttcaagttcttagagtggaccccacccctgctgctgcttgcagagagtcaagagtct

SEQ ID NO: 93363 - DNA, 26461 bp, Homo sapiens
  misc_feature (1)...(26461): n = A,T,C or G
gttcccttctgcaggctccctttaaatgtggaggctgcctttcttttccacgtcatacatgggtgtacagggatattgttttgtttccacttcaagttagggcatacaaaatctctgtgaccctgtctagttcccatctacctaatcacaccatgaatcttgttctctttctggggcctgttgccttcctgggacagttcaggaatcaaggaacacgtccctctgctcctggatttcacaaacccatctatggaggtttggtggcttcccaggtatgtgacggggaccatggtaagactccctgtctctgggactgtggaaatctgccttgccattgcctcctctctcactttcccctgtgcaccatccacaatcttgtcatctcccaacacagaaagtgggttttttgtttgattttttttctgagaatggaaagccatgatcttataaaagatgttttgtccaaatcttttgctatagccaagagtcttatctgtttctgtaaagccaagccttttgcaacaccaaagacaggaagagattccctttgttccctctgctttctttgctgtcacttctttctttaaaagcaaagagcacagaatgcctagctgcttgtttggggtgatgggcaatgagattgagaaaagagaatattggggaggaaggcaatctattaatattattctaccacatttatgagcaacaggcagaaattataacaacaaggctatcaggaaaactccccactccatctggatgaaactgtgttaaccctaagaaacggggcatgcttttgcctcttctgctcttttccttgctaagcacagacaagatgtcagaactcagaagtcctgttccatgtaatcagactgacagtagaacaagtgttttctaggaaaaggtttatcttttcactggagatccagttctgagtggttttgaaaggtacaattcttttatttggtttggttctaggaatatgacagtttatataaagctgttgctttactgtgaaaaacctagacatagtgagagtaacatctgaattaatcttttacacccagaaaccagtagagcagaaagagtcacttttttttccttgtaagaatgcaaaggaatcctcaaaactcctttgcagttttaatatccattttgaaatatgttgatgtaactattataatgaagtattagctacttatggttagtaattgcttacccttattgagtacttactgtgtgtcagatactaaaacacttttatttaatatttttcatttaatcttcataataaccttaggagatacatattattattctgatttataggtgaggaaagtgaggcacaaagaggctaagtaactcgtccaaaggcacaaaatatgatgtgttacagactgaatgtgaaccccagaattctgatggcagagaagatatgcctacctaagtatattcatcatgataataatggttgagaggctatggcatatgggtgtcaattcttgtaataaaatgttaaatttaagctagtagatcagaataaaaatgttaatgtgaacttattgtgatatatgtgagacaaagttaccagtttgcagccaagacatgaaactggattagtgaatgattttgatgctctagtttatcaagggatacagaagttttgttctgagccgtcctgggtcttcagggaaccaccatgaataaataccgtgaataaacaccaggaattggagaacataagaaattaacattttatatttatgttaatgtgctggaatttggaaggatcagcatgaaaatctgatacacagaatcattttgaattacacttaaaggcatggaaataaaatttcttgttaacattgtttcataaaattctcaaagccattagtattttgtataattcattcattcaaaaatatttactgagcacctactatgtgtcaggcactgttagaagtgctggggatagagtaatgaaaaaaacaaaggttcttgtccttgtggagctaaattttgtttttttaaactcctcttactatctatcattcccaaggagctgatttttaatgagtatgtgaaataagtaagtaaacagtatattacaaagttataagtgctatggaaaggtaaattaggggtatctttgagtttgctcctcttagtgttctttttcctttctatttcagggataaaatgggctaggttataaaactgttactcattttgaaaactcaatctgaaggagctggacaaaaatacaaaccaaagcatgacttctgatttcaacattgaaaccagttgatatggttaggcttcgggtcccaacccaaatctcatcttgaactgtaatccccataatccccatgtgtctagggagagactccaggtgtctagggagatcggatcatggaggtggtttcccccatgctgttcttgtgatagtgagtgagttctcatgcgatctgatggttttataagaggttgttccccttcgctcctcactcttctatactcgtgccaccacgtgggaaggtccaagtgtgcttccccttcannnnnnnnnnnnnnnnnnnncatgattgtaagtttcctgaggcctccttagtcatgtggaactgtgagtcaattaaacctctttcctttatgaattacacagtctcgggtattcctttatagcagtgtgaaaaatggactaatacacaagtggtccacacccacctgaagtagcagcactatctaaaaaactggcttctcatggagaaataacattctcgttgcccattttcactttataagtatatatagttcccctcctttgaagatgctctttacctgttccctccttacctgtcttccttgccacatatgctcctgtgactgatcttactcatatttctgaccttagaaaaggctactgtgttcagtgcccctgctgtgtgctgaatgtgattgtctttttcctattaaaacactaattatattgcattgtagaggtttattcaatagtctttctcccccataagactgtataatttgtgtagttaaggataaggggccaggcgtggtggctcatgcctgcaatgcttttggaggccaaggtgggcagattgcttgaacccaggagttcaagaccagcctgggcaacatggcgaaaccccatctctactaaaatgttaaatttaagctagtagatcagaataaaaatgttaatgtgaacttattgtgatatatatgagacaaaatataagttatcagtttgcagcccagacatgagactggattaatgaatgattttgatgctcttgtttatcaagagacacaggagttttgttctgagccgtcctggatcttcagggaaccaccatgaataaataccatgaataaacaccaggaattggagaacataagaaattaacattttgtattaactttaatgtgctggaatttgaaaggatcagcaaggaaatctgataggaaatcattttgaattacacttaaaaattaaaaaaaaaaattacctgggcatggcggcatgtgcctgtagtcccagctactcaagaggctgaggtgggaagatcacttgggtccaggaggttgaggctactgtgagctgtgattgcaccactgcactccagcctgggtgatagcacaagaccctgtctcaaaaaaaaaaaaaaaaaaaaaaaaaaggataaggaatatgttttttcatcattgtatcatcagcactcagaatggaggctggcatacagtaagagctaaatatttgtcatataattgaatcaacttttgctgagtatctatgtggacatgcctatgtatgtatgcattttgttaataaggcaaatttgtgattacacagaaaaattcaatcaatataatatccttactgatttgtcctaaaatttcaccgacacctattatttattttttcacaaaaggtatgttggtattttaattaaaaacgactctataaattggttttattatttatttatttattgtttagaaaatattttttgtagagatgaggtttcaccatgttgtctgggctggtcttgaactcctgggctcaagccttccacccaccttggcctcccaaagtgctgggattacaggcgtgagccatcacacccggccaacaaattggttttattatgagtagctagtaatacatgtaatttctcttttactttttaaaatattatgaaaaaatttaaatgtgcaaaataaagaagagtagtataataaactcccatgcaccaatcatctgcctggcccttatgtttcatccacaacccaacccacttacctgactccaggttattttaaaacaacttcaggcactatagcatctaattttcagtaatttaaaaaagagtgtataagaatgctttagagattacaaggcaaatgcttacacattatctttttccattctcataccctgttctttggcactttaccgaaaaggaaatgagaagggttcagagaaattaaatgacttttctttggtaacatgcctagtatacatgtagtcagaacttgaagcttttgcttttttttttttcttttttaacatcaactttcgtgcttagtccagtgtataacatcacaggcaaattcaaattgagaataggaatcagttgttctttaaccgtaacccttctaacttttacttatcctaagaccgggtagcaagtagggcaggagccttcatctagagggatggtgacagctctgataggggaaaattagcactggtctttccttccaaaaagccactctggctgctgctgttgacacaaggctcctggcttttgagacattatttgagtgctggattccaatactttttactttctcataagaaaaaaaaatgtgaagcatctaaggatatctcctgccttattgataaagtaagcctcaggctgaatccaaattgctgagctccaatagaactacagggcaaagcatctacacagggaattgccactcttctccaaaattaggctttattaagaggcaaggctatgttctcctcatatatatgtgtgtgtgtgtgtgtgtgtgtgtgtgtgtgtgtgtgtaaaaagtaaatgttttacacagatccccataagggaaaagtgggctatagtaatacagtatttttttgtttttcttttttttgggggggggggacagtttcgctctgtcacccagtctggagtacagtggcgcgatctcggttcactgcaaccgccgcctcccgggttcaagcgattctcctgcctcagcctcccgagtagctgggactacaggcaagcaccaccacgcccgggtgattttttttttttttatttttagtagagacgggtttcatcatgttggtcaggctggtctcgaactcctgacctcaaatgatccgcccgcctcggcctcccaatgtgctgggactacaggcgtgagccaccgcgccccgccaaatacagttttatcaggaatcaaaactgtgctctcttctggactctcagctttagctgtttggagcgtttagtctaagccttaccacttacattgtaatgtgaagatcaaattgtaacgacatggcaataataaggctcctattggttgggtaccaccagtttatgccaggcattgtactgattcatgtctttaatcctcaaaacgaccttccgaggtcagcgtttttattctttttccagaggagcaaactgagtttctgagaagtcacacccaacttggtggcagagctgacgctggcatggggttgactccaaagctctctacgccacgagggtgggaaagacaacgaaacacaagcgagaagaataatgagaactgggatcgcaacttcattaaatgagaagccaggaacaggtggcggagggcacgcggttcgctgcacggagtcgctcaggctctttgaaacaccgcgcgggggagcggggcggtgccggaagtcaggccatggcttccggttcttgcgtcggaagtggccggtcagcgtcgctgccggtctccggcggagacggactctggagtttgrgcggccsgggcggccactaggtactctgatattccgtactaaacacgtctgcaagtcaagatgtcgcacccgtccccccaagccaagccctccaaccccagtaaccctcgagtcttctttgacgtggacatcggaggggagcgaggtgagcggagtctgacgctcgcggaaaagccccgaggaggcgggggttcccgggatttgggggattccaagggcggaatgcggctccggccggtgactgctcagtttcgcggaggggatggctgcctaggctggtccgccggagcaggcccggagatctagggctagatcgatccagcgcccttgtatcaatgccatcggtggtgcggaagtttctggaaatttctagttcgggaattgtggcgtcctttaggtttgcctcctgatttggtggcacttccacgccacctttgcactaccaagttagcatgaaatattttatgtttgcaatgggacagttcggaaagcatatcctgggatatgcgtctgctgggccccaggaaactatatttgccacatgagataatatatcagcacgtgctgtgttatttatacgttaaagggacttgtttgctcattgcttttgccttattactgattcttaatttagaggtccgttcagatgagcaaacattttctcttaatttgccattgggaaaatgcgctcaacgtagtgatggtgttgcctaggttacatagccgctcagaagttcctaaggcctggtgaattagggagcgtgttgctttgtaactggattggccttgttctggaacacgttggaattgctggccaggcaatgtgtttgaatgcatgtacaggacacacacacgtttacacgtacattcagtttgttgcaactagctagggctaggtttaatctcacctgtcttagctgctatctagaggaggaatttttacagcttttgcttcagaggttgcatgaggcagtttgctcagagcacaaaggctgcaggtatacgtaacacgtggcaagtccgcccacccaaagactgtttaattttctcccgttggttgcttggtgattggaaattctcagtacctcttgaagaaattactcaggatttaaaactatttgtatttaatgatatctcttacatggtgctaatcttttggctactataattggttatgatccttagtgtaatgtttcaaatctgtttatatacatacatgacagtaggtagactaaatttgaatattagaataaaataagattcactaattctagtgagtatattcaaaggaaatgaagtttgtatgtcaaagaggtatctgcactcccatgttcattgcagcattattcatgatagccaagataatggaatcaaactaggtttccatctacagatggattttttttwaaatttgatatatgtgcacagtggagtactattcacccataaaaaataatgaaatcttgtcacttctgacaacatgaattaatatggaggacattatgttacatgaaataagctgggcacaggaagacaaggcatgatctcacttacatgtggtttctaaaaagttgaccttgaagtagagaatggaatggtggatttcaggggttgggtagatgttgatcacgagagacctaatttcagttagaaagggggaataaatttaagagatctattgtataacataatgactatagttagtagcaatgtgttgtgttcttgaaattgcaaaaaagaaaaattacagtaaaggggaacttggtaattcatgattgatctgctaccataattataccaaccttctttttatcatttgtctatttggttgttttgcatactgacaagattttcttttcttttagttggtcgaattgtcttagaattgtttgcagatatcgtacccaaaactgcggaaaattttygtgcactgtgtacaggagaaaaaggcattggacacacgactgggaaacctctccatttcaaaggatgcccttttcatcgaagtatgtgtaaattttcttaatcttgttattcttcatacagacaagtcctgttctttaggayttggggaagaaaacactaagtaggaagtgaagcttaaaaagtactattagcgtccatgtctgaggcagtaacgcagtttcgtaaaggttaggctgtgcgaggtggaattacttatggtactaaggtttatctatagagaaatggactcccctagctttacccatcctctcattctccttcactctaagatgatttgattgagaaaggaaggccgtagtcaaccaaccttaggtagcttcattgcctggtgacaaaaaagttatgcatagaccgggcgcagtggctcacgcctgtaatcccagcactttgggaggctgaggcgggtgaatcacgagrtcaggagatcgagaccatcttggctaacgcggtgaaaccccgtctctactaaaaatacaaaaaataagccgggtgtggtggtgggcgcctgtagtcccagctactcgggaggctgaggcagtagaatggcatgaactcagaaggtggagcttgcagtgagccgagatcacgccactgcactccatcctgggcgacagagtgagactctgcctcaaacaaacaaacaaacaaacaaacaaaaaaadgcataatttttgggcctgagtgcttgggaaggcagcagatttgaagattcagtgttttgggcacatgggtgatagtgtggtcaaaatatgccatttcatactgcttattacactttgtaatgaatcatacttttgtttagtgataatggttctcccaatagactgcaggctctatgagttcaagaactgtatgttttcaccattttgtttttggcatctaatacagttattgagtaagaactcagtaagtatttgtttaataaataggcaaataagcaataatcacaagagcaacattttttaaacgatttattaagaaaaaattaactttttaaaaatatttaaaatgtttactttcatgtttaataaaaacttgaaatatgctaataaactatatgcagaaaatatttaacatagcaagtgtgagactgctatctttagaaaggtctgcctgcaagagtagcacttgtttggagtctgggaacttgacacttgtaccatttcctaaatagtaatggtgatttactatgcctagcctatttgtacaaacatgaatgtgtgctctcttttggggagtctggaattttggtacatgctaggtagagtgtgcccaataaataccttgggtgctgrgtctctaattggctctcctgggcagaaatactgtgtacatgttgctgcatttttgttgctgggggaagtgtgtgttctgtagcacttcatgggacggagaaagcataaggaagcctgcacatggatttttccagactctgcctgtgtctttcccgtcatctcgctgtgtatccttaccactgtgatccaaccacatactgatttgtgtgagctctagggttctctgaacatgaaagcaatcttggtaacctttgacacaaagtgatatatttgctgaaaattttccattagggtagaacaaatctactgggaatcattggtctgtattcagcagacattattgagtaactaatatgtactatgtgtacatgcacatagttataaggatgtaaaacaatacagttggtgtacttaaggagatcattgctggaaggggcagatcataatgccatatgttatgtaggcagagtcaagatactatgggagaaaaattaggacatacagcttagggatttcagtgacagttttataggggaggtatcatttgaaccgattttctgaatgttagcagggatcaggcagtgaaaataggttggattcagatggtgaaaagcctgaagcgtttggagttgcggagacgggtggggagggacaaacaggagagagacatgactagagtcatgcactacaaagttgtcttacgtacgtatccattagtaagcattgctaaaggcatccatgtctcagtcactaatagccattttccttttttgtagttattaagaaatttatgattcagggtggagacttctcaaatcagaatgggacaggtggagaaagtatttatggtgaaaaatttgaagatgaaaatttccattacaaggtaaagtagagaaaatgcatgttattgctgataaaaagattgttatatatctggaatacttgttggattaagacaccaaaaaatgtttcaagtgtgcttagattctccatttcttgtaataggaatcacttttgtaaataatggttctttaatatggaaaagttttcattcagtaatgattaattcagcattatttcattgtgatccagtttttatatgcttcagttaagccagtgagtttttaaatgcgaccagcatctggcaaaattgtttccaggaaaaatgtttccattgttggaaggatggtaacttgtgcatccttatccttgaatttgaagagcaacaaaaccatcactaatatccaggatgtcaggggatttgcacactagcagatatagttaaatgtccaagctcctaaaggacttcagtggtgcctgtgccttcttgtcttcgttgtcccaagatgtaattggggtatattgcatcattcaagttataagaatggacatgtaagtacaaaagtaaagtgatatttttggaaataaggaatatgagcaagggtattaggataatttgaaaaaatgtcgtcagtcttccagtcagtgtttattgagccactatcactggcaccaaagggtttataaaaatgaaaggccttgatgacaaggaatttataatcctacctcagagacaagattaagatacatgggactactggagaataatagtatataaataaatgctaaattgattgaatatccttgcttgtataacattgctaatactgtctatatactgcaggagaaagatgtgatttatgcagtctgaattattatggaagtcattgaggaggaatggctacttgggctgtgcagactgggtcttgcaaggcggcaacatgtctgagatttggttaggcaggaactgtagtattgatgcagaatttaaaaagggacgtcggtgaggaaagacaaaggcaagagacgttgaggaaataaagttctagttactgttgtaccaaaggaagctaccagaaggatgaaaactaaaggtgatgtgatgatcacattgacatagagaaaaggggcctatagacaagacacatgattcttgctttctataaacgtggtggccttaaaatctgaatttgatttagactgaggggagtaaaaggcattttggtggggtggggggtgtcatgaaacattatataacatgagagttacggtgcatgcaccaacaaggaatacatttagaaagcctaggagataaagtgaaaaggttaagaaattgggtttcatagatcctttgacaggattatgccaaggtagaattttgatttcaagatgtatgcagcagtttcttttgagcactctccgaagaggtgattcatctgggatgaaaacctaatccaaatcctgtatgatttggattcttttgagattaggaaagtaccaaactgaatgtcttgggtaaattcagtatcccattattgttccagtttattgatgttttgtaaaggaagacttatactgtaggcatatttatgaatttggaagaccgttcaggtcttcccagaaaaaaagagcattcatcataaagagggcaaaatatattacaagagtttcataatgctgcatcttcattttaaaggtgaagtgtaagtattttctcatggccaatttagaaataaccctccccccgactattgtttctgttacctatttactttgataaggttttttaaagtttaaagtgattaagtgccccatgttttgtgaattaaaggttgcagtttataaaaaaataaaaagtaattaaaaaattttataagtgaraagtaaaaaaaagtagtttgatctaaatggtagtatagtgcaccccagttttatgttcagtaaaagaacagttcagactaacacacaattcagaaaagaacacatctaaccttggttttcttttaatttttatttctacagcatgatcgggagggtttactgagcatggcaaatgcaggccgcaacacaaacggttctcagttttttatcacaacagttccaactcctcatttggatgggaaacatgtggtgtttggccaagtaattaaaggaataggagtggcaaggatattggaaaatgtggaagtgaaaggtgaaaaacctgctaaagtaagtaaaaagttacagtgaaatacacttattatcttagttgctatctttttgagacggagtctcgatctgttccaggctggagtgcagtggtgcggtctcggctcactgcagcctctgtctcccrggttcaagctattctcctgcctcagccttctgagtagcaggkattacaggcgcgcgctacaacacccggctaattttttctgtatttttaatagagacggggtttcaccatgttggccaggctggtctcaaactcctgaccttgtgatcygcccacctcggcctcccaaagtgctgggattacaggcatgagccaccgcacccagcctgttagttgctatcttaaagaaatataagtaaaaggatcaggtgattattagctggaaaaatgttataataattttgggtataggagccaggatctgccacttttttttttttttttttaacttttctacaatgggaaagacaattagggtagttttaaaggagatttttattatttcaactttcatttggtgatctttgctagtttacgttaagtcttcctatacctgcaaaactgttcagttggtatgtatagtagtacatagtggaatgaggataataagcccaaaatcttgtctggattgtagcattaactagaggcttggccttgactttgttacttaacttttccacacgtgttttctcctgtctaaattacttatgggtttagactagattatctctgaagacccttgtgtacttaatgtctgtgaatcaaaatgaccttaatattggctgggcatggtagctcatgcttgtaatcccagcactttgggaggctgaggtgggaggatcacttgagaccaggagttggaaaccagctttggcaacatagtgagatgctgtctctattaaaaaaaaaagaaaaaaagaaaaacccctaaacgaccataatactacccagcctaagtgacagggttgtgagtgggagttggaagctcagttacttgtaggaggtaggctgtcactcagtgtatgacaagaatagtagtaaaccggaagctcatgccccacctaatgccacttacatagacaatgataaaattgccaacttattctgtgtttattgagctcctgaatagcaataaaatgcttatgtaaatactaacattgtcgtattagttggaatgtataaaaacagcattatagtacataaatgagccttctcacataaatctgtgaattggacagtgctgcacatgacttcagctgtatagcttttatctctcattattacgatagtgcacttctacaatttagggttatttttacagttgtgcgttattgcagaatgtggagaattgaaggaaggagatgacgggggaatattcccaaaagatggctctggcgacagtcatccagatttccctgaggatgcggatatagatttaaaagatgtgagtactttcagattagtcaaactttaattaatttagtaagtgaaaatatttagtactaaaagtttgagcttttgtttcagtctctcatatgatagaatctagcattaaaccacattacttactaaaatccaacatatttgtatttttttatacaggtagataaaattttattaataacagaagacttaaaaaacattggaaatacttttttcaaatcccagaaytgggagatggctattaaaaaatatgcagaagttttaaggtaatattatttctaacaaattatttttaagaaattataaattgaattataaactaaaattaagaattgctcattatatttttgcaaattacttgtggaataaccaggtgtgttgaaatagttgcatttccttttttttccctcagcttgttttgagaaatttcaaaagacagaagttgaacgagtagtacataattactcataagttttacttacattcaccaatttttaacttttgctgtttacgtttttacagaactattttgataggaagttgttgatactgtgatactttaccctaagtatttcagcacgtatttcctaagaaacaaagacattctgcataagttcaataccgttaaaacaccccaaagtaatattgatagataatatcaatccatatttaggctgggcatagtggctcatgcctataatcccagcactttgggaggccaagctgggcggatcacctgaggtcgggagttcgagaccagcctggccaatatggtgaaaccccatctctactaaaaatacaaaaattagctgggctggtggcgcacgcctgtaatcccagctacttgggaggctgaggcacaagaattacttgaacccaggaggtggaggttgcagcaagccgagattatgccactgcactccagcctgggcgacagagtgagattctgtctcaaaaaaaaaaaaaaaagtaatccatattccaacttccccagttgtttcaatttcttagaaaaatcaagggtccaaactaagattatgtgttatatttagtggtagtatctcttacgtttcctacctcccctggttttttattcatttgcatttttgtggagtccaagtcagttgtttttatagacttccatctgtatgtgtttgtttccttaagattagtttgaggtgaaatattttggcaagaagacttaggtgttgttttgtattacctatgatatcacatcctgaagacacatttcgctttggcctgtttgagttcacacacatggttaaagtagtgtcagccacaagcatttgttagtctgaggtggtatcgtgaaattgtatgaatttctagtccccaacaacttttcacacagtggatcttagcatcattgaaaatccatgcctgaatctgttatactgaacttctaagtttatcatcgtacagttattaactagcattcttctgtttgcragagcctcccgcatattttttaagtatcactatagacctgtggatatttttcttttctttttttttccttttatagaaacaaggcctcctttatattgcccaggctggtctggaacttttgggcccaagcaatcctccctcctcaccttcccaagtagcagggactagaggatatcttatgggtagttttcaattccgtttgttagtacgctattattgtcattctttttcatgcccaaagggttccaaatttgttcagtggaaggcccctttcctttggcatgttcctattagtctgcgagcacttgcttgctctaagctcatcttgccttactttcagatctgatatggcagtttctccaaggacctctgatttcttttagagaaagaaaactttagaaaccaaattctgggggccaggtgtgctcagttttggggcccttttcagggacaatgcaaaatcaacacaatagagttctccttcatctttcctctactgaattcccttctcctattatgagaatcctggttccaaacataattatgttggaaagtacatagtggggacctgagttttaaaaatagaaaagtgttactagtgcataattagatttgggaattgctcttaaattggcctctttgaacactttggggaacaaaaacaattttttttaagccttcttaaaaattttaaaaagtgtgatcattaagattattaatagcatttttagagctttttatatcagaaatgacataacacttctggacatagagaagagtaattcctgtttatgtggtctttcatactgcttttattaatgcattctgcagatacgtggacagttcaaaggctgttattgagacagcagatagagccaagctgcaacctatagctttaagctgtgtactgaatattggtgcttgtaaactgaagatgtcaaattggcagggagcaattgacagttgtttagaggtaagtctgtttgattttgaactttttgaataagttggattaagacttagtttgaatagtagcaacttttatatacattaatatatcttattgcataggacctaatgaggcttaagaaaacattttgtttctaaatattttggaccctcagttctttctctacattcattttgcttataactctgtgtcacttaacagctatgaagatccttgcctttttttctcaaagcacatatatcagctcatgtattcacttaagagcacctattgtgtgttaggcattagaagacaaagtcagaaatgattaagatgtgggttatggagtcagtcaggcatggcttttttcttcttcttttttttttgagacggagtcttactctgttgcccaggctggagtgcagtggcgcaatctcggcttactgcaacctctgcctcccgggttcaagtgattctcctgcctcatcctcccaagtagctgggattacaggcatgtgccaccatgcccagataatttttgtatttttagtagagacagggtttcaccatgttggccaggctggtctcaaactcctgatctcaggtgatccacccgccttggcctcccaaagtgctaggattacaggtgtgagccaccgtgaagtagttatagagagttatataacacaatgtaaggcatttagtgtagtgcctggcacattttaagcacctaacagagacgagttattttaattaaaagatccataccctcaagaagcttaataagtgattcaggataggagggggtcagtttcaatttaggttcatcaggacttgtgtatggagaatgggttctattggaacaggtcatttatctttaggaggtcatccaggtatgctaactgataaagctagaaaggtggcagttttaccttcctcaaatagagcaattatgactctcttccctgttgtatagtttgaaaagttttccaaatgaaactttaagaattttacatattaagccaggcacctagactagctatgctcagagcaagtagaactaaaatgagatcctaattttgtagggtagatggaataagggataggaatatatttagaagggatcatacaacagaggaaaaaacttatcaaaagaaaagatgggtcttcactctgggtttttttttgttctctgtcacccatgctggagtgcagtgatgcaatcaaagctcactgcagcctcaacctcctgggctcgggtgatcctcctacctcagcctcctaagtagctgggactacaggcccttgccaccatacccagctgatttttaaattttttgtagagatgggtttttgacgtgttgcccaggctggtctcttaactcctgggctcaagctgtccacccgccttggcctcacaaagtgctggtattatagttaagagcctctctgcccagcctcgatctctttttgacctgtgaggcaggtaaaatctgagtattggccattaaaagatgttacataaacaaaagataattttaaaatgtttgttctaggggagagacctgatgcataaagtctcttaggttaaaagacctgttgtaggtaagaacctaggttgggtatggtggttcatgcctgtaattccagcacttagggaggccacggcggcgggcagatcgcttaattccaggagtttgaaaccagcctgggcaacatggtgaaaccctgtctctaaaaaaaaaaaaaaattagtctggtgtggtggcacatacctgtagtcccagctacttggaggctgaggtgggaggagcacttgagcctggggggttgaggcagcagtgagctgtgatcaggccactgcactccagcctgggccacagagtgagaccttgtcttaaaaaaacaaaaaacaaaaacttaagagtttataacttaagagttattaagttattaatgttcctaaaaaacttataattcaagtaaaaagtgtatacaaatgtttcttcaaaatgattttatcttaaaagtgttagttcaggcccattcgggagattgaaaccacagtggggagcatattggaaactagagaaatgtctttctcctccatgtccattcagtgccctctgctracaaaacttagtgcccactggcagaggagagctatttgcatgtttcagctccattttcacagagcagtgaaggatgggtttggagttgataggcaatgaattgaaatctggcatataagcttaatactttgatataaatactagctttatacttttttgtaggctcttgaamtagacccatcaaataccaaagcattgtaccgcagagctcaaggatggcaaggattaaaagaatatgatcaagcattggtaaattttgttccaaatgtttaattttttaaaatagacaactacctttataaatcatacacctaacttaaatgtttttttccaattaaaggctgatcttaagaaagctcaggrgatagcaccagaagataaaggtaagttggcagcttttgtagtgaaagttaattttgttatttaaatacttatcctcaggaaccattgttcactttgccagattttagatgtttgttcaacagacactacagaatgcctgctgttgggccaggcattatcatatagcaatgaacaagacagtcaaagtccctgccctcaaagagcttacattctactcccattcaagaatatagtagtttttcacgttatttattcttcaagttatcatctctgtagttttttatatgtctaaatactgtttgtcttatggtatcctttgagactgtgttcctattctggttagtctagtcgagagctcagcattgtaagacacagtattcatggtaaatttaacatttgggaccattcaagttgaatgtggctataaccttagtattgatgtactggttatatgttttaggaaactatgacaaaaataagcttgtttttcaaataaaccaactatgaatagtgacactagatctgggtattacaaaatgtctttggtctcttattactaaaatgaaacaagggaagcaattactgttctctaatgtagaggcagaaggcaaatcttgatgtacttgagttctctcagttgacatcctctaaaattacgtttcatttctgtgtttgtgtgattgctcagattttctgttactagggcttagttactttgtagagaagttttttcaaggggtagttaacattaaaatagtttgttagtcaccataattttttggatattttgagaaataactcacattgcatatttattttacagctatccaggcagaattgctgaaagtcaaacaaaagataaaggcacagaaagataaagagaaggcagtatatgcaaaaatgtttgcttagaaaggattcagttttgcttattgtgtgttgattgtataaatgcaataagaaaatgtaaaggtttttgtctrtgaatatgatccctaatgtgtttcttttgacaccttagttccttactgtttacagtttaggagtactgataggggttcatgcttaataaacatgtcacaatacagtaagtaaagtggttttgtttgtttctttgagatggagtcttgctctgtcacccaggctggagtgcggtggcgcaatctcggctcactgcatcctctgcctcccgggttcaagcaattctcctgcctcagcttcccaagtagctgggattacaggcacgtgccaccacgcccagctaatttttgtatttttagtagagatggggtttcaccatattggtcacgtcacgttggtcttgaactcctgaccttgtgatccaccccgccttggcctcccaaagtgctgggattacaggtgtgagccaccgtgcccggccaagtaaaatgttttttaaaatggttatgtgcattattcataaaaaataatggtgtccagtctttttaaacttgtaaagacacatcttattgaataaagagatgagagcttaagtttgtatattgtttccttcgattctttgatgtatccatggtggatgatgctaggttttcatacttatagataatacacacacacacacacacacaaacttgttcagggatgggcatacttyttctgcaagggccagatcataaagtttttaggctttgtagaccatgtaatgtcacacccactcamctgcacagttgtaattcaaaattagccatagacaatgtgtaaccaatgggtatggctgtgtttcaataaaactttagtctagaatatatattcatttttatatttgattacttaactttggcaagtcaaatgtaaagtccagtagtgaattttgctcttggtactgaatctctgaagaactgaagaggtaggaagatgctgcattcttataaaggttatttaaaagcaatacccgtaatttctttatgggacaatcttacatatagtataaaatttttatttgataatcattttgtgactattctgttcagtaatatgcagaaagacattctgaaatctgttaatctctaaacattttaacgttagcttgccatacttgaaagaaactggctagctgcagtttacattccattgtaagcaggtcctcctccaccttcaggtaccacccagttaatattctgacttggatctttaatatcacatgttttacaatgtacacagttctgagcatttatctgtaaccgaaatccatcaccttgttccacaggtacaaattcataaactcctgaaaagtaaaaataaataatattgaagtgcctaactttaaaaaatttttaaattcaaaagtaaaaattaaggaaagagtagccacagaaaccttaaaggttgctttctgaatgcttacccatagagattatgaagaccttggtgcattgctattgatgtgagtgtaaattacatgtacataataaaaggaggtacagcggtattcagctgagttgtctcactatcaagggtactcgacactgagtgtttgagttccacacaacctcgaagtcctcccttattcacagtcatcctctcattcacaggggacaagttccaagatccccagtagacgcctgaaacctcaggtagtactcaacttagattgtcagtcagaacacgtttctgttcatgtatttcacccacaaatgtgatgccttttccatcttaaggaagcacttgccacactctggccataacttctacagttcgaggtccaacagcaaaacgcacaaatttctttttcctctttcacagaagatacagtcttaccatagaccttagcaacctcagcataggatttttttctctttatagagaactttctcctttcacttaaaggaagcactttatggcatctctgaattgtcagcatcactactcttgcgttgtggggatatttctaaagggttactggacacaagtatgataatgtgacagtaaatctgataacttagatggctaccaagtaacataacgaatgttaggtgtgaatatgctggacaaagggataattcacattcagggtggggcaagcccgaatggtacacaatttaaaacttaacgtgcacaatttaagactcaagaattatttgtttctggaattttcttattttcagaccgtgggtgactgggggtaagaggagcctaacggtacagctaaaaaaccaaatttaacctcagggagttttcaacccactgtaatgacaaaagccaaaagaccaagtcacagtgtatcttcttttgtgaatgtactacttttcgagtatcggaatactattttgttctaccatatcatttgagacctggttcctattactgtaatttcagttgaaagctcagcactgaaagaatattcatggtgaatttaaagtttcagagcattccttggactgaatgtaatcataatgtgctgttctagtacatgcacccaaatacatacagatgagctgccatgacagaaatgactttaaatagtcacatgaacctgcaaagagaggtatttcattttcaagaatcttcatcttagtctgagtgtagacaaagggctttttttttttttttgagaaatgttatctgaactaggcttaacaaaaccagtagttaaaagtatgtttcctaaaggaagctggatgaagtcatttacaatttctaaggaatggaaggagatacagaaatcattttttaaaagaacaaaatcacattcctaaaatgtttaaagcaaatatttaggaatagatggaaattattacctgcaggacagaatcgctgctcgggcccatcatatatcgacagatttctatttacaggtatactgtcatcccttaaggttaagtgtgccggctggtcatgttcatgattagtaccactcagagccacagatgacaagaggtcaaaactgatctgtccatcgggttttggatactcaataggtgtgcaatccttggctggcttgagccgttcaaagtcagaaccttcaacaattttgagggaaatgcttaacaaaatatgattttgaagtactttttcttaagcctatttgtataaaaacttcaaaatattatcacaccaaagaaatatgactagccctcaagtaataatatactgttcttagacactaaatttataatttctccaagttgaaaacattaaaacaatcactttctctaattaacagatcccattcatgaatttttaatgatcatgtcactcatactcttgtttgaattacctttatgtttcagagtccacggctccattcctctcaatatccagtaaaagattccagtgtaaatcatccctccatatacacccagtactccgtggcaggacggtcttatatttctaacagaatatagctctttccatacccatgagttcttcaaattgtcctcatattcagttacatggagtccttttattaaannnnnnnnnnnnnnnnnnnntgcgaaactgcccaaatgtgtgtaaaatacgctaagtattttgctactttgatagctgatgagtgaagtttttcttttttcgagacaaggtcttgctctgtcacccaggttggagtacagtggtgtgatcatggctcactgcaacctccacctcctagattcaagccatcctcccacctcagcctcctgagtaggtgggaccagaggcacacgccaccacaccctactaacttttgtgtttttggtagaaagagggttttgccatgttgcccaggctggtcttgaactgctgggctcaagtgatatgcccgcctcagcctcccaaagtgctgggatcacaggcatgagccaccgcacctggctgatgagtgaatcttaagtaattttttaaaacatggtccacagtgaaggctctttcatgtataaatgttggcatcttccaaaaagacaaccattagatatagatatgttattaacaggcagtaaggcatttgatttcttacattggtagcatggaaaattagtttcaaattttagtgaaaccgagaaagaagctttaagataaaaagttcatgctacctgtaagagtgaagaaatttcataatttacaactcaaactatttctacctgctatgggttgaaatatgtccccccaaaataggttttgaagtcctaacctccagtaccttagactgtgaccttattagtggctgtagatataattagttaagaagaggtctactacagtacagtgggtctctaatccaatatggctggtatccttagaagaagggacagaactgggcacagtggctctagcctgtaatttccagctacttgggaggccaaagtgggaggactgcttgagccaaggaatttgagattgcagagaccaaggattgcagcactgcactccagcttgggcaacagagagagaccctgtctctaaaaacaaaaacaaacccaccacttcatagagaaaacttggtgcatgcacttaataaagaggacaaattggttcccttacggcttttggtggactccacatgactactttttccagtcattgtttcctgttctggctccactccccttttctttaggctttaaccctcaatctagtctttggtgatatactggctccagtattatctatgtgtggtactatatacacatgatacagttcaagtatggctggtggtccaacaaggaacgatacttgacaagaaaattagaaaaaaacttctacccagccactgcactccatcttggctattccattctccctgaagtagtaccctttgccctttctgttttccacttcatctccccacgctaggcctccattcctacaaagatttgaaggcataacctggttacatacctctaactagaggaacatttactggggattctaagaattaagactcatttatcaaatatctatggagtcgctaccgtgtgccaggtatgtaggattcacactaagcaatacctctagtctcggagttttcatccaagtggcagaagacaaaagttgataaacaagtaagtaatataatgtaccaaaaggtggaaaatgcgctagaaaaggccatgcagggggaactgggtgtgtgctgtgtgttgtgcattaattggtgtggtcaaggcagggccactgtgagtgctatttaaacaaagggaaagagaacaaaggagccagccgtgagcaaagaccatgaggtgggagtgcttggcatgttctgggaactgtaaagaagccagtgtggctggagttggtaaagggtctttttagattaaagctttacggaggtataagtgctggctgtttctctccaccacagcagaagagtcataggcctatacttacaaagcttgctaaagaataggtagctaattctgccttttgtaaaggtgtttgttctattgatacttaggtatttgggaggtatcttaattgtgtgtattacatgtatgcaatataaatgcagtactgtcatatttgtaatagtttctaactaggtgggacaccactggttcttttcttttttgtgtgtgggggatggagttttgctcttgttgcccaggctggagtgcaatggcacgatctcagctcactgcaacctccacctcccaggttcaagtgattcttctgcctcagcctcccaagtagctgggattacaggcacccgccaccacacacagctaatttttttgtatttttagtagagacggggtttcaccatgtgggccaggctagtctcgagctcctgacttcagatgatccacccgcctcagcctaccaaagtgctgggattacaggcgtgagccaccgtggctggctaccactggtacttttctacttttttgatgtgaataaaacagaacattacagtaaaaaatcactgactgtaattattgagaataagccatgtagttttctttgcatagcatgcttattaatactttctataaagtgacagatgcaatacaaatcttttaatgtcaattgaaatacacataacccagcaattttcttttgtatactttacacaggaatttcttacctattgtctttgattggagattttcactagttagttgattaaaaatagattctgctgctaaaattccacttttcattgctgtgtgagtacctttgatcttgggaacattcataaaaccaggactacaaccaattagtaaaccaccaggaaaggtgagttttggtatagactgaggaaacaaagattcagaatacatttgttagttcatattaaacaagaacaacagaatactccaaatcagtcttaaagtattctagagctgtagggaaaggctgaaaaataaatacatgaaaatgaattgagcaaaggaataaaacagagcaagggcagttttcttcttcctgccctaagagtgaggattaagactattactatttttctgtgagagtttttctttttccatcctcataactgatctacatgggacagatttatgactgaagcatcaatatgttttaaatagaatgttttatttacacatatccatgtcatagttaaaatattctctaaacctgaatgctgttatctaaattgtgatttgcttgcaaatcaaaaccacaatgagataccatttcaccctagttagaatggctattatcaaaaagacaaaaaacttactggtgaggatgtgggaaaaagaaaactcacacattgttggtgggaat

SEQ ID NO: 93364 - DNA, 34264 bp, Homo sapiens
agccgcaccagcggggttggcaaggaacgcatcccaccattcgcggcagctgctgcaacgctggaggtccaggtgaggctggggaagtcgccggcctcgcccaacgtggcagggaggggccgggaggagcggccggcggactcagccggcgggatgggccagcgcgccttcatccccctccccgcccccagacctaccatggaactcgaagtggccgatgcgctggccctgggcgtcctgggccgcggtgctgctgaagctgccccgcagggtcttaccctggctgccctgcggccaccagcagcacgtgagggccacagccagcagccgcagcccccccatgcccgtctccaggtctgcaccgacgcctcggctcccagccgccggcggctgcccgccccacgtcggcagctgggggaggcggggtgggcgccggagacctgctgctctggagcctgagagccaatgaggcgggctcctctgccataagccraagacattcaccagtcagaggccgaaatgggcgggacgcgcagatcctagcgtcccatcagtccccggcttttgactagttcccgcctttttctttaatgaggaatcaggcggatgttgcttcaggttacggaaaactcatctccctcctcattgcctagcacgtcttgctactgagcatgcgcgggcgcgctggcacgagtccgcggggccttcgaagggcttgtgggattcggaaaaaacttaagaaatgcaggacaggactgtttctggccgagagagttaaactcccgcaaagaaaaaactgtgttcttatgcagattttcttccttggcgcctgtataacctacaggacgtgtccgatttaatgtctcaaagacacttagctccgcatgaccacaatttaacgcatgccttctcttggcatctccagccgatttttccctcctaggttctctggcttctcgaattacattacccccacccccacccccgcccgcagaccagaccgctgggaattgtaggcccccccccccccgcaattcaatcaattcaataacaagtgtggattagcccttcttctggtgagggtgggaagcagcggccacagtcctactcagttcatcactttgttggcctatggcaaagaccgtctctacagtcttcattctaattggctacaatccatctctaccctacagccacagaaagctgtaggaaacaatttgctgcacttgccttgaaaggttctcaattgcctttagcacacaacccaaactctagaatatggctcttcaactctcaaatgtctgttttttctcatctccatccttaccgccgttggtttcctgaacactcccaagttctcccttctaggcctatatcactccctgatccctctggctggaatacttctgcttattccaacactggacctcctcaccttccttttcctcctttactcctccttcccaaggcactttaagaagcctttctcaaacccctaagtctgtagtagatgcccctggaaccagaatcccttacttccctaccagagcactcacgcactgtactgtaagtatccattcatgtgtctgaaatctccgcctctattgtcagctccagctggtcagtgactacactttttttttttttgagacggagtttcactcttgttgctcagactggagtgcaatggcgcgatctcggctcacctcaacctctgcctcccggattcaagcgattatcccacctcagcctcccgagaagctgggactgcaggcatgcgccaccatgcccgactaattttttatttttagtagagatgggatttctccatgttgatcagactggtcccaaactcccgacctcaggtgatctgcccgccttggcctcccaaagtgctgggattacaggcgtaagccaccttgctggctatacctgtcttaatgaaagtgaggcaggagaatagggcctggggtgagggaacctaaggcgtttttacaccgactttctagaactattaaaggaaaaccctaactttccaccctaagtaacaaaaggaccagaggctatgccctttgcaaatccccaccttttctgtgaggcagataagaaattggctgtccctacccagtcagactgattgccagctgagtcttcgtttgcatagaagtgcaactttgtaactctgtaacattgctttttgcaaccaatcagatgtttgcacaggagtgtgacctttgtaactccacttcagcctctgattcattgctttccccaagaatcagacctattgggggccaccacttcatttatatgaggtgagctccaagtggccaatgggaaacttctagggagtatttggacccaagatgattatgtgtccaggcccttctgcgctgtgtagttgcattttctttttttgagacagagtatcactctgtcactcaggctggagtgcagtggcacaatctcggctcactgcaacctccgcctcccaggttcaagtgattctcctgcctcagcttccagctggaattacaggtgcacaccaccacacctggctaattttggatttttagcagagacggggtttcactatgtcgaccaggctggtctcgaactcctgacctcaagagatccacccaccttggcctcccaaagtgctgggattacaggtgtgagccatcacgcccggccatgtactttcattttcaataaatccctgctttcgttctttcgttgcttcattcttttgttgcttcattcttgccttgctttgctgtgcattttgtccaattctttgttcaaaatgccaagaaactggacaacttgcagtcaagaccctccactggtaacaaaagtaggagctcaaaattatttcatgaataaatgtatataaattattttcatttaacaacaagcttctataacatataaggaagttctcataacagacctcatcatttagaaaaaaaaaatattgaggaaccacctcctaccatatacacagcattttcaatatttctggctgaccaggaatatgctggaagtattaatattttcggatttttaaaaaaaaaactgcggccgggcgcggtggctcacgcctgtaatcccagcactttgggaggccaaggcgggtggatcatgaggtcaggagatcgagaccatcctggctaacaaggtgaaaccccgtctctactaaaaatacaaaaaattagccgggcgcggtggcgggcgcctgtagtcccagctactggggaggctgaggcaggagaatggcgtgaacccgggaagcggagcttgcagtgagccgagattgcgccactgcagtccgcagtccggcctgggcgacagagcgagactccgtctcaaaaaaaaaaaaaaaaaaaaaaaaaaaactgcaaggattctttattatgcaagtaatccatgtgtctcagaaaaaaattcacagtcaaaagtatataaagtgggctgggcgcagtggctcacgtctgtaatcccagcactttgggaagtgaggtgggtggatcacctgaggtcaggagttcaagaccagcctggccaacatggtgaaaactcatctctactaaaaatacaaaaactagccaggtgtggtagcatgcgcctgtaatcccagctacttggaggctgagatgggagaatcgcttgaacctgggaagcagaggttgcagtgagtcaagattgtggcactgcactccaggctgggcaacagagcgagactgtctcaaaaaaacaaaagtatataaagtaaaaattaaactccccatttcctcctttccctgcccatatctcatccctaaaggtaacttattttaagagtttagggtcaatcctttcaagtaagccacaaataccacaaatatatgtggtattacaaataccacaaatatatgtggtatttgtaaaccaaggacaggaataaaactggtcctgaagagaaatcataacacaggccttgaatgttaggcctttcctatcttttctttcttctcaatcaactttgtttttctcactgtgaagacaggctttctggctcctcactttgaaagaacatggccaccaaaaagttccagctttgtaggacctcagagttcaagtagagtaaccagactatactagcaccttagtcgaattctaaatcccaagaagaggcttcagttggcctagagtcagccagatttcattctgtggcctgcctgggtcaacttggggagatcataaaggacagtggggggaggagtctggtcagaaaaaaactgtacgtatcgactgcaatatattttggtcttcattccatgttggtatattctttttaaaggctatatagcagtttactgcattttaaaagttagaagacattatacacatttagattatttccagtgtttcattattgtaagcaatacagcaatgaacaattatctatattatacatcatggaatttgagggggtcatagaatatgaacatttgaaattttcatatgttttaccactttgccttgtaaaaaggttgtggtatgattcttccacatatacacctgtactggatgtttccattcgttttcagctttgccaaacattatggtggggaaaaaaagatatttatctattcgacaatatttaatggtcatttattctgtgccaagtctctaaggacatgcgattacagcagaaaacaaaacaaagcccctgacctcatggaacactaaacagagggcagtgacatcaatgtaaatgttgagtgctaggaagaaaaataaagaaggataagatgattcggcagggttgggcagagctcgctattttaattgtggtggtcaataggatgccattcaagctgaaaacggaagtaagggtaaaaactaggcagacatctggggaaagacaatcaaggtcccggggaagtagcatgcctggcacattgaatgaagagcaaggagggtggggaggctggggcggagtgagcaaaggagagaatagaataagacatcagcgtaggacctagggaatatctttatcatgattgcaagccttctgcgctgtctgtaataataatattattattttttgagacggagttttgctgttgttgcccaggctggagtgcgatggtgcggtctcggctcactgcaacctctgccttccgggttcaagcaattctcctgcctcggcctcccaagtagctgggattacaggcgcccgccaccacgcccggctaatttttgtatttttagtagagacagggtttcaccatgttggccaagctggtctcgaatcctgacctcaggtgatccgcccacctcggcctcccaaagtcctgggattacaggcgtaagccacggcgcccggcctgaaataatattaacaacagcaaaagatcattttgcaggccaggcacggtgctcacgcctgtaatcccaggaccttgggaggctgaggcgggaggttggctagatcccaggagttcgagaccagcctggacaacagggcgaaacccatctctaccaaaaattaggcgggcgtggtggcgcacgactgtattcctagctactcaggaggctgaggtgggaggattgcttgagccccattggtcgacgctgcagtgagccgtgatcgcaccactgcactccagcctgggtaacagagggagaccctgtccccgccccactaaaaaaaaaaatcatttttaaattgcaacctcccatctccatctgcaacaactccccgttctcagctcaactgataggtaacctctagagatggctgtagtacaagaatgaaaaaaggtactcattcataaatctgatccatagtggtggcatttccgggaaaaacgttccatacccctaccatccgggcgaccccaattgcacctggcggaccaggcaagggcggaaaggagcagcgcctgcgcgtggtgagcgcggccccrcccagcccgctagtgggcgggcagaaactggccacagagcagtctccggaagctgcctctggctgctctgttaacgtgtcccgcgagcgaggcgcgtcgcaaaaggtcgcggcggaacttccctgcgcttttcagaccmtactctttacggtactaggcactgctgagctgggagatgtcggcggcgtgttgggaggaaccgtggggtcttcccggcrgctttgcgaagcgggtcctggtgaccggcggtgctggtttcatgtaggtaatggcgccrctagccaagcagtggctccccagaaacccctaccttttcccgcagctctgcttgccctaggtaatttgggtccagctttgaggggtccttattctgatatggggagggtcctaatgcacgacctggaccagcttttctctctctggcctgcaaagaagtggttcctttgaaactgacttmtttaaaacgcctcttccaaagctgcgttactctccgcccttctgtggccggaggtgctcaccatgtcactccttgagtgcgtgcaagttaccctaagctgctcaccgactgcttcccacctccagcctagagcacccacaccccacgatgggccctgtacatataggcacccccaaaacgatttaaggactataataggacatctatgtaatcagcaaacttttacaaatccactgttgacacccttttcttcctcagacccacattcgagcagcaagtcctctctacttccaaagtatatccttacggcgaccacttctcaccagtttcccgtttccaccctagcccatgtttactgtcatcttttgcctcgactgctgctgtagcctcttggttggccataactgcgtccactcatgttcctttaaagcctgttgctcacatacaagtcagtgtttcttaagtcaatcagatcatggtagragcaggattttacttcagtggttcctgccacacttaagaataaagcccaaactctaccatatctagaaaactcaagtgcccaagccctacttttgcaacctgatctgcttttctgtacctgccatgcttcccctcttagttcttggaacacaccaagatacacacttctgtcttgaggcctttgcacttgcttcccctttccttaggctgtttgcaccactcaattctggtttttattcagatagcacctcagagagttcttacctgaccaccatatctaaaatagcccctctcccaactagcacacttaacctctacctgaaattatattgcggatttgtgtctgcttgtttattgcttgtatccccactctaaaatgcaaactcggtaaggacagagactactgttcattcagcacctggaagaatgcctggcccattctatataagtctttagtaattgtggaatggatgaatgcaagagtaataaacaggaaactctcctatcctcccctcaaggaactcagtggctagtggaagaagtgggaatgtgaggattcctgtttatggccatttgcacattaaatcaccccttctaatccgacaagtcatttgggggagagcatcaggctggcaagtttcacttaatgagaaagaggactatggacatgaaagggtgatacttgtgtgagagtgcgggtccaggaagggtgcgacttagaaagtgctgtgaaaggaatgccraatacaaacttcaagttcataatttggtcaagggctcccctctcctgggagcccaacattttaagtatacatggtaaatctggtagatcatttcactgagatatgcctgtgattcccctttagggtcctctgaagcccaggacccactgtggatatccaactcagaatggtttcagctgttattagcctgggaatcctgggtttagtctagaagcctcctgaggattctggtttaacattaccaaaatcttataccaagaaatagcaattgcagaagttactattaaatatagacaactgactatactcatagtaatttcatttttacatacttatatctgcagttcctgaaaaggcatgctataggcatgtacagttgtgctgactagctcccatttattgttccactttactcgatacttgtacctgtatggatggcatcrtttggttaaactgacttttttccctatacccagaaccagtacattctctcttctgcatagtctaaatggaatgtaaaacttttgtttatagatactgttgagaagtttggtaaaaagtttgcatgtgtgtatatttagtgtagttatgttttctgttatcttagaaaaaattaaagttatctttgagtattttcctagtactcaacaccttaggaaaatattcaagagtttaggraagttaaagtttttcactaacaagatatactttttttccatagtgcatcacatatgattgtctctttagtggaagattatccaaactatatgatcataaatctagacaaggtgagttttataaaaatgagcatcatgcactgaaattacatttcaatttatgttttctaaaagtactagaatcttgtcatgctgatatttaaattttttatttagtcattttagcaattcagaggctctgtatagtaatgtgctcatgctgtatttaatcttatataaaagtttttgaaacctgcatttcttatgttggtccacaaaataaagtttttgttttattttgtttttttcagttgctactttgcaaatggactttttggattttcattcaaaaaaactataagaaaaattcataaggcaatttggtgattataagccttaattggattttttttctattttttaattgacatatcttagttgtacttgttatggggcatatggtgatgttttgatacatgtatacaatgtgtaatgatcaaatcagggtaattgggacatccatcataagaagaacccttaactcttatgaagctttgcctgacttgctattatggacaggaattttttctgtatcaccaatataccaacagtttgaggaataggtataatgaattataatatgtataacacaggtgtaattattttcaatcactaattccttttctgtaagaaatggtaaacttttctagccaccagtggctacaggcaaattttggcatgaacatttttttttttctttgaaatggactctcactctgttgccaggctggagtgcagtggcacaatctcagctcactgcaacctccacctcctgggttcaagcgattctcctgccccagcctcctgagtagctgggattacaggcacatgccaccaagcccagctaaattttgtatttttagtagagatggggtttcacgatgttggccaggatggtctcaatctcttcacctgtggtccgccctcctcagtctcccaaagtgctgggattacaggcatgagccaccacccccagctaggaacattttttaaagtagagatttatgaaaaggtttttgttttgttttgttttttggtactttgaaaaggtaacaattacttgttttttacttttaagatgtcagaaacttaaaatgtgtaaaaacaggctgggctcacgcttgtaatcccagcactttgggaggctgaggcaggcggatcacaaggtcaggaggtcaaaaccatcctggctaacatggtgaaaccctgcctctactacaaaatacaaaaaattagccggtccatggtggcgggtgcctgtagtcccaggtacttgggaggctgaggcaggagaatggcgtgaacctgggaggcggagcttgtgctgagcagagattgcgccactgcactacagcctgggcaacagagtgagactccgtctcaaaaaaaaagtagtgtaaagacagggagcaaacacactttaagaggacatgttcttgtattgtaaccagtaacatctgtagtctttaaaataaattggtatttgattggaaaagctaatgtcactttttgtgttgccccttctgtgctctcttctttcaagctggattactgtgcaagcttgaagaatcttgaaaccatttctaacaaacagaactacaaatttatacaggtatgaacattttcttgtaactgtaccgtgcctctttagtcatgcagagattatagtatctttgtactttacaaacttgtgtaatgtgggcttgaaaagaacactaattaaagaccttttaaaagatcaggtagttaatttccaaaagtaccatgtgctctagaggatactacttttgattgacaacacataaaaagctacatgtgatttttggtacctttgagatctaccagtagctgactgaattcacatggtttgtattttagttcctccctagtctttccctatgaaggttgattgactctggaagtctcacttttagacaagtccaaagtataagccacaggaccagttcattaatttgcaaagggaaatgttattgtcaaatgaaactatttaacttatgtgttttttaaagttattctataaactctctttttaactacaaaacttaaagaatatactaacaaccatttcataattctattctgtgtgaaagtgttttcttcagctactgaagaattgtcgagaatacatatttttagaataattaaatgtacatataaacattagaagtaccataattttacttaattgtgataaaatgtgttttcaaaatatcattccagttgttacagtatattttttcgagacagagtctgctctgtcacccaggctggagtgcagtggcgtgatctcagctcactgcgacccctgcctccggggttcaagcaattctcctgcttcagcctcccgactagctgggattacaggcgcctgctaccatgcccagctaattttcatatttttagtagagatggagtttcaccatgttggccaggctggtcacaaactctggagctcaagtgatctgcccgcctcaacttgcacctcactttggtgcagggattacaggcgtgagccaccacacccagcctaagatatattttaataatggttatctgaaaggttttttaaaaagtgctaaaaaaagttttgtattaatatagtggccttgggttggcaaaaatgttgcggacaacactagcatggtacttagtagttgttggtgctcattaaaatattatttggaaaaatagtttgaattgaatatctaatatcctaagatgctggagaaatacatcattggtatccttgtttgagcacttagttgaattttcaaggcattctctattaaacagggaggtgggaggtagggggatgytatagtaaaaatggttatgaatgagagtgctgtatgaaacctaggccctttcatgtttgctttttcatatagggtgacatatgtgattctcactttgtgaaactgctttttgaaacagagaaaatagatatagtactacattttgcygcacaaacacatgtaggtaagcattgttttatgttacagttatgattggcagttctctccccgccctcgcccccctaatacttatatttgaaagaggatatatcatactgtactagaaaaacaagcccacggtgactgtgttatccataaactcagcactttttagatacttttattagcattgcaaggctatattagtgaaatacaaccttgactgctgtctgaaaacttgagtttaaccaattcaggatagtgaaggggagcaacggggagatgggccgtcaactgtattttttatgttgtttttcttaaattttgttgtgggtatgcagatggacattatttatatcattttatgaattttagatattttctaataatttgacagttttattatgaaatataacatattcaaaagcatttagaaatagttaaataatgataatggagtacccatgtatctgtcacctgaacaaaagacagaatgttgctgaatcctcttcagtagtaaatattactgctgcctattaccagatttaaagttataatttcctttgcttttgtctacacttttgttgtctgtatatttatccctwaacaatacagcttaacttagggtgtttttaaatatatgtatatttaatattatatatataaatatacttaatatatgttaaatatatattttatatatatatataatgatatgtagagttttttttgttttttcaaaatcsatgtagattaatccatggagttggatatagatayagtttgtttgttttcagtgtcataatattccagtctaaaaatacatatatacacatacactgtagtagtttacttaatatactttattcttgatggccatttgggttctttacactttggagcaattttgagcactactaccttgaacatgtatcatgatacataagtatacattacatttggctatataacagatcataagatctgcatacttcacgttgagataatgtcaaaacatgttccaaagtaattataccaacttccactcctccagaagtgtgtgacttcctgttgctccagatatcaccaaatcttagttttgtcagtctttccatttttgccaatttcagtgctgtgtagtggtttctcatgtttctaatttgtattttccctgattactaataagattaagtacttttcatatgattttttgtaatttggatttctcctttatgaaatgctgttgaaatcttttgtccattttggccgggagcggtggctcacgcctgtaatcccagaactttgggaggctgaggcgggtggatcacgaggtcaggaaatcgagaccatcctggctaacacggtgaaaccccttctccactaaaagtacaaaaaattagccgggcgtggtgacaggcgcctgtagtcccaactactcgggaggctgaggcaggagaatggcgtgaacccgggagacagagcttgcagtgagctgagrttgcaccactgcactccagcctgggtgacagagagactccatcttaaaaaaaaaaaaaaagaaatsttttgtccattttaaaatgggattgtttacctttttctcattgaaagagaagtttcaatgagaaaaaatggcaagtagagtttttatatattcaggacactagttctttatcattacatatgttacagagccttctctgtatggcctatcttctcacttttttgacagtgtgttttgatgaacagatgttttcaatgtatgttttttcctttatgcttaatgctttttcagttcttaaattctctcctaccccaaggtcaygaagatgtatttttgtatattatcttttcaaagctttataattttgtcttttatgtttagatttgtaatccatctgaaattaattcttatataaccccaatttcatgtttttccatgtgaataccaattgttcctgtaccatttattgaaaagttcaccagtttctgccctccgtcatatcaagtttatttttgtatctctgtctctcttcatttatttgtctctgcctgtctgattacgcactatattgacgaatacaatgatttcatgtctgttaaagcaagtccttctacttggttaatgataaaagcagttgtgcacttctaccagcaatttatgagatgcttgccaacacttgctgtgtcaattttgtggttttatttttccctgatgaagttaaaaacctttccatttgtttattggactattctccctctctttgttagtatatcctctttggaaaatttccatttaagtttcgtgaccatttcctattaggttgtcagttttttccttatagatttttataagtcctttatgtattttggatccaagccttttgcagctacctttttttcagtctgctttgcctttttgcattctttttttttttttttttttttttttttttgagacagagtctcgctgattgcccaggctggagtgcaatggcatgatctcagctcactgcaacctccgcctcccagattcaagcgattctcctgcctcagcctcctgagtagctgggattacaggcatgcgccaccacgcccagctaattttgtatttttgatagagatggggtttcaccatgttggccaggctggtcttgaactcccaacctcagacgagccaccctcctcaggtgatccacccrtctcagcctcccaaagtgctgggattacaggcgtgagccaccacgcccagccttttcccgttttcaatggtgtcttattattagtgaaagttcttaattacaatgtgggttaatttatctttacctttttctttagggktagtgctctttctgtctcttttttttttttttttttgagatggagtgtcttgctctgtcacccaggctggagtgcagtggcgcaatctcggctcactgcaagctctgcctcctgggttcatgccattctcctgcctcagcctcccgagtagctgggactacaggcgcccgccaccacaccyggctaattttttgtatttttartagagacggggtttcaccgtgttagccaggayggtctcgatctcctgacctcgtgatccacccgcctcagcctcccaaagttctgggattacaggcgtgagccaccgcacccggctctgtcttgattaagaactcatttcccacctccaaggtcatggacatgttgtcttataattcttttcttaaaagttattgtttttccttttacatttagatttcttccccatacccatatcaatttgactcaaaatcatttattgaaaagacttgacttttcctcattgtcagttttgtcatgggtcaaatgtttatatacgtatgcttttgtttctcggctctattcaattctgttggtctttgtctgtgcttatactattatcacactgtcttaattactgtagctttataataattctttataccagcaaagcaaacctcccaccctgttgttccaaaaaacaacatttgacatttgacattgttgttccaaaaaaacaatctttgacattgttgatcttttcttatgcgtgtttgttttctatataatgaatttctggtcttacctttattatttcattatttctactttgtttaggcttactttctattcttttttctaatctttgtgatatatttagcttattaattttcacsttttctctaatgtatgcattttagactataaatttacttctaaatactggtttatctgaatcctacaggttttcatatgtattttttcattatcttttaagagtttgatttcttgctgggtgcagtggctaacacctgtaatcctagcactttgagaggccaaggcaggcgaatcacttgagcccaggagttccagaccagcctgggcaacatggtgagaccctgtctgtacaaaaaataataataaaaaataaagccaggcatgatggcatgtgcctgtagtcccagctacttgggaggctgaggtgagaggatcacttgagcccaagaggtggcggttgcagtgagctgagatcgcacccctgcactccagcccgggcaatagaatgagaccttgtctcaaaaaaaaaaaaaaaaaaaaaaaaataatttgatttcttctctcatccgtgggttacttagacacgtatgtcttaatttccaaacatgtatgggttttcttgttcttatggaattctagcttaattgtatgtgattagataacgtaytctatgattgtagtcctttatgctacgacttgctttttggttcagtatatggtcactttccgtaaatcgtgtgtgtattgaaaagaatgttaacttgcaaacattgggtccattgttctttacacatccattaggttaagttggttaatgatgttctttaaatctcttgtatatttctggtgaattgaaccttttatacttatgaagtgatcttttttccccggtgatgtgtactgctttaaaatctattttgtttgacattaatatagctgtgttacttcctttttggttagtattttcatgatactttttccatctttttatttccaaactttctctagttttatgggttagctgcatgtcttgtaaacaacatgtatttggattttgatttttttaaacccattctgaccmtccyyggcatttgccctcagtgtttagtttgttgctgtatttggatttatttctaccatcttactgtacgctttcttttcccacctgttctgtttccttggttgctgcttactttttttaaaaaaaagaattattcctttgtaaaaaattgtttattttaaaaaactgcttgcttgctttttttaaggatttgactgaggaatttttcttattctctttttctccctctactagtttggaaattatatgttctgtttgtactcttggagtggttactctacaaattacagatgtgtaattagcttatcaaagtgtaaagttcatcaaaacctttgccctcttcctatttaatttccaactccatttttagctatttttaactcagtttttatctggatttttttttttttttttttgagacagagtcttgttctgtcacctaggccagagtgcagtgttgtgatctcggcttactgcaacctctgcctcccaggttcaagcagttctcgtgcttcagcctaccaagtagctgggattacaggcgtgtgccaccacgcccggtttatttttttgtattttgagtagagacggggttttgccatgttggccatactagtctcaaactcctgacctcaggtgatccacccacctgggcctcccaaagtgctgggattacgggcattagccaccatgtcctgcctggaattttaaattgatcttattttattttgtttttttatttccactagatgacattattactattttatatagtcagtagtcattatattaggggtttacaaaatgatatcctaattatgtcattcttcatttatacctggaatatctacataaaaagaagttttccagccaggcgcagtggctcacgcctgtaatcccaacactttgggaggctgaggtaggtggatcacctgaggtcaggmgttcaagaccagcctcgccaacatggtgaaaccccatctctaaaatacaaaaaagttagctgggcrtggtagtgggcacctgtaaccccagctactcgggaggctgagacacaagaatggcttgaatctgggaggcagaggtggcagtgaactgagattgcgccactacactccagcctgggcaacagagagagagagaaaaaaaaaaagttttccttatacattatttggttaccttgagatttaattgttatggaaaagccaggttaagtgcctgattatttttatttatttagtagattttactataatgagttggtttccaagcatcctcatttttcttttttcttaatattgctatgaatttgtagattttaacacatttgattttgtttgttttaatcatttgcagttatttttcttatttatgttcaaaatgactcaccattagccattgagaggctcttctagttgcttcctgagtcctttttgacatgaccttagcagtctttgacaaccatctaactttctggtttgataggatgtttcagttttatcttcartgtttttccccctagatctggaatcagccctttctgtcaggagccattgttccttttggtgggaaatggtgtttagaggccacagtctgggcactgggagtgcttattaactgattggacattgtgtcaaggcttttccagttaacaaaactagggaatattatttgcctatttacttaagattaaatatgacatgggtttatactgaaatgtccaatccgcattgagattttttgtttaagttcttcagtctttcatttatatcatcttttccataccctgaacaccttggttctcaacagcaccatcctaattactcatttactttattccaaaacacacagtgagtccacatttcttcttttaaggacaccaggtagatcggattaggacccatcctaaagacctgattttcacttaatcacctccttaagagccctatctccaaatatagtcacattctgaggttctgggggaaggggttaggccttaagatgaattatggggagaacacagtttagcccataactctgggttagagggaaatgcctatgtaatttgactagatatttccaagtttccttccttagggaattgtaaacattttacatcatcattgtcagtgtacaaagtgtcttttgcctaacagcctcaacaactaagtgatttgtcaactttttgaatttttgccagtctggtaagtaagaagtggtatctctgagtttttaatttgggtttttcttactgtaagtgacattgatcatcgtaatcttaaggacccatttatatttcttcatctaaactgtttatgtctcctacctgttttactataggattgttcttaatttatttaaagttctttataaattgacgatactaaccctttatctctgtaatttcacatggtttttcccagtttgtcatttttgtctttttaatttgtttttagttttttaaccatgcaaaatttttatatggtcaaatttatcatcctcttccattattgcttctggattgtgattcatcattaaggaagttccttccgtttcctggttatagaggttcaattcttttaaggtgaatttatgtttaaataactcattcagcatttattgctttcagcagtaacagattgatcttaaaaagcctatccctgtaattcataattttttttaatttaaaaacattttaaattttcatgtattatttttaaattttcttccttatagaataaaaaactttcctgcaaatttaacattagttttctgggttctgagaatttacatgtactatgtaatttaggtttaaagaaatcataaatatgactgcctgtgtatgttattattataactcttgcagctgtggtaaatgaagaacagtgactagtactctccttaaacctgagyccatcatttggcatttgttttatccgttgggtagrcttgttttagcttttcactcttttcttttagatctttcattcgtacgtgcctttgagtttacctatgttaatgtttatggcactcacgttttggtaagtgctgctcatgaagccagagtggagaagtttatttatgtcagcacagatgaagtatatggtggcagtcttgataaggtgagcttagaaaatgtatattttacctacttaaccatgtaccatgatacagttttattaaacctacactgggcttttttcatcctcaaattatatacacttgtggcactcttcagagtgtattagggttctctagagggacacaactaatagaatagatatataaaggggartttattaagtattaactcacacgatcacaaggtctcacaataggccatctgccagctgaggagcaaggagagccagtctgagtcccagaattgaagaatttggagtcagatgttcgagggcaggaagcatccagcatgggagaaagatgtaggctgggaggctaggccagtctagtctattcatgtttttctgcctgctttatattctagccactctggcagctgattagatggtgcatactcagattgagggtggctctgcctttcccagcccactaactcaaatgttaatctcccttgacaacaccctcacagacacacctaggatcaatactttgtatccttcaatcccgtcaagttgacacttagtgttaaccgtcatagaatattattctattgtctcctctgttcagatcaagtgatacctccccaaatggggaacaacagcctagtcttggtagagacttattcatttattttttcatgccccagaattctctttaggtacagatttatttgtaattttgcaagagaattgcaaatctcacctttttgtcccactcttacaaatatggtgaatgtcattccatggaccaaagcataagttaggctgcagcatactacctgttcatctttccctttcagtcaggaaaacatattggaatttcaaggagacagtgtaaaattcttgtaaaaaccaaaatctattttttttttttttgagatgggagtttcgctcttattgcccagcctggagtgcaatggttcaatcttgactagccacaacctccgcctcccaggttcaagcaattctcctgcctcagcctcccgagtagctgggattgcaggcatgcaccaccatgcccagctaattttgtagtttagtagagatggggtttctccatgttggtcaggctggtctcgaactcctgacctcaggtgatccgcctgyctcggcctcccaaagtgctgggattataggtatgagccactgtgtccagccttagaatctattttttaaaataaatcatgcataaatattacactttttaggcaaagaagactccattgtctaatctataatttttataattggtgtctgcagtgatctcattctgtttattttattatttatgaatttacttattttaccaagacacatacatagtgaaaatcaaatagtctgaaaagacttacagtgagaaaaagtaaaccttgaccacttctcaattttcaattctgcttccaagaagtaaccatttttcaattctctgcaatttttatcaggtaaacttctttcttcatgcaccctgccaccctacatcagatccaacacagtagccagagtgatttttaaaatgtaagtcagacctggcattactctgctcaaaatcagtcattgttttacggtggccttcaagggtatggccttcctctagctttctgacctcctctcccactgtctctcgcctcacatcagccttcctgcaattcctttggacatgcttctgtctcagggcccttacacttgctgttctctctctctgctatataggattgttgtgcaygttaaagaagttaccacatgtccttgggaaaacaccaggcacataggatttaagaagtggcttttaaaatttggtgattgacatttgaagtgttaayatatgctctgatttctatacttaaaatatgcataacacttttttaaatatatatttttaaaaataggaatttgatgaatcttcacccaaacaacctacaaatccttatgcatcatctaaagcagctgctgaatgttttgtacagtcttactgggaacaatataaggtaagaactgattgcagaaactcttgaaacattttcctttggacttaagtgttaaaactccaagtcagcttttttttttctttttttcaaaatatttttaagttttctatttattgttcggagacagtcgcaatctgacactcaggctggtctcgaactcctgacctcaagtgatctgcccacctcggcctcccagagtgctaggattacaggcgtgagccacgcccagcccaagtcagcttttagcagcatgcttagagtagaaggcatagattgagaaaatttacatattatggaattttaaaaactaatttcctctattgtgtggacaaattagggccgacctcttcgtattcagttcatcattaaaggaataacttgaatcttgaatatacatttttttttctatttcagtagtaggtagagtgttacagctatagtcagagtgaggttggagtcctatgagtggaggaagacagagggaagacagatcccctttctgccatgtgcttctgtctgcatgatttggcttttgtggctcctcatgagtgggaagtagacttgcccctggtggctctgacagtgtcagtatgggagccttaccccatatgaatcctcaccttgaatctcctacatttggcttcccactgctctttgtgagtttttagggactgggtcagagaggcaagccttggaattcctaaagattccctcaccatttgagttctggtggcatcagtccttttcactttcatagtagctctttttatttgtagggattggtacaatgaagagagccaacttaagagtccttgaggtggtctttaaaataatccgctggaaagttcttccgtgttttgctatcagtcagacttataaacctgtgccatctgtgtttatcttcttgtactaataaaagaatattcctcttctttcttttggaacctctgcctttatctgaatcctattctctcctttttagaaaccttacgttagaaaaaaatctcttccctttgaccttaaggtgtgtggaattatttaggcaaaggtgcccatattttgaaattctgcttatctttaaaataatcattattattagacctttttaaaagccttaatgttggatattcttttaagtttccagttgtcatcacaagaagcagtaatgtttatggaccacatcaatatccagaaaaggtaaattttacttcttaattcatggtgtttttcagtgattgtaacttctcattgtttgaaataacctcttttcagttatttgtctaaaataatwtgttgtaaattatacataattttatatgctgtataacaccacttgcagattccttcagacttagagtttgaaracttgagttttaagtctcaagctggctgacactcaccagctggcttcaccacttagcagggattttgaaagatccaatgagaatgatatatgtgaaaataccttgtacttctaaagactctaaagcactatagaatacttctacctctactgtcaygctgcagttgactccctgtttgcagtcagaccagtatgtcagcgtatacagaaagtcaaaagctagctagatagtgatgcaagaagcttgtatacattaactgtcttagtgtcagctggctaactgtgcctcaactcatctttattgtgtaggcacgaatatcttccagaaagtactacaagtaatgaataaaaaatgtagtttagaggctgaaaatgcctgtgcaattggctctatatcatcaagcctgattttatataactttggctactctgcctaaatttggagactgggttttcttgcttcccagctggttgcattgatctgtttgcccaaaggaaagggccatgtcatgacctgcaggtattaatatttactttgcttaatttaagttttctttgaatccaagagcactggaatttactttctataaattcctgaagcacttaatgcataggtgctatatgtaaagcaataagtaagatacaaatatctgcccttatgaagtcagcacacaggtgagctttatgatgagaccarctgtctgatgaagactttttctgcatttttcccctatttagatcattttrtcttcaagtaacctgtctttatgaaatagcaaactaggagttcttttacatatcaaatactatagtaggttttttaataaactgataaaaataattagaagcaatccatatgcatatttcttaataatcttttaattttggtatgagttcagattcatactaatgagtaaatatccagtctgaaatgatatttaaatattcttttaggttattccaaaatttatatctttgctacagcacaacaggaaatggtatgttattattacctttttacccatatgcttttctggtatgttagagtatttggtgacactttcttaaatatcataaagtcttaaaggccatagaattgaatgccccactaaatttaagaatcatttctccagtgtaatagtttttaaaataatctgtatcttatttttataattgttgagataatttcagatcttaatgacctatcatagaactttgaattatagcattaaaatttgaaatctatttttatataattttactttctcaaaggacttatttaattcatagaactgtagatatttctttaaaatgaacttatgacataaaattgaatacacatttcacaggggtcactaatatgtttgccactttcctactgagtcccctcagaaggtttggagattaagaaatatgaacaaaatttagaaaagctacgagaatttgtattttcagtaaagattctgggatccccatgggaattagcttctctggagttgtagtacccagtcaatgctttaggagagtttacctttttacactttatgatttcacttcgtttaatctctttagttgcattcatgggtcagggcttcaaacaagaaacttcctttatgctactgatgttgtagaagcatttctcactgtcctcaaaaaagggaaaccaggtgaaatttataacatcggaaccaattttgaaatgtcagttgtccagcttgccaaagaactaatacaactggtatgtatctgttttaaaaggttggtattttcaaaattgttagtggcagtgaccattagtcaaaatcagaagcatacagcttacttaatttaaaagtaagcaagtagaaaatgaaattaatgattttgtgtaccatatgtgtcttaaattaagttggatcacctatttagtaacagcttttcaggaaaaaataattcactaaatgtgcattccctaattatatttctgcataagtcatttgcagaaatataaaattgtcttaaaacaagtaacagtgatatataaaataattacattagtagttatgaatgtccatgtatattaggggacatcaattttaaatcttagtttaatagaaagaggaactgaataataaccaaaatccaatgtgtatatctgagcttcagatggaatttaggttataaagtatagaaagtgttactaaaatgatgttcattttagctgtcttccctgctatgaggcagttgttttctttttaatcagccattaaatactattgttattctctgatctcattttataatttgactcaaaagctttttccattttgacagatcaaagagaccaattcagagtctgaaatggaaaattgggttgattatgttaatgataggtgagtaacaagttaaaaccttggggaaaggttgtgaaatcttaggtacttataaaattataaaatatgtggacttgaccaataactagtttatctgttttgaattttctggtaaaacatttttttcataatcgtaagtaccatacaaattaagtatagcattattacttactagctatgtgacttaaaaaactattgaccctttctaagtctgaagtttcaaacctccagtgtgaaatagggataataacatctttttttttttttttggagacagaatctcgctctgttgccaggctggagtgcagtggcgcaatctcggctcactgcaatctccgccttcccaggttcaagcagttctcctgcctcagcctcccgagtagctgggactacaggcacacgccactacacccagctaattttcgtatttttagtagagacgggtttgcaccatgttggccaggattgtctcgatctcttaacctcgtgatccgccctccttggcctctgaaagtgctgggattacaggcatgagccaccttgcctggccaataataacatctttcttataaaagtattctaacacttatttataatgtgtatgaaatacctgacccacagcctggcatatgagttctaataagtttttgtgtatttgtttatttagtcattgaacatttgttgagttttttggatgtgtcaggtacttcacttatatctagatcgtggctgaaacaagaagacaagacacagagagggttaggcacctggcattatgggtgactttttttttttwaatatatacttgattttacagactttctgcagaaaacctattgggaatttttgtaaagagaaaagttgggttgtggtaaaaatgcataaacacatatctcctaatatctaaatttgtaaatatatatctacaatattattttaaatctgttttgttttccaagacccaccaatgacatgagatacccaatgaagtcagaaaaaatacatggcttaggatggagacctaaagtgccttggaaagaaggaataaagaaaacaagtatgttttgaattaatcattttggggrcaagtcagaaaaatttaaaggaaaaataacttatttccagaacattatacaaaccagtggaatattgtgttgaatcattcgtacttttcaaattgccacatttcatatatttctagtagcagtcctgtgtttcctaagcatcttgaattttataaaccaacctctgatcaatcttcccatatcttgttagcattaatcaaatacctgtattatttattctgaggtacatattttttcactttcttcacactcctaaaaggtatgtatttttataatcactggtgtcttataattattattgtagcttttttcttttttacatgtatgtaaaataatgatccatcagtggcatcttagagttggtgaaatatagatgcagtcttttttgtgtcttgaggctttttatattgaaaccaacagaggaaataaatttagtatgtgcagaaaaatctattaaaataagtgcatataaagtctgtgtatacatgttaaagctgtatttagaaatgtattcatgagaaaagctctacccagatgtagaaaaaaaagttttgattcagagcttgaaatacaaatacttaagtcaaatattaagaaacaaaaaataatttaaaactatcagatttctttaaactaaaaaagcttttactgatagtatagcaatataaaataatttcacatattaatagaaggaaggtgctgggcatagtggctcacatctgtaatcccagcactttggagaccaaagtgggaggatcacttgaggtcaggagttcaggaccagcctgggaaatatagcgagaccctgtctctacaaaaagtaaaaaaatcagcggggcatggtggcacatgcctgtagtcctagctatttaggagggtgaggtaggaggatctcttgagcccaggagtttgggcctatagtgaactacgattgcaccactacactctagtctgggtgacagcgagaccccatctctttaaaaaaaaaaaaaaaaaaaaagcaaggaagttcacatcaactcattgtgcctctcatgcagtgttaccatatttatacgactaaacactgtattatacttttttatataaaataaccttaaaaccagggcagatgacttatttcccacaccccaaattccttaaaatcagaatcttaaatatttataccaagttcagtattgaatgactttagaagttaaraagaaaaaaatagttgatttttaatcataaattttttaggtgatttaaatgtcttctgattgacttcattgttaagttcaaaatcaaattgtttacatcattagtcagcccttgtctgctgcttagctgatgggcaagacttagctagcaggaactcagtaaaggttggttaactgatgtttagtttttctttcttttcttttttttttttgtcttttgttttttcctattagttgaatggtacagagagaattttcacaactggaagaatgtggaaaaggcattagaaccctttccggtataatcaccatttatatagtcgagacagttgtcaaagaagaaagttatcctacctcgccaagtggtatgaaattaagtgaccaaatgaagtgcactcttttcttttggaattagattcatgactttctgtataaaattcaaatgcagaatgcctcaatctttgggagagtttcagtactggcatagaatttaaatgtcaaaattctttctgaaaccctttctcctagaaactaggaaataatagstgtagaagactctccctaagggtagccaggaagaagtctcctgattcggacaaccatgaggggtagtggtgctagggagaaggcaaccttcactggttttgaactcagtgcctaagaaagtctctgaaatgttcgtttttaggcaatataggatgtcttaggccctaattcaccatttcttttttaagatctgatatgctatcattgccttaataatggaacaaaatagaagcatatctaacactttttaaattgataattttgtaaaattgattamgttgaatgctttttaagagaagtgtgtaaagtttttatattttcacaattaacgtatgtaaaaccttgtatcagaaatttatcatgtttactgtttaaaatgattgtatttataaaattgtcaatatcttaatgtatttaatgtagaatattgctttttaaaataatgtttttattttgctgtagaaaaataaaaaaaaatttgattatatatttttaatccttctttgccctaaagactttaagaagacttgaaaaagtaactgattggctattgggttgagaaagggaaaagaaactgggtggccctctattaagaatgcagattttggtatggaggcatcataattcctcattagaaagtcttatactttaaaaatacccttaaataccagcctcccactgtgcttagggatccctgagtccatacctcttctattcaatttctccaatttcccctttctggagagaaagagagggaagacaggtgtgtcagttgagtcttacaggaagcagatgcagagagaaagtaatgactataacgataaaagaaggaggaagcaaaattgggcaggctgtgcgggcagaaaggcaaacccaacccatgtggagaaaatgtctattgtgagaatcagctactagccctttcacagtggaaagggcccaatggagttcatgtcccaccaggtagctggtgggtttccttgaagaatagtgccatattgggggctcagtatttgtctctattgccagcaggttggatattcacaggtgacaatagctacattggctgtggtaagtgagaattcatgctgtgggtcccaagagtagggaccatctgtacagtgaggcctattccattcaggtgcccatcatggtagttctggggtggctgatgatgaaagctggctaaagttaactgaccaagtcattttatctactgggtggttcagtgcctcttgctatggtggttgctttctagtgagtgttaacatggaatacacagatcttcacactccccaccctctcccatagataggcctatccacgcttctccaacctttacttccttgtttcctgctcctctagactttttccttctaagccccaaagtagctagccaggctactggtcatgactaaatgtatattctcaccacaggtcactactatacatagtgcatgagcagggatactactcgaagcttttttcttggaaaggttttctctttccacattctttttaaggccacccctgcatggttttcaggcaaccaccctccatttttggcttgcacccacagaacaggccaatccatctataaactaagatcaactttttttctcctttcagttggttgtatgggaccctctatatggccacaggtataaagaactaaggtggtgacatgggagtctggcctacctgctcttacaacttacctgtgctctcccattctgctcatgctcgatcccagatgtgccatttccatcttccagtggactgctgctggctccacctgactctgagtgggtgggcacattactctgctagaactgccataacagaatatcagagactgggtagcttctacaacataaattaattttctcacagatctggaagctagaagtccaaggtcaggatcaaggtgttggcagggatggtttcttccgaggcctctcttggcttgcaggtggccatcatctgtccttatgtgatctttactctgtgtctaaattttctcttcttataaagacaccagtcatactggattagagtgtattttaaagatctcattttaatatacctctttaaaaactttgtttctaagtatagtcactttctgaggtaccaggggttagtacttcaacataagaatttgggggagacacatttcagcccttaacagtgggtccaagtgaacttagtacatatgggcagttctagatgcatggtcatttggtgtcttgtcgtcaagtattctgggtctaccatggcacagtaatttattttccaaaggcatgattctccactgagcctgaaatggtctttcccaggtgtaaccatgggacctgcatagttattctccactggggctcaccataaaacccacactacatctgtctctaccactgacaccaccaacaccatagggtttaccacatcatatagcccaagtggcaggaatgcttacaccccagcttggacctgctgcagacctctttcccgccccagacccctcaaagctggcagccttttctgtcgctcagtatataagctggagcagtatccctaagtgtggaatgtgttccctccagaacccaaagccacactctgtgtttccttctctgaggaaggggatataagataaagcagtttgacttttacttggagggcatgtcctggcacaccttgattgtttgactcctaaaaactttactgaaatcacaagtccttgaatcttcatcagattttatctcccaccttctggggtgaatgtgaattaccaaagccatcagggtgctagccacctttgctaattctgcctgatcagcatgacaccatcaatgtgatagatcactgtgacattctacaggatgttcaggacacccaagtctcttaggagagcagaacttacatagccctaaggtgaaactgcaaatgctcctggtttctgatcatcatggttgagatggaaaagaacacatacagcaaatcagtggctggatactatgttccagggtccttctaatccacttcagcaaagaagatgccacataagcacagcagctgccatcagaacctggtatataagtttggatatttgtccccgtgcaaatctcatgttgcattgtaatccctagtgctgcaggtagggcctggtggggggtgtttgggtcatggaggagaatccctcatgcttgacattgtcttcaagatagtaagtccttgtgagatctggttgtttaaaagtgtgagacacctaccctccatccccgctactgcctctctctcttgctcctgctttcactgtgtaatgtgcctgctcccaatttgccttccggcatgggtaaaagctccctgaggcctccccagaagccaagggatgtcagcgccatgattgtacagcctgcagaaccgtgagccaattaaacctcttttcttataaattacccagtcgcaggtatttctttacagcagagctgctccttaattgagctggccttgactgcagtcatttcaccaggatctacccagttctagcagtggccagactggtgaattaaacggagctttggtgggggcctctctgtaaccttgagatcctcaagggtggcatcatcttcacctcctccaaggtgtgattttgtgttttaaattgagacgagggtctcactatgttgcccaggctggtctcgaactcctgcacccaagtgatcctcctgccttggttctaaagtattgggtcatggcggcgaatccctcttggcttcttgacactgtcttcgcgatagtaagttctcatgcgatcactgctcccagctgtgattttgtttttgatttactatctcagccaggccagaggcccagctgaggtaggtttgttaagtttgcttcagccaaggttagggtgctggttgggaaaatctaggaccctgacacaaagatgagactgtctgagtggattcctttaaagatgtctgcagcttttaaactattaaatactgagtttggtcttgggcttcttctattctcctacctcatgataaggccctcacacttagttgtcacttatttcttgttcttagcttttcattacccttctggaggacatcagtacaacttattaaagaccaacaattccactgcccttgtaagacgtgttctcctgagcttttcaagtgcctgaattattgcagtaagcagggcagggtggtccccttccaaagaacattccccccaagtcaccaacatgaaagttttagcaactgcatcactaccttatgctagggactgtgtatgccccctgcctcacccaggatggtattcttatgaccagacaggcagaaagtgatccagtctaaacccatcttatcaactgttttgttagaccactcttagaagtgactgtgtcatttgggtcctctgggaagtagtggctgaggccaaattagaggtgctagcagtttattaataggatagggagttaatgcttgtgaaagatacaaaagggaggatgcataattgggcagaagaaatcttcaggctgcagcgtagatcagacatctgtgaaaaggaaggggtgaggaagagggttggcagagtgggcttcagaatctcatccagctcaacagggatctgcagagcaaaatctcctggaaaaaaaagccccacctgggcagaaatggctgggttccctattgtgctcagccattggccaggggctacttagaaacgaccaggtggatcccgaaggcattgcaagtggaagctgctggctaactgcactcttgccagctgaatggcaagctttttcttaaagggaaatccaaatggtagaccttgataattgccatttgtaggggaggagggggtcttggagtttaattgctctctatacagactttcaaccaaaccacttggttttgtttgtttgttagatagagtctcactccatcacccaggctggagtgccgtggtgcaatcttggctcactgcaacctcagcctcccaagtagctgggactacaggcacgtaccaccacgcccagctaatgttttgtatttttagtagagatgggggtttcgctgtgttagccaggatgctcgcgatctcttgacctcgtgatccgcccacctcccaaagtgctgggattacaggcgtgagccatcgcgcccagctgcgccacttgctttttatccaatgccttaccctcgcctacctcccttacctccgccttccactgccccagttgcttccaggttctgtgaggtcagcttacccaatctggaggttcctagaaggctcattggagatgacatttgagctgtgacttaatgaatgggagttagtgaggaaacaggatgattccaggcagagggatcatcagagtgaaagcaccaagttttaaatagtgctgtgtgttcaggaaacaatacgccatcagttttactctagcatagtcattctcaaaacgtgtctccatttcattaaggaaatcaaaactataatgagatatcacctgacactcatcaggatggctattattttttaaaacaacaccctgtcaatgaggatgtagagaaattgggaccgtggtgcattgctgccgggaatgtgaaatgacgcagcctctggaaaacaatatggtggttcctcagaaagttaaacatagagttataatatgatccagcaattccacttctaggggtatatccaaaagaattgaaggcagaggctaatatacctgcacaccaatgctcatggcagtagtattcgcaatagccagaaggtggaaacaacacaaatgtccatcaacagataaatggataaaacaaaatggcttatgcagtggaatattattcagcctgaaaaaggagtggaattctgacacatgctgcaacatggataacccttgaagacacaaaaggacaaaagtggtatggttccactcaaatgaggttcctggagtaggcaaattgacacagtatcagaggtttaccagtggcttgagggaggagggagggaggaggtattgtttaatgtgtacagagtttctgtttagatgatgaaaaaagtcctgaaaccagataatggtgatggctgtacaacattgagtctacctaatgcccctgaattgtacgcttaaaaatggttgaacatggcttttacattatgtatattttgccataataatgatttttttaaatgtggccctggacagacagcattcacatcacctgggaccttgttagaaatacaaattcccagacttacagaatcagaagccctgagagtggggcccagtaattcagaagccccctaatgtttgaaagccactgttccataatgtgagatggggaggtgaggctggagaggaatgtggtagccaggtcatggagggccttgtctgccatggtaagatgcttggactttatcctaccagccaagagctaattctggattttaaggaagaaattgacatggttagatttacaggatttatctttttcctagtttcaaa

SEQ ID NO: 93365 - DNA, 13224 bp, Homo sapiens
aaatataaaattccatcataccaaaaataattaccataaatatttctaatgcttagtaataaatcactagtttttgacccagtgatgatgtatttactttaagaagcaaaagaaatatgtggtaaactaagggatttgtaaaatatcatgatttaattccttcctaaaaatattacctgttttgaaaaccaaacaccacatgttctcacttgtaagtgggagctaaatgatgagaacacatggacacatagaggggaataacacacactgtgacctatcggtgggtagagggtgggaggagggagaggatcaggaaaaatcactaatgggtgctaggcttaatacctgcgtgatgaaataatctgtacaacgaacttccatgacacaagtttacctgtgtaacaaaactatacatgtacccctgaacttaaaataagttttttaaattaacttaatttaaaaagataaaaatatattaccagtttttattccaaaatattcaatattttaactaaaatacttccatggatattttgaatattgaactttggatctttcctggaaaaacatctgctatgcaatttacataactattcagtatctgggaaaatttgttcttaattaacagtcaagactcactaatgtcaattggctcaatatttaaacaaatgttggcagaataattttagatttaaaaaatggctggaatagaaaggtctaggtaatttaactgcttctaaattactgcaattctgcctataaacttaaaatgtcttacttgggaagcgttttcagaaaatgagttagagaaaaaattggtaagtgagccaagtgaggatcaactaggagaaaccacaatattcaatgcaaccgagcttggttagaatgcatcacatcttttttttttttttttttccccctgcatacaaggatttggaaagtggtaactacaacaagccctgtaacactatctgttaacaggagacagaatcattccaattgaagcagaattaaaagagagcttttaaaatgtaattgacagatagatagatggattagatagatggatagacagatgattgatcgatagatagctgcatagatagatggtaggatagcgataaatgataaatagatatatgtttaaagttctctaatatgtcaagccattatgttttcctctttcattgcttttctattctttctcttcacacagaaccatctcctcctccatcatgccttctttccaaaagttttggtggtaggtgtagagaagaaactaggccaagcagaaatacaggtctcaagcaatggcctactatctaacactggaaatgaagggaagtgctatccgtatttttgtaagggatctcgatgagatctaagccatgattaaggctgagtttaatctatcacaaattgttggttcacagaatttttactttttagctagttattagagaattctctctaaactcatttgttcctttaccgatctccactctaagagtaatattactgtgcttgggttataaatgttttatgaaaataaacttttacaaaatattctgaaaattaaaagtttcagaaatgactttaaccccaactctcatttaatatagggaaaaacttgaaattgcttatgtattgatacagtgatactatgcacatttgtctaacctttagttcattgacttcttttgcagacctgccaagattttgagaaaataaatgctatcatcacaggatggccagatgacggacctatacaaattcactttatagtatcaaatccttttatcaaaatcatcactatgatatgaaactcaacattgccttagggaaatagcttcagggacatgcttacaatgaatattcttgaacattttattctaatgtttaaggaagaacagtaacagagaaggcaaaacatcagcaagtcataacattttgagtttttcatcttcaaataaatgaaccaaggaggactaaaagacaagtggtaaatgacgatgccaagagactctcctaagaagtttatgagacacaaaatctctcagctttactttgttaaatacacaaacactggattactgtgaagaaaaaaatgtgctacaagaaattacagttagccttaccaaatggcgaaatatttacacaaatcatatcctcattttgtgtgtgttttttgtaagatgacgattcttttgccaatattttttctcaacatttaagattaagaaacacttggatttactaatgaatatttgtctacatagagacatgaaaaatgattaaaatagtaaaaaacttacattttctatcatgtaaaattaaattacttgtactttaaagatgaacacatcaccaaatatctgttgattttgaaagagtgactctataatttagatattaagtattaattaaaacattctagattatatattttatatacatatgtttaaataatggcacactaaaatgaatatcaggcattcttaaggcagaagtcaacaaaaattttcagaatatttctattatgtatgttatctatccctctatttatatgagactatattagatatgcatggcatggaggtatttggtgggtgatgagctatctcaatagatattctttgcccttgcttctctactcctccaaggaagcattctggacttacaaatgaggataagtagtgtttcttggtatagggaagactttgtattagaaatatgttttagcaataagtttctgaaaataggtaatatataggattaataaaatgctaaagtagaaaggaaatttatcatagagacttatataatgaattctagaatcaaaatttagtgtgtttatatattttaacccttttaagttgcatagcatcatagcactacatatttgcaggattggttattccatttatttagagacactatgagtcaatgccaacttatcccttgaaatgaaactatagtagctttcctttacctgtagtttctgtgatttgttacctgtggtcagtcagtttgaaaatattaaatggaaaatttcagaaacaaataattcataagtttacaattacacatcattctgttccactctgtccccctcaggatgtgaatccaccctttgtctagtgtatccaaactgtatatgctacctacccatcagtcacttactaaccagctctattatcaaatctactgttgcagtatcacagtgcttgtgaccaaataacccttattttacttaataatggcttcaaagtgcaagaatactgtgtccaatttacaaattaaacttcaccataggtatgtatatataggaaaaacatagtacacatatgattgtttactatatgtgatctcaaatatccactaggggttttggaatgtatcccttatgaataagggggactactatatataaaaacctcaccaccttgggtagccaaaaggttttagtcacaattaccaatatgtacattataaatagcaaacaatttattaaaaaaaactttcaaaagcaatgtcctctatattttagtaacagttgggcttaagattcattccagaaatttttgaattgaacgtcatatacagcattttttgtcattgtaaaagtatttaataaaatgtttaagcatgtattacatatgcataattttatgcactgtttccttcagaaaagggattcatgctttttgttggtgttattacaaattattctaatataatcttattttctgattcaaaccgtatattatagcaatgttaaacttacactcctcatgtttgataataatcaccacttatataccacttctcatcttcaaagatctttataaaaattaattaaygtcagccaatgacatttcttggaaaggaaatgatttatttaaatggcatctatataaaaaatagccaatatatttacataacaagtgctatatataccctttaaatcaagccccagaatcctagaagtcattcactttgagtacactacaaagtagaattatttatctattatagcttaaagagatatagagatcatctacttcaaaccttcccccatattttcaaatgaagaaaatgagggcctaaaagataaatgactgaccaaagatgacacaataaattagtggcaacgcgaaactggtttactaataataaattattcctaacatttactgagctcgaacaatgtgctaggaaatgtatcaagtacttgacctggattaccatatataatccttcaccctataatactagaatcatctcagttattatttcctaatatttttaatcagtgaattactaaagaataaggataaaaactgaaaaattaaagaagttattttcttcaacaagaacagcaatctaataatgaggaaacatttagccatatttattttaaatgttacatttgtgcctatgtttctatacaattacttaacaaaaatctataatattcagtatagcagataacatcccaagtgaaggtatttgttatatatctataaccatgaaaattattttttaaattataattttccattttcttgcaatgaagaatgtttctttaaataagatcataaaatctatagtaatgccaagtctctcctaattctaacacttaaagatactgatgaggcagtagtcttcaaattgttttgaactttttccagaggcctttcaaacgtgaagcaatatttttgtttcttgcttatgaccattttgttcttgcaggcaaaaaacaacaacaaaaagtggactttctaatgatttcaattgttttcactgaaaataattctctattccataaacgttttcttcttttaatctggactacaggtatttcttgtcatcaaagtagtcttcaccaaaggaaaacaatagaagtttccatttttactggtgctaaaaattcctaaagccaaaggatactcttatagacagatttgctgagcttttcttgcctttgaatgaacatgtaacaggcaaaaacagaagtcagaatggaaaatgttatgttggcagaaagtgatgtataaatatctttatccctaaaagaatgggctacactacaaaatcttgtcactgtattgctttaaccaagaaaatatctgcagcttatttaaatggcaggaataataacactgatcattgatttcagaaataaaaattctcctgaaataagacagtctgttaaaacaaagtataaagaaataattacttactgtctggcaaatgactgccttgacatccttcatatagtctcacttctagaatcaagatactcaaaattatcaaacataaatatctgaatttatctaacaaaacatgtttatggtagactaatatttttgctcattttcaaacagttctactttatccattaaattctttctctggtagaaaatagtctttcagactaagcattatgcatacattttagggtaaaaccttatttatacataactttagggtgtgtgtgtgtgttcaaaatcacaaatcagtatgaagaaattaactattgccttcgagaactacatgatgtttatattgatatgaaccacattattatggagtatgtaaaaataaaaactacttccctgtatataaagccattctttgaagcccaagcaacaaaaccaactaatttaaagcaaccatagcaaagagcatttttaagcaaactcctttatggcacatggaactcatccagacagttatagttttcttcccacttagctttattttttatttcataatttcatactcattacatagatcaacttacatgcttagaaataatatctaaccaattgtaaagttttctttatttatacataaatatttaaataaataaataaactacataacactaggtcagtgaaagcaactacggaaacaatctggccctttgcacgcccttgggccgcggccgggcgccagctcttccttccgtttgcgctgtgagctgagccggtgtatgtgcagcaataacatgtcagccccgctgccagccatcgtgcccgccacctggaaggccaccgcggcggtgattttccttcatggattgggagatactgggcaccgatggatagaagcctttgcaggtatcagaagttcacatatcaaatatatctgcctgcatgctcctgttatgcctttacattaaatatgaacatggctgtgccttcatggtttgatattattgggctttcaccagattcacaggaggacgaacctgggattaaacaggcagcagaaaatataaaagctttgatcgatcaagaagtgaagaatggcattccttctaaccgaattattgtaggaggattttctcagggaggagctttatctttatatactgcccttaccacgtagcagaaactggcggatgtcactgcgctcagttgctggcttccacttcgggcttcatttccacagggtcctatcaggggcgctaacagagatatttctattctccagtgccacggagattgtgacccgttagttcccctgatgtttggttctcttacggttgaaaaactaaaaactttggcgatccagccaatgtgacctttaaaacctatgatggtatgatacatagctcatgtcaacaggaaatgatggatgtcaagcaattcattgataaactcctacttccaattgattgacgtcactaagaggccttgtgtagaagtacaccagcatcactgtagtagagtataaaccttttcccatgcccagtcttcaaatttctaatgcttacagtgttaaaatgttttgcaaatacacgccaatgacacagatcaaataacgtctcctcataagaaatttatgaccttttaagtttctatacatgtattcttataagaagatccaggatatactatgttaaaatagatgaagcaggtagcttcttttttctcaaatgtaattcagcaaaataatacaatactgccaccagattttttattacatcatttgaaaattagcagtatgcttactgaaaatttgttcggatataaatgagcagttaagatgtaaacaatttatgcatgctgtgacttggtctatggatttattccaaaattgcttagtcacgacgcagtgtctgtatttttatatatgtattcatatatacatgattgtaatacataataagaatgaagtggtattacwttattcctaataatacagataatgctattcattgtcaaaaaagagtaaaattgttgtcttcaattaatgacccttttattttgggaccaggattttcttttccctgatattatttctatttaatattcttttctctcaaggaaaaaaaagttcattctttctttattgtccttcatagtaggccaaatattgcctctctgccatagacagctactgtcaatacatgccgtaatttgacattctgagtcacagatataaggtatttaaaatctatttatgctttatagagaaaccagacattatgcactacttatttccaattatattcaaatttacacctatttagttattaggatcttcagcccaggtaacaggaataattctgtgtttttatttttctgtaaacaactgaaagaataattagatcatattctagtatgttctgaaatatctttaagactgatcttaaaaactaatttctaagatgatttcatctccttatagcatagaatttactttgtacacatgtttgaaaccaactactgtagaagatgagaaatctattgtaattgtttgctttattttcatctgccagtggacttatttgaaattttcactttagtcaaattattttttatattagtttttcatgcaaacataaaaatagcaatcattttaaattgtcaaaatttccagattactggtaaaaattatttgaaaacaaacttatgggtaataaagactagtcagagccctatacataaagtgtatttaccatacagattaatattaagcaaaaatgtatgcttgatatttctgaactgtgttaatttttctgctgtattccagctgaacaacattaagaatgcatttttataaactggtgctaatcaataatgaaaataatttagtaatggaatatataggatgttaataatgaagccatatgtttttgtctggatttaaaaattttaaacatgtcatttttctttaccttaaagaatataaactgttgtttcagttctgcagatcagcaagatactacttatggcaagaaatattcctttgaaatgttgtgctgtaatgtgggaaaatgtaaatgtttttcatggttttatcaatgtaaaataaatttaattctgaaaaaaatctgaaattttttctaagtcttccttgtgtcaatccaaatatttttaatacatgcttaattgtgcaaaatgtaactaaagttttcctggaacaagaggaaagaataattgtcatatgtcacttttataatcagtactttatttcaaagctctaagatttacctgaatgcattaaaaggaaggaaaaaggaaatcataactgtaactgtggtgaacttctagatgtcatgcactgaattaggtctttctatattattatatttaatccatattgtggcagattgtaatgctggtcccaagcacagttcccctcttctctataagaaaatcatcctagaccactgccatgcgacttgatgggcttccttgtgaaaggaggacacgctgtcatcgaggatggccacatgacttgctactgccagttaaaatgtgaacagtgtaatactgcaccaattctaagaagaaatttagaaaccatcgtatgtttctgccagctctttctctttccctctgccctgaaaatgtgtcctagataggatcagctccttagcccaatctctagagtaagatatgagagccaaagccaccaacacacaaaaacaagaaaaaaacctcacttgtaaatcattgagatttggggattatttggaatcataacataaccaaacaaaagctgattgatatgtgtgctgtatgagattgcttacattatactcattttatagaaactcaaactgaggctaagagagatcgagcaatttttcccaaaatatcaatgtttaccgtagaaacctctttaagagaaaatttctgtgtcttggttttctcatctgaaaaaaaaaaaaaaaaagtagtctttcttatctcttagagttatatattaaagttgttttggagattaaatgagttaatacatgtaaaatactcagaacactgcctggcaataagtgttcattattgtttcaattattatttttatttttagggcttattatgaaattacttaattcttctgagcgtcagtttacctatctgtagaatagggataatcatacctttttaaatgtacaggatgtcctcaaaataatgttatatcattcaacatgattttgttataacactaataaaaaaaaatcaattcctggtcagggccactgtctgtggagtttgcacgttccctgcatatctgtgtgggttttctccgggtactctggtttcctcccacatcctaaaaagtgcaagtgaggtgaattgacatgtctgcatggtcccagactgagtgatggtgggtatgagtgtgagtgtgccttgcaatggggtggtttctgtccagggtgagtttctgccttaggccctgagctgccaggagaggctccagccatccacatccctgaattggattaagctggctggaaaatgaattaatgaatatgaagtattataaaataaaagtgtataaaatattcaatttcatacaaatgcacagtaataaacaatgtggtagaaaaatgctcagtgaacctgttgtattgtgtgatttcgaattgtgtggtgggaagtgctccttacaatttttgctttataaacatttactccttgattgaactccaccaccactagagctgctatcacttgctaatttaccaaaaattgggaaaataattatcttacttgtttttattaagctttcttaaatggatatatagctcacatttatttctttgtttaatagtataagtgttttggtcttcatttagaagtttggtgatgtttttgtgaccagaaatatgtcataggaacctaattcttgtttaaatcaattagcctatggtaatataggttttgttatgtgttatagatgcccaagaacctattgacaatgatcaatgaggacttactgtacaggattgctgatttaaataaaataacatatgtgacattgcttttaaatatattattaacatataaggctaattgtattattaaactatctgatcacaactatttgtaacaagacaataggccactgtcatgaaaatatatagccaccattatgaatataccaagaacttgcaaaaaaaaagttctttaagaatctataattatcactgtagttaatcagatgatagataacaagcttatctgtgcaaagacagtgaagaatctctagatctgtgctatccaatagaactttcggtgatactggaaatgttctatatctgtattgtacaccacatagccactagctacgtgtagctattgagcacttgaaatatggtgagtacaacagaggaactgatttttagttttattcacgtttaactcttttatatttaaatagttgcatgtagctaattgcaaccatattggacagctcaactctagaacttaacacaggggaaatcttgagagaaaaacagtactctaatattcagaataaggcaatggaatcttcttccattaaataagaaaatttgaggaggacaaaatctgggcaatggaagatttaggtgattgttattctggagaaaaatctaaaagatgacttgtacattatgatgtgtttgccctggcctagtggcctagtattccacaaactgtcaatagcaacaaaacaaataaattaaaggtggccatgataacactgttttcataaggcaaagcgcctgaagggaggaaagaaaaccttgatgataacatagcagcagacctcttagagctaggaactcattttgaagcctcattaatgaaaagcaacactattttaaacatcatctccagtgataccattctagccgaaattataatcaaccctcaactggaccacatcaatagcttaaaaataggtctggtttttgttcttatctcatacattctattctgaacattgctacccattggagtaaaatgtcaaaatcacaaatcttatcatgtcatactctgcttgagacttatcaatgttgtaccattactgttacaataaaatccaacctttattatgacctataggtctggtcctgcctcggactatgccctcatctgatgtctctatccccttcattcatgacaccccaaccactctgtcctttcagttccatgacataccatgttttctttccccagggccttttcccctactaccccttcttcctgggatactcttttcaccacttccccttctattgacttgattaacttctacatctttttaatcttagctcaaatctcctgtcacagagaggtctccctaattggcatttttttgtttctctctctttcaataccttatatatttcctacatattcctgaatccaatttgcttttgtatccatttgcataacctctctctcccacagtagactatatggtcagtgaaggcaggaagtattctgcattatatgtgctttgtttactgtagcattttcagcacttagcatactcagtaaatgtgttgaattattgagtgaatgaacaatttcttgtcttaactatattttgtttccttacagtacccactattatctttctctctggcatcctcaaacttttttgtctacactggccttttccccctaagctttcaagcctgcagttccctgcattgatcagccctttactataatctgtctcctgtctttaatacaacctacttcctattagaacgccaattctttcatttatagccatgtttctacaacaagacattttcccaaagttcctgtttcttctttatccatgcacaacttctcctttaagctttgctttctgcctcatgatatataaaaattacagttgcaaatttgaacaattttctgtaattgccaaatcaaatagcatattctgtaatggaaattacccagaatcccaccatatttggaatgaactgttttcatttttctctcttcattttcagttcttatcgacatacatccataaagttttaattaatggtgatatttaatactctaatatcaaaagtggctacattttctctataatatctctataatttttatatacaaggatgtccttttttgtgatgtgttacaattaagctattttttataattagattgatgtgggttttcatattctcaccatttgaagaccaattggaaaaaatgtctttatgaaacttaatatttctcctttttagactctatccttaaatttccaagagtaggaatattgggtcaaaggatatgactatgtttattgctcttgaaatgtactgtcagactgccttatgaaatatgctaccaatttttattgaacgccattaaaatatgaacatactagcttcactatatctttgccagtgagcttttctcattcctaactctacttgatctattgattcctttgtctccccacattgaaagctcctcctcagtttatgctatgttatcatgcttctttctcagtttgcctttattttctttaccgcaattctcttttctccctggccttatatctttttacccttttacctgcatctgctcttaaggcttcaaatacttattactgaggtggactttgagaaatttgcaaaattttttttgttttgttttgttcttgtttgtttgaagtacttgtgatagcagagtaaattttttaacttaatttaaaattaatgagaagtgaattgtagctagaagtgaaactagggatgctaaacataagaaaaggtacagttaatgacataatattaataattcataattcagcatcctgaatgatgctctgtgagatttctctgcatcactaccataaatcctactttccctaacctagcttgactctgtttctgttcctggaattcaaacaactccaaagaagggtacaagtcagacatattcatccactgaaatattt

SEQ ID NO: 93366 - DNA, 48716 bp, Homo sapiens
aaatcttgccacctgaggagcagctggaggagctgaaaatatttaactggagaagtaaagatgtatggggaatatgacagcgggcttcacatatttgactgtaaatcaagtagaggttaggtcagactccttctgctgggtctcctggcttctgctcttgaccacctacggtccattctcacaccgtttagtaagtcatgtcgctccccagcttaaaaccctcccatcttctttttttcttgagacagagtctcgctctgtcacccaggctggagtgcagtggcgcgatctcagctcactgcaagctccgcctcccggattcatgccattctcctgcctcagcttcccaagtagctgggactacaggtgcccgccaccaygccaggctaatttttttgtatttttagtagagacggggtttcaccacgttagccaggatagtctcaatctcctgacctcgtgatccgcctgcctcggcctcccaaagtgctgggattacaggcgtgagccactgcacctggcctcccctgtcttctggctgcatgaatagaacctgagcgacttgctgtgaggcctttcataatctgccctcgtctctctttccaactttatctcctgtggttcttccctcacttgcccttcaggccacactggccttctcccagctgatccttgaatgcaccagggtctttgcacctgccgtagccttgcttgttcttctgtatgttcctctatgagctcttcatttgccccattcctttctgttgttcagtctctgatcaaaagtcatttcataagaaaggctttgagtttttacctcatcctgctttacagtcttcatagcactctgctccctgaaacagttttgtgtctttgttggttaaatgattttttttcttatctcccccacaaagaatataaacctaaagtggactgagctgtgtctgtcctgttcaccactgcaacctcagggtgtggtatggttttggcatacagcaggtgttcaaaaactatgtgttgagtgaaagaatgaatgaacatgagcccagaaatagctctagagtccagagagctgccgtaggcgggctcagagccttgcctgtccctggaggcatgacgtggagggaaactgccacttaggaaagaaccagcaagtcagtgggaatatggggtttggaatcagacagatgagggtttgagtctttgttctgtcacttcctgcctggctgcaggccttggacaggttatttgaccttgttggccgggcgtggtggctcacatctgtaattccagccctttgggaggccgaggcgggcagattacctgaggttgggagtttgagaccagcctgaccaacatggtgaaatcccatctctactaaaaatacaaaaattgggccaagcacagtggctcacgcctgtaatctcagcactttgggaggctgaggtgggtggatcacgaggtcaggagattgagaccatcctggctaacacagtgaaaccccatctctactaaaaatacaaaaaattagctgggcgaagtggcgggggcctgtagtcccagctactcaggaggctgaggcaggagaatggtgtgaacctgggaggcggagcttgcagtgagccgagatcatgccactgcactccagcctggacgacagagtgagactctatctcaaaaaaaaaaaaaagaaaagaaaagaaaaggaaaagaaagaaaagcctcagtcccttcatctgtaaagacaggggtttgattagaagccaccccagagtggttctggattgattaaaggctgcttctgaagccctgggcaagtgccacacccttagcaagtgctaaatagatgtttgctgtttagtttccacaccaggcccccggggccacaggarctgggggaggtgtttaaggaaggaccatgctactgcaatccctctcacatacaccacttggcttttgtttttctttttgtctttttgttagagacacactctcactctattgcctaggctggagtgcagtgctgtgatcacggctcaccgcagcctcgacctcttgggctcaagtgatcctcctccttcagcctctccagtagctgagactacaggcatgcgccaccactcctgggtaatttttaaatttttttagagacagtgttttccttatgttgtccaggccgcttttaaaattcctgggctcaagtggtctgtctgcctcggcaacccagagcattgggattacaggtgtgtgcactgtgcctggcctgtttttctttcctgtggcactaaccgcccccacagaggggaaagtaagcagtggagccctgggttgagggcggctgttgtaggggcagggactgtccacactgttacttctccactgcccgcctccaacataaccccatcgtgggagctgggtgaggaaatgcatgagcactgattcttcgcaggatttcgagtgttacacatgtggtaatactgctcacatcacttgaatctgcaatcccatgtgaagttggagtatgtggcaagaagcaactctgcgagggtggtgggtggaggagggaggggcccaacccacaggccaggaacccatgtgaggtggccgccttcctctgtctcttgctaatacctgggtgatgggctttatgcatcttgacccagaaaagagcgagtcacaatcgaccaatatgatggaggggatatcactgcacaccaggcaaatacaggctcagctgccaattcccacatccctctagccccttttgatggccagggaactttcttgcttctgttcacatgaaaacaacagttggccctacccatgtaacgaaggaaacacttacatactgtgtacttactacatgctgggcactgttcttaaacactaccagcactgcctgtataattctcccagcaaccctatgaggtggctacaatcattagccccagtttacagatgagccaatggttgcttggtgaggtttagccaattgcacaggcttgcacagccagtaagtggccaggccagggtttggacccaagccatgcagccccagagtctgtgcacttcaccacaatgcgacgtggcctagtcccaaggggaatggcttgccttgtaggcaatgagctgcccatcatcgtgggtgacaagcagaagtgactgagctagacaggggtctcctccacgtattcagtgtgtcccctgtgtgtagctctgagctaagcactctgccaatgccatctcatttcagcccgatgacaccactgccagatggaaccattattccactatatggatgaacaaactgggtttacagagattaggtaactggtccgagatctctggctgctgagggctggagctgggactcaaacaagtttgcttaatgcagatcccaagctcttcacctcttatcagggatggtgtccaatgagggttggctggactagatgacttttacggtcctagccaatccaagatcctgagggactgagagtctggcaagtaaaggggcacactcccctagttactagctctagctctcccctagtaactagttactatgccaaaaatactagtcatcacatttcagttcttttttttttttttgagattgaatctcgctctgttgcccaggctggagtgcagcggcaggatcttgactcactgcaacttctgtctcccgggttcaagcgattctcctgcctcagcctcctgagtagctggaattacaggtgcacaccaccatgcccggctaattttttattttagtagagatgggtttcaccatgttggccaggctggtcttgaactcctgacctcaagatctgcccgcctcagcctccagtttgtttgtttttcttttttttttttttttttgagatggagttttgttcttgatgcccaggctggactgcaatggtgccatctctgctcactgcaatctccgcctcccaggttcaagcgattctcctgcctcagcctcctgagtagctggaattacaggcatgcaccaccatgcccagctaatttttgtacttttagtagagacggggtttctccatgttggtcaggctggtctcgagctcccaacctcaggtgatctgcccgcctcggcctcccaaagtgaagtgctgggattacaggtgtgagccagtgagccgggcctatttgagtttttatgtttaaggatgtatttctcttactattttttttaacacagggtttttcctgaaaagttgcctgaggaacaaagagttaaataagacccttaaaggatcaactctctttgccaggcatctaagtcccctctggggctttgaggagacagtcgctgtctttcctggtggtaccaccaccttccttcattcaacgccgccgcatctgacaaccctgggcacaggaatctgcaccccaggtctccacggtgaatccagcagtcaattttcagagcttgtcctgcctgccccatccacaccgcttggcacatgggtcagcccgcctttacttaccttcttcatctggcttcccggatgtcacatctcttggtttttggttggtttttccagttggcttttccaatttatacctgcagcatggatctctcctctgaactccagatacataaatctgtctatttgacattgccttggatgtctagaaggcatttcaaacttagcaggtcccacacttagctcctaattgtcagtcctgcctccagcacacgcccctctcggtgttccccatcgcagtcgaggacaactgcattcttctagtttctcaggcctcaaaccttagaatcatccgagactcctgtctctcacatatctcatctgtcaacgaatcccatcagctctaccttcaaaatatgtccagaatccaccacctccactgctaacacctggctcactatctcctagtaacctggagggcactgtcttcagtctgatcttcacacagtagccgcagtatgaagacacagggtagaccatgcctctcttcttctccaaactctccagtgggttcctcctagtcaaagtcaaacctcacttggccctctagacctcacctctgcatcctcccgctggccttatctcctccacctctgacccttgctagctctatttcagctccaccggtctcctggccattccctgaacctgaaacatggtctcctaccccagggcctgtgcactggctctcccggtgaggaaaccgctctccttcccatctccaccggcgcgttgcatccttcacctctttgctcacatatccctttctcagagaagcttttactgaggcctctgctcaccctcttctcccctccacattccgtgtcttccttttctatttcgtttctctctatggtacttatggcttatgtaacaaactaatctattgtttatatatttatttttactgtttctctgtgaaaacgtacactcgaaaagggcaggagttttgtctgtttggatcaggctccacccctggaaggtaggacagtgttcagcacagcaggtgctcaataggtgttgttccgtgaatcagcacatcaattgcagcattgtggctaccagggggtcaggatgcgggcggtggagccctctggcctttgtgtggtagccgaggactctgtgtcagcgaccgttttccgggaaacttccgggcgagactcacatcttggaaattcaaatactcaatagctctcgaattctaggaatcttgagaagaggcctggattaaggattcagacgtgggccctcagatgggtgagaaacggggactctgtgtctcctagcggggacagaagggccaggtgacaggccaggcagagtggacggggcttgggcagggggcgggggcaggcagccacacggggcaggagctgcagagctaaagccaggccatgtggactggctgcgggtttcgctgcctagctggtggcattgagcaagttacttaacctttctgaacttccgttttatgattttggaggaaacagtcatagctttctctctggcagagtccgatggcccgagtcccgctccacagtgcgggtggagggcacggaggggtgtgtgtggggggcgacagcccaggaagwctagggggcggcagggcgcgtgggggcgggggttgggagaccgcagggaggatccccgaccttgtctgaagatccaagcaggcggagccgcggtctggtccgcggggtaggcggggcgcaagagtgttcccgggggcggggggccgacccgcgtctaaaggtttccgcgattcacccgccggcgcctggcctggcccagttgcaycacgagcgctgcggacactcggggcggcagtcggtctgtcagtcctcccgccaggtcccgcggcccgcacctgccgcccgcacctgcagctccgcacctgcggccagtgcctactgccctctcttgccgcccgcacctgcagccccgcacctgccgcttgcacctgcagccccgcgctctacccggttcaagcatggctgaccaggcgcccttcgacacggacgtcaacaccctgacccgcttcgtcatggaggagggcaggaaggcccgcggcacgggckagttgacccagctgctcaactcgctctgcacagcagtcaaagccatctcttcggcggtgcgcaaggcgggcatcgcgcacctgtgagtcgggccttgggcggtgggccccgtcctgtctgtctgcctggggagcctgcccggcgggctgacgttgggccctctgagcctcctgccgtcagcctctgtctgtccgtctgatgtctgagcgcctctctcgctctctgtctggtagcccctctctccagaagctggctcagcctcactcaagtcctcatctcctcccttgaccttggaggggcccacctgggggtccgtctcacaggtgtacacctgattccatcttgcattcctcttctctgccctgagcagcctgcctcgtacccstctcagccggccaagtgtgggcacctggcctgcccgtcatacccgccctagcctcagacaggaaagtgctagctcaggtgccttccttccccatttcttctttgtcctccttcactctttctgcaattagggacccaagtcaggtttctaatccagttatctctgacctgaaacaagacctgttaggagcgagtgtcccccccgccccccccgcaagcaggctgggaggtctcctgtgtgtccagagcctttaggagcagcagggcttgtgtgcaaaggagctcccgtgggctgccccttgctgggacagttgccatgctgtgccagaaacaggaaacacccagggcttcaaaacccctatcgatttgcaatgatggtgtgtgcagcctctgcccaattagtggaaagctcaaaagtggtttgtagaatggttctgaatgcgctatggagtgcatctcgaacgtcactgggcacaggaatcatttggggatcttggtaagatgtgtgccctccttccatagctctgggacaggtcctgagattctgcatttctaagaagttctcctgtggtgggtgctgcccatcagatactgtttgtctactcatcacattgtgagtagcaaggggtcaagtggagtggagactcaaaggaccccttcttgtgaggttttttgtaagtcacacaacatcctttcgtttgtgttggtgtgcacaggtattttctttttcttttctttttttttttttttttgagatggaattttgctcttgttgcccaggctggagtgcaatggtgcgatcttggctcaccgcaacctctgcctcccaggttcaagcgattctcctgcctcagtctcccgagtagctgggattacaggcatgtgccaccatgcccagctaattttgtaattttttttagtagaaacggggtttctccatgttggtcaggctggtctcgaactcccgacctccggtgatgccttggcctcccaaagtgctgggattacaggcatgagccgccgtgcgcaggtattttctagctaactgatccacacttttaactgaagtgtaactgggttttcagattgtccatacactttactaacattccccgcacttatgcacactataaaaatgacacatgatgggctgggcgcgtaggctctagcctgtcatcccagcactttgggaggccgaaacaggtggattgcctgaggtcaggagttcaagaccaacctgatcaacatggtgaaaccccgtctctaccaaaaattagctgggtgtggtggcaggcgcctgtaatcccagctactcgggaggctgaggaaggagaattgcttgaacccaggaggcagaggttgcagtgagccgagatcgcatcattgcactccagcctgcgcgacaagagcgtgactttgtcttaaaaaaaaaaaaaaaagacgcatgatgctcagagctgacctgaacaaatacaaccctgctacttgggtttggaatgcatttctccattcttaaaaactcttctccgccccgcatcctgcaatctagattccttttcttactggcaggctgtctggctttggtcccacagtatggactggtggaggtaattcatgtaaaggagtggtatgatcacatttatttttgaatattaagcagacatgttaaggaaggtgatgactccattactgttgcctctggcccctcttaataatacattcctaaggattcttattttagaaacatacccaggtgaaatcttaagctttaatttacagctagtataggtggctcacagctttaactgcctttgaggaccagggatatattttaaaaagagggcttgtcgactgggtgtggtggctcacacctgtaatcccagcactttgggaggctgagacgggtagatcactcaaagtccaggtgtttgagaccagcctggccaacatggtgaaaccctgtctctactaaaaacacaaaaattagccaggcatggtggcrggcgcctgtaatcccagctacttgggaggctgaggcaggagaattgcttgaacccgggaggcggaggttgcagtgagcccagatcgtgccactctactccagcctggcgaccgagtaagactctgtctcaaaaaaagaaaaaaaagggcttgtcatgtctgatattgtttaaaaaatgtgtcagtacctttcacacccctagagagactgagaaatgtaagatgtgttttgaggtgtcccactgtctaagtaaccttagacagtgggaccttggatagtgagattttgatggtggggcctggatgaagcatgttaattttggctacgtaaggtatgcgttttatttatttatttattttgagatagggtcgcactctgttgcccaggctggagtgcagtggtgtgataatggctcactgcagcctcaacctcccaggctgaattggtgctcccacctcagcctcccctgtagctgggactacaggcatgtgccaccatgccggataatttttgtgtttttgtagagatggggttttgttatgttgcccaggctggtctcaaattcctgggctcaagcgatctgcccaccttggcctcccaaaatgctgggattacaggtatgagccactgtgcctggccaatatgtgtacttttatactagatagttgtgaataccaggttttaaagaaatactatgttgcactcattgacaaaaatttaaaccattcaaaagaattcaagggaagagtgaaacccaccccmtatatatcccatggggtatccactgcaaataatttactgcttatttttccggatactcttttacagtcatataagtttacacatgaacacatatttacatatgcctataatagcagacaaaatgggatcacaatacacatttctgtagtttgctttgttatttaacattattcaagaaacatccattaatatcgggacatctacatctacctccttttaactgctgtgtgctgctcccctgcacacatcatgaggtattgaagtttttctctattttggggcactttggtttttactagcctttgggtattacagtgctgtacccttggaactggtgtgcatgcctggttgttggggtagctgacaggactagatgctggacactgaggtgatcttgtgggaagttcagcgtttggccattttcagtatcacatgtcatcaggcaggtagcatgattctcaagccaggcccccaacctacattcattccaggcattgaaatccagaaagaaaaaccagcattcctgcaaagatcttgttagtgctgaagaccggacctagaagagcatgtacccagagggacggggtgattgcagatttgcaggaacctcactggagccagtttagggagctcacccaggatcattatggaaacatcaggagtttaagcacagagcctggtgtaacctaaagttgctattgtagtcactttcattgctcctgttaaaatgttcatggaatcattgagttttagactgaaagagactcaacagtcagctagtctatcacctcctcatacagaagaggaccctgagaccgaggaagatgagatgacttggcctgtggccgggatctcaggaaccccggattggaggtcttttggccacactacacatctcttcctttattttttagaaatcaattagaattcaccaaactctaaatctcatctattagttaactggtttttttttttttttttttttttgagacagggcctcactctcactcaggctggtgtgcagtggtgcaatctcagcttactgcaacctctgcctcccgggttcaagtgattctcctgcctcaatttcccgagtagctgagattacaggcgtacactaccatacctggctaatttttgtatttttagtagagatrggattttgccaagttgaccagggtcgaactggcctcaagtgatccacctgcctcggcctcccaaagtgctggrattagaagtgtgagccactgcgcccggcctaatttttgtatttttagtagagacagggtttagccatgttggccaggcgacatttttgatgtgaattcaggcttagataccaaggagtcattgctttgggcaaatgtgccctgggagacttccctctgggcttctggctccctccatccactcttgggagagaaactgtgcagatcagaacagtctgcaacttgaagtcaagctgatgaagttgtggttcaaatgtcaaattcgagtgttgtccactttgcattcctttgggagaaagtggtgctccagtggcttcaggttttttgttttgtggagttgacttccctttgtatccatttccaaatcactgactgaagaattcactgatttcattcaattaacaaaatattactgaacatccaccatgtacaaagttccagaagacgagaacaacacagagtttactctgtaggaaaaaatatttgtatcgttctaacacgcaatagaggttttgaaagatgctttctttttctttcttttttttttttttgaggcggagtctcgctctgttgcccttgctggagtgcagtggggcgatctcagctcactgcaacctccgcctcccgggttcatgccattctcctgcctcagcctcccatagctgggattacaggcgcccaccaccaagcccagctaatttttttgtattttcagtagagacggggtttctccatgttggtcaggctggtctcaaactcctgacctcaggtgatctgcccgccccggcctcccaaagtcctgggattacaggcgtgagccactgcgcccggtctgaaagatgctttcgcggtggctcacgcctgtaatcctagcgctttgggaggccgagtcgggcggatcacgaggtcaggagatcgagaccatcctggccaacacggtgaaaccccgtctctaccaaaaaatacaaaaaaattagccgggcgtggtggcgggcgcctgtaatcccagctacttgggaggctgaggcaggagaatgttgtgaatctgggaggcggagcttgcagtgagccgagatcgcgccactgcactccagcctgggcgacatagggagactccgtctcaaaaaaaaaagaaagatgctttcatagaggtgccaaaaatacgattcatggtgaaggactgtggagcgccaagaatgggcacgtgcaggggaagcaaaaggcccggcggctggaccgcagttcaggctggaggtcacagggggaggagtcctgaggtgggaaagtgtttctggaaaagttgcccactcaatttgaccaaagcatggagtactcatggtagggcgttcgtggatgtgaaattgtgggtacattggggaagcatcaaatggcaagggtgaacactttacacttttgggggtatagaaaaggagagatcaaggattttgaaagttttttgagtggggcagttgcgtgactggagacaaatctggagaaggtgtggctggaagtatatcggaagagcgaaagataggatatgggaaaaccagtggcaagggggagccgtcagttgagtagccagcagagctgcagccttggaggggagaggaaggatttggaagaagtctgagcatggattagatgagaagggctgtgagggagtttctgaaatcgctggtcctagcaattgaatgcagagcccatgccaccacaaaacaaaacaacacaaaaacaaaaacaaggaggagctggtttttagtctggggaaggagggaagatgatcccaacattttggaaacgctgaacttgagatgttagagggtgatctgttgggagatgctgtccagctgcaggctgttttgcctgtctgttttggcacgcttgccctgaggcagagaaaagaggaggagatctggaccagtttagcagacaggaatgtgcagggattcagagcacgttttggagagagatggagccaagcttagattcctggccctgccattcaacrtctgtgaggattgggctgttgatgtgacatcactgaacctgtttctccaattgttaagatggagacagcctcagagactcrtaggaggatcaattaagtttactaattgggtaccaatgttattaatatcattgttttcctgaaggctatatttctttatttttcagacagagtctagctctgtcacccaggctggagggctgtggtgtggtgtgatctcggttcactgcaacctccacctccaaggttcaggtgattttcctgcctcagccttccaggtagctgggattataggttcctgccaccacactcaactaatttttgtatttttagtagagacggggtttcactatgttggccagtctggtcttgaactcctcacttcgtcatccacccgcctcagcctcccaaagtgctgggcttacaagtgtgagccaccgtgcctggtctattttattttcatttttttgtaaacttttatttgcatgttttgttcttcatttcttagcagtagcctgtatgctatcagcagggagagagtccaggctagcatgttacatattagaacaatgttgcacccaagagtggctgcaggaaatgtcctcccatcagactcatattatgtccagaagagttacttttatatatggggtcctctcagstgtttgacagaagaaataataaagagcttcagatttcgttttagaatgacacgtcagctaatacacgtttaggcttatcttccaatttgcagtttttggcattaagcttttagaaactttaccagatttattttatgtttcttgaattctcttctccacatgaccaaggagtgaaattgcaagtttgtttgcataaaagaagcgcagacagccacgttccatcctgtttaccagtttaggccccggtgaatgcaagcagaggcaggtatttgtgacctttgaaagcagctctcactagcacctcttcaatgtatttctgaacctttggatgttcctggctgggcaaatggttgattaccatggaatcaagcagtaacaagccagtcttacctttgactttagtgataaggattaagtaataatctccctcccttttggttgagctgcgtgttccgagcccgagtctggttcttctgtgtgctgtgtgaagtgttgctgctgcaatcgtgttactcagtcacagtgacttcgggaggagatggtcctaagtcagcagatccaggcagccctggagggctctagttctgtcagcccctggctccaatccttgtgtccttcagtgttttagagatgctgtggaaggcagcctcccccaatcatcacaaatctgcatgttcagtgtcacaaagtccatggctgtgaaatggttcattctgttttagaaaccatttgtaaacttggaaaacaatgctaaaatttaattaaaatatccaaggatttcaaaatactggccacattaatctatgcttctaaggtgttctccatcatatgaattaaaatgacttagagctctttaaatttttcagtgggatttacagtaaaagtaaagaagagatattataggcagtttctccagttgagttctgctccccaaactccaggaagagctccttcgtatctctggggctggaaagggaaaggacacagagacttcaaccctgcctggtgcttttccactttacttgggctgcagggccaactaatttgaataaaattgaagtgaaatgtcaagaacatctcaaataaataatattcccagtgagattttatcaaatgtaaacttggagcacttttttcttcttttgccagttccttattggctgtcctccaagaagttgcctgcaaaactggtttagagatacctccccttcccccaatccccagatcaacccacacttacttagtggatgcctgcggggctctattgtcatgtggctgccttggtggggagtactatgaaccaggtgcaccgcgcgcattatccatgatccccacaaacatggccagaaacagccactcaggggctttgcacaacttgatgtcacatcatcagtaagaagcaaaggcagaatttgaactgaggtctttctggtkctgagttcttgcttctccgcatggttgtgttatgccaagggagctagaggtggaaacggtaatatttcttgcacacttgcctatgcaccaggcacttttctgaccactttacctgtatcaactcagttatgccccctctctgtagactatgaagcagacacactacattcccatattgcagatgaaccagaggtcacagatgctaagtgactttccccggctgctgagcatggagcagagctgggattggaaccctggtggtgtagagtgccagcctggggccttgaccattacactctagtttcctgaggaaccgggtgaaaggccattgcatttgtctaacgctaagtttgcacagcaaacacacttttaccaagaagctatgctaatctggagggtttttttcaggagttgggagtgttggatggtagaggttatgcaggcaggcattaccaataccactgggtctaatggagtttatgatcttaggaattcttggatccttttattactctctaaatttattcatccatttacattgagaacttactatgtgcaggcattgttctaggtgctaaggatacatggtgaacaaaatattcttttttccaggatcaagactgataggtctttcttcctccagaggcacattcagatgtgccatgtttatgtaagagtttcggtccccttggagtatacactcggcatttacctggtgccctgtacttttgcttcagacctcactagaaaaacctctggctgcctgtaaggttctaatttcgaatgtcccaggtagagggctgtgccatcctcaggatggcccaacaggtgaggtgagctcagaggccctccactcttggcattcttgtacaaagcaggttgggcccaggcctcttaagatcgaggttttaggtagcatttccaggggtggcagccctgtctgtgccctccctcccagtggctcttagaagagagtgggccattcctaaggccatgaagacaatgccccataaaggtcatgcttccatgcctgagggctctcccggtcctctcttggtgggggttgagagactagaccctcccccctacctccccaggagtgggggttatgtgatgtcaccaatgctggtgtctcactcttgcacacattttccaggctcctggcaccatggaagatctcctggaggctggtgccttcagcttcaggctctgatccttccttgttgctttaattatccgtcttaccacccaaatcaattaacaggcttcctagttaacaggcttccattttctaggccaaggcttgagaggtgaattagttcttccaagcagctgtggttttatttccagaagcgcccccatatcaacagctgtgcctattcaatggccatggatctgtgaagggcacgagcaggactcatgctaatcagctctgctttttctatattaaaaaaaacctttggccaggtgtggtggctcacgcctgtaatcccakcactttgggaggccaagatgggcggatcgtggggtcaggagttcgacamcagcctggtcaacatggtgagaccctgtctctactaaaaatacaaaaattagccaggtgtggtggcaggtgcctgtaatcccagctactcgggaggctgagacaggagaatcgcttgaacccgggagggggaggttgcagtaagccaagatctcgccattgcactccagcctgggtgacggagcgagactctgtctcaaaacaaacaaaaaacaacaacaaaaagcctttaattgaaattacccaatagattgcatgtaatatatacttgttttataaacytgatacaacatagaacgagattttaaagtatttaaatatagtgtgaatcatgattagtgtttcctcatcattgttctctttgctattctcaagaaaatctcagcttcaacttggatatatggaaaccaaatatccgggtctctggaacagtgcaatttaaaagcatgtcctagaattttcagccgtggtttgaaagccacctattgattcacacatgcctggaagtagctgacatttgtgcaacactgtgccctgattcggctggggctctggggttctatgcagcccgtttggcctccttgctgtgaggtgcggggcatttaaattctgttgccaacagtagcggccagtggtgctctggcctcagcaggtgccctgttctcttgtttgctgcctgctacttctcaaggaaggcctcaagccactttgctccttatgctctgacatttctcctcttaggcccaatacagaaaaggtggagaaaacctcacaatgttgcctttcccctctatgataaatttttttttttttttttgagacagagtctctgtggcccagtctagagtgcagtggtgtgacctcggctcactgcaacctttgcctcctgggttcaagcaattcttgtgcctcggccttccaagtagctgggattgtaggcatgtgccaccacacctggctaatttttgtatttttagtagaggtgggctttgaccatgttggcaggctggtctcgaactcctgtcctcaagtgatccacatgccttggcctcccaaaatgttgggatcacaggcatgagccactgtgtctggccacctctgtgataacttttattcagaaaacatttccttggcagatcaagtcactggctcaatcaaaattgcccttcctgcccctgcatgatcagcccccractgctactgttgactccttttctggcagtggggctgaggggcagagcaggggagggaggtaggggaagggagctaggcctggaggtttacatctggctcagttcagcccatgtcttggccatttcacctgttcctctcctttaattgtaaggcacagttggcctggggagggcttttttggacagggtygtgtgatggtttcccatatccctccagcctcatttgctgccttttcccatccctagagaatggcaaattgggagctgatctagaagggagctgggtggtgtgtgcaaggctccagtcgagtcccacggagggtagttggtgtcatcacctctggttcacagctgcctcctggaaacgccttccaaggcaggatggtcttctggatccactgggctctcctggagtcttcctagaacttcagacgggggatggcagccgctgcattcgctagggctcagggctgtctcaccaggagctgagacccacacctgctattgactctaggctgctgagcccgccctctctaggtggtgattggaatatagagtgaatgctcttgttaatctatccttcagggccattcaggaatgatgactgatcagcaggcagacatttataatttcttttctttttctttctgaggtggaatttcactcttttttgcccaggctggagtgcagtggtgtgatctcggctcactgcaacctccgcctcccgggttcaggtgactctcctatctcagcctccctactagctgggattacaggcgcccgccaccacgcccggctaatttttttttttttttttgagatggagtttcactcttgttgcccaggctggagtgcaatagcgtgatctcagcttactgcaacctctgcctcccgggttcaagcgattctcctgcctcagcctcctgagtagctgggattacaggcacatgccaccatacccagctaagtttgtatttttagtagagacagggtttctccatgttggtcaggctggtcttgaactcccagcctcaggtgatccacctgcctcagcctcccaaagtgttgggattacaggtgtgagccaccgcgactggccaatttttgtatttttagtagagatgggatttcaccatgttggccaggctggtctcgaaatcctgaacctcaggtaatccgcctgccttagcttcccaaagtgctgagattacaggtgtgagccactgtgcctggccagacatttagtatttctaagggggcttctgaaaacttatggagaaaataaactgcatgtgatcttcagctaattaagtccttgagcttgtttctgaggactttttcctctctcagaatcacagaagccttgcctgcttgccacttttcattgacctgtgtaaatgtgttactcggggaaatctcaagcccttcttagggtccccgaggtgtgacgggggaggcttgatggagcctgcgtctggtcctgactgctcatcayggctgtgcagccctgacaggactaagccagggtggtgggaccagcayggtgtggccagcttaactcactgcggctcagaggagacctggagacatgagggacacctggacattgttgctatcaacatggcagcatagttggctggcagccgggggaatttattctcttgacccactgtttctaccttaggatccttttcctgtgcttttctggaagcttttcctaacgccaggattaaccaggagaagccttccctcaagatatcttagcaaagttataaagtacgtgaacattgagttggagcagcccagagtaatctatcttcatgtgttctcttacacttcaaagacaactggaggatagctggagaagggtccttcctgctagaagaggggarggacgcttactgggggtaaagagaagaggcgttcccaagaaaggggcaggaaccagcttaacgcatctgtcaccacccagcggggtcatggaaacgcraagcaggtggagcccatttcctgccgtggtttggtggacgcaggcagccccatccatgcaggtgctaaaggccctgtgtggcttggtggatgcaggcagccctgtccatggaggtgctgagggtcctgcgtgatttggtggatgcgggcggccctgtccttgcaggtggtgagggtcctgcgtggtttggtggacgcgggcagctccgtcattctttctttttgacggagtctcgctctgtcgcccaggctggagcgcaggggcgccatctgggctcactgcaagctccacttcccgggttcacgcctttctcctgcctcagcctcccgagtagctgggaccacaggcgcctgccaccgtccccggctaattttttgtatttktagtagagacggggtttcactgtgttagccaggatggtctcgatctcctgacctcgtgatccgctcgcctcggcctcccaaagtgctgggattacaggcgtgagccactgtgcccggccccagccctgtcagttctgtggcgagggcctgcatggcttggtggatgcgggcagccccgtcagttctgtggtgagagccccgcatggcttggtggatgcgggccgccctgtccatgcaggtgctgaggaccctgtgccatgcgtccttgcagagtgctgtgtggccccacaagcctaccatcgtgaacggtgtaccaccccttctgtggccctcagcttctctgtgttggttcctctgtgtgccaagggtaggagccatctgagactcttggaatggcagtggggagggctggctggtggtcatgatttgctaagtcacccaccctgacactgactgtaacctctcgtaggtctgggcatgatctggggcaacagaagttgcttctcactttaatctggccaactgctgagtctgcaagctcggaaaatgcagtccactgcatgaggaaatagcctactttcatttaatcccacaaaacaagtcacggtgcccctgtgtttgggacacagttacaggataacttgtctgtctctgggtggtggggctggcccaggagtactgcaaatcagagccatccttacaaggactttctccctccggtctcctctctctgaatttagatgcttcctggatccaggcatcacaggaaaaagacctcaggctttacaaaattacttgtataaatgtgcacatagtacccactcccttccatttggaaatatgtgaaaaatgtacttactgtttcctttggctaaattgctaacaaacagctcttctctggagtcattactagctgacttatttgggcttctttagggctttttcatttcctcccattctttcttttttttatttttttgagacagcgtttcgctcttgttgcccaggctggagtgcaatggtgcgatctcggctcactgcaacctccgcctcctgggttcaagggattctcctgcctcagcttcccaagtagctgggattacagacatgtgccaccacgcccagctaatttttatgtatttagtagagataggacttcaccatattggtcaggctggtctcaattttctgacctcaggggatccacccgccttggcctcccaaagtgctgggattacaggcgtgagccaccgtgcctggcccatttcctcctgttcttttttttttttttttttgagatggagtctcgctttgtcgcccaggctggagtgcagtgacgcaatctcggctcactgcaagctccgcctcccgggttcacgccattcttctgcctcagcctcctgagtagctgggactacaggtgcccgccaccatgcccggctaattttttgtgtttttagtagagagagggcttcaccatgttgatcaggctggtctcgatctcctgacctcaggtggatccacccacctcggcctcccaaagtgctgggattacaggcatgagccaccgtgcccggcctatttcctcccattcttacgaaaaacattcaaagtaccattcagcttgaatgcccccctagagatcttcctgaccatctaaattaaccatctagcctctcatctccctctcctgtcaccttgtttttgttttatgtcagcgagcatctgtcactatctgacatatctttttcattccaaaacacttatttatttcttgtttgtgctcaccccagtagaatatacgctccacaagggcgggatctgatctaccgtgttcggcactgtaaccccagcatctagaacggttccccgtgcacagcaggtccctggtgaatatttgtagaataaatgagcactcagatagctgtctaggaagattttgagtaaaagagaccacatggcctgaatgttcctgagggaagtgcctgagcagatgggacttgggccaaaaggtaatataggactttccttctgcacctgcctcagtgcctcatccgtgtccagtgccttcggcccctctgcccagccctcccggccccccgagctgtccctgtcaggctgcacctattagtgctaggccttttgtgtatgtcatctcatgcaatcctctgacagccgcgtgggggcagacttcacttccctctttggacacatgtgaaagggagggaggctcagaaagagcaggggagcctgggagctgaggcctggacctggtctctgccttgaagcccttcttctggtccatcggtgctatttgccctccggaatcagaagtgagtttgacagtgggctgggcacggtggctcatgcctgtaatcccagcactttgggaggctgaggtgggtggatcacttgaggtcaggagttcgagaccagcctggccaacatggtgaaaccctgtctgtactaaaaatacaaaaattagctggatgtggtggcatacggctatagtcccagctactcaggagggtgaggcacgagaatcgcttgaacctgggaggcggaggttgcagtgagccgagatcacgcaactgcacaccagcctggacaacagagtgacactgtctccaaaaataaaaataaaaataaaaataaaaataatcataaagtgactttgacagtgcaactctcaggctggaaaggagagagcactgctgctagtggggtcaccgagggagctgcatttgagctggtgggccctgccaagtccctctggcctcccagattttggctgccttcttcctgcacaagccccagcctcacaattggggtcagaaaaagatcatgtggaaataggatcgaaagcccagggtacatggggtggagctcaaagctcgatagacatcttggtcttttactcatgaaataggagtgatgggtgaaaagagaagcagcaggaggagggctggtgggatgagatgtgctttgcaggctggaaagggaatgatgccaagagtggctgaaagacgctgacaggcgggcccgagaagacagccggagctagctcctgagatagtcaggccggaccaggcatgtgggtttggatggtttctaggaggggctcagttttgcccagccagtcacagcgagttatgttttgggcaaatgcacttgcaggagctgaagcagtcacggccactggatcagggaccgtcagttcccaggcgagcgcacatcgccatcatggccaagggcgcgggtgtgcccttaccacccactttcagaggcttgctggtgtcttcaaagacccatcttttccccttcccacatcaaggctctcgccttgctctgtgcatccttcctgtgagacgtctccctcctttctgtgttcagggcaaccccaggctatgacaacctgccgcttctgtaagtctaagaagctaggctgcgtttagacaagccactggattctgggaattctataattactgacttgcaggttgcttaaaaatagtgaaaactccaggatccctgcaacttccatgccctaggactcctgccaggggcccagggtgtcaccaagagagccctggcctgggagtcataggcagggtctcgcctccaccctctgcctgggagtcataggcagcgtctcacttctaccctctgcctgtgtggagaagtccacaggagtcttgggtctgagttttctcctctatgaaatgaggcagaggggccggttgatgctttgtttcttttagggtctttttagttataaagccataaaccccttggcttggctcgmaactcaggctacccccgacccaggcttccttgcttgctgggtctctctattgattcgtttaacccgtgtgtttgggggccaacactggttctttctgggcaaaaccaaaaacacccgcaaactttttatgtaaaaagcactgagacacatactgcaataaacagatatctactatatctgtagtattaaaaatatttcatgggggagtatggttgaggaaaaaatgttctaaaaagctccctaggggaatcataatgaaaacaaagttaagaaacactgatttaaccacaaaagtgtgcagggcaccatgacaggttcgaggtgaagaggcagatgatagtatctcctcctctctagggtctgtccagaccttcctgccttgttctcccaagctgatgtcctccttcctttcttctaaatatatatatatatatatttttttttagacggaatcttgctctgtcgcccaggctggagtgcagtggtgcgatctcggctcactgcaagctccacctcccgggttcacaccattctcctgcctcagcatcctgaatagctgggactacgggcgcccgccaccacacccggctaattttttgtattttttttttttttttttttttgagacggagtctcgctctgtcgcccaggctggcatgcagtggcacgatctcggctcactgcaagctccgcctcctgggttcacgccattctcctgcctcagcctcccaagtagctgggactacaggcacccaccaccacacccggctacttttttgtattttttaatagagacggggtttcaccatgttagccaggatggtctcgatcycctgacctcgtgatccacccgcctcagcctcccaaagtgctgggattacaggcgtgagccaccacgcccggcccttttttaaaaaaattattattatactttaagttctgggatacacatgcagaatgcgtaggtttgttacataggtataaacatgccatggtggtttgctgcacccatcaatctgtcatctacattaggtatttctcctaatgctctccctcccctagtccccagctccctgagaggccccagtgtgtgatgttcccctccctgtgtctatgtgttctcattgttcaactcccatttatgagtgagaacatgtggtgtttggttttctgttcctgtattagtttgctgagaatgatggattccagcttcatccrtgtccctgcaaaggacatgaactctttcttctaaatcttaccgaacactcacttttggtgggtttatggactcatctacatgttctggtggtcatggcttattttttgtggcttttgttccctgtagctatggcattgctggttctaccaacgtgacaggtgatcaagttaagaagctggacgtcctctccaacgacctggttatgaacatgttaaagtcatcctttgccacktgtgttctcgtgtcagaagaagataaacacgccatcatagtggaaccggagaaaagggtgggtctgtacttccaccattgagggttttaatgtagccggtcttcttcccagcttcataattgactccacttgttcagctgagctgggtttctgggagtccctctagatccytgctgtggtcttttcatagcttccacctcactgctgccatctctygaatcctccctgagccactgtgcagatgagtgttgtggctcacgccgccttctccccagtggactcccacaaactcatctccatttctaactttttattgccatgtttaaggctcttcaaaccctggcttctgttggtcacctcttgtactacatccctatccaccaaattcctgaccttcacactgaccctcctgttgacctagactgcttgaaacttccatccctgatgcacgcattggagtccctattggtctgtctctgcttcttttttttttttttgagacagtgttttgctcttgttgcccagtctggtgtacagtggtgtgatcttggctcactgcaacctccgcctcctgggttcaagcgattctcctgcctcagcctcctgagtagctaggattacaggttcccgccaccacacctggctaatttttgtatttttagtggagatgaggtttcaccatgttggccaggctggccttgaactcctgacctcaagtgacccgcccaccttggcctcccaaagtgctgggattacaggtgtgagccaccacacctggcgttatctctgctttttgagagcagaaaatgaatcttatttgtctctgtgtcccagtgtctagtgcaatgcctggcacattggagggcctcaacaacaaatgactgttgaaaaagattgttaaatgaaagagtattcccagcttttataaaacaacaattgtaattagaaaaaaaaacttctgagattagaagtgcagttatatgggcttactatctttcccagtttgagaggaactgggaacatgaaggagtagaattaggaaaaaacaatgagaagatgaagaggctgcctgtcctcaccctattaagagggcaggagccacatctgatgaagttgtttttcatcattcctaaaatagccgtacatgccagacttgaagttcatgtttttctcagctgggcctttcaaggtctttggcagctttaggcgtatggcttagatttgttgtttaatattctccatcactcacgccggacttctcttgtctatcatgggccttcatgataggcagcttcctgtgttccagtttccagttcctcctgcattagtgagggtggtctgtgaagagcaagagggcagggaatcatgttaatctgctacagacatttaaaaacgacattgtaaagtggctaatttggagatggaaaactcccagtgatgtgctggtaaactgggtctcaaagcaaacaaacaagtctctgatatgtccacttgcctctgtcaatggtgtgaatactctcccatcgttgattttaagctaccaatgtgatatcactgaaggcagagttgggaagagatgtgcaccgttagctcctgagagccgataccagccagctcctgcacaccactgaaaatcccactcaaaacaggaatctgcggtattcccactaccactgaaagttatctactttgggaattacgctagaaatttgttttgtttagttttgtttttagagacagggcctcattctgtcacccagactggagtgcacagtcatggctcactgcagcctcgaactcctggctcaagtgatacctcctgtctcagcctcctgagtagctgggactacagatgtgcagcatcatgcccagctaattgaattttttttttttttttttttttttttttttacagaaggagtctctctatgctgcccaggctggtctcaaactcctgggctcaagcaatcctcctgtcttagcctcccaaagtgctaggattaggcatgagccaccgtgcccagccaggatatttttgaaaactctatgcaccccaacctcaaggggcatctgtaagacctccatgagaagtttcttatagatctcaaccctagcaaagtctctgcttcacctaaggaattatttttttccttacaaataaaggaaaatgagtgactaaccttctttttcctttggctgccaggaaactcaatgcaaaattatgatttgattatatcaacaatataggaaatcatgacttatctgtattccattaccttcatctgcacctcttaagtggtattttctctgtttaatggtcttgtgtgtatgtgtgtgtatctgtgcattctgtatgccatctcatgccttccatgacagtacaaataaataagacccacattttttgaactttcttctaaattcccattcttagcccctaatgtatactcctttagtgtatcttgctataacattttaaggttgtatttcttttttctgtgctcagggtaaatatgtggtctgttttgatccccttgatggatcttccaacatcgattgccttgtgtccgttggaaccatttttggcatctatagaaaggtaaaaygtgatatcttaagcacttggtttggggacagaagttaagattgagcatccagtcctatttcactgtggcagagcagccggagtggagatcatgaaactgtgagactgaagtagatttgtatctcaagttctgagcttttcagcactaattgcatgacgaagacccactagattgttgaaagagaatatagggtaaaatatgggtgggaagagaaggatatttcactctttttactatgtcttactttttatgatagaaaatgagatttaaaaaagaggcagtagagggtaagtatagtgatgatacgatgtgaactcagagttgagagtgtaagacaacaatagagactatgtcaaaactgtcctttaagtcccctagtcaatggtctataagctatgagccccgggctgagtccagcctgtggcctaatgtgtacagcctgtgaacaaagaataaccatttttacatttttaaatagttgaaaaaaactaaagaacaaagtttcgtgatccattttaagttttactcttcacgaatgaagctttaattggcatttggtcacattcattttttcacatactgcctttggctgattctctgctgcactgtcaaagttttgtagttatgatagagactgtatggcccataaaactgaaaaatttactatctgtctgtctgtagaaacagtttactgagctttgctctaagtcgtagaaagcacacagcataggatgagaatccagccctgctcgggtctcctaacacctgactcgggcagtcacccctcctccagagctgctttttctgagagagagagagagagagaaagagagagagagagaggagagagaggagagggaggaggaggaggagagggaggagagggagagggagaggtgctcaattatacaaataagtgaaaaatagaatgaaaacccatccacccatcaggaaacatgataaaatccaaggtacatcctcttagctttagctcttgttttgttttattttttcaaagtatatattttaggccggatgcggtggctcacgcctgtaatcccagcactttgggaggccgaggtgggtggatcacaaggtcaggagattgagactgccttggctaacactgtgaaaccccgtctctactaaaaatacaaaaaaacagccaggcatggtggtgggcgcctgtagtcccgggaggctgaggcaggagaatcgcttgaacctgggaggtggaggttgcagtgagccgagatcacaccactgcactccagcctgggcaacagaacaagactccgtctcaaaaaaaaaagtatatatatatatagttttaacagctttggggggtacaaatagtttttggtgacatgaatgaattgtatagtggtgaagtctgagattttagtttatacctcacgagaatagtatatattgtatccaatatgcagtttttttatccctcatcccctcccatcacccccttctaagtctccaaagtctaccataccattctatattcagctcttgtttatttcagaactgaaacctcacaggctggaatcgactgaagaggttggttcagctgaactctgttctaggacacaaaggcattaacttaagaactgagacccttggcctagcgagatggctcacgcctgtaatcccagcactttgggaggccraggtgggcggatcatgaggtcaggagattgagaccatcctggctaacacggtgaaaccccgtctctactaaaaattacaaaaaattaactgggcatggtggcgggcgcctgtagtcccaggtactcaggaggctgaggcaggagaatggcatgaacctgggaggtggaggttgcagtgagccaagatcgckctactggactccagtcygggtgacagagcwagactccgtctcaaaaaaaaaaaaaaagaactgagacccaaatttgcactttatctctaaaagtgacttattgtctagtattatacataatttcctttcaaatatgtgaaaagtagagcccccatggcacagttatctttggtcattggaacgtattttgctttttatcttgggtaagaggcagatccacatcacaatcagtttgaggaatagaagattcaaattctcatactagaaaggcaaaaaggcaacartttatccattttccaagtcatgccaaggaacataccatttctgttgtagacatggaagaatgcaattttccttgcaaaatatcaaatccacagaatagcaggagaggtttgtagcaaaattcttccttgcagaggaagacatctggctaatgtgttaaccacaactaaagcagtgttgatgtttactaagcccattctccatctcagtccccccaaataatactttttaaggaaaaaaaacctgggaaattgagagacattggctatcaactaaaaaaaaaaaatcaagccagcttgcaacagcagcttgaattatgaatgacagaattctcaacaataaggctcggctgtcttctcaataaaccagaagtgacttttttaaaagacagaaagtggggcctggtgcggtggctcaccccggtaatcccagcactttgggaggcccaggcgggcggatcacgaggtcaggagattgcgaccatcctggctaacacggtgaaaccccatctccaccaaaaatacaaaaaatcagccgggtgtggtggcaggcccctgtagtcccagctacctgggaggctgaggcaggagaatggtgtgaacctgggaggcggagcttgcagtgagccgagatcgcgccactgcactccagcctgggtgacagagcaagactctgtctcaaaaaataaataaatwaattaattaattaataaaaagaaagtgatgatgagtatgacacagacctctaagtcatttcagtttttkgaagccttattgattgcttgaaacagctgaaaccagttgagggctcatgaggcataaacatagacatctataatgcttccaaggggatttttcctgctttctgcagagatgattgttggctagaatcgcaccatggtgcccacgcccagtggggcagcatcagtaactgtgaccctgccatggtgaccaggccttgctacacgattcctggaaaggcacgtggaaggatgtgtggtcatgttgcatgcagctcctgccacagcatctttccagggcctaccgactactactatttcttttttgagacagagtctctctctgtcgcccaggctggagtgcagtggcgccatctcagctccctgcgacctctgcctccctggttcaagcgattttcctgcctcagcctcctgagtagctgggactacaggcgcccaccaccacgcttggctaattttttgtatttttagtagagacggggtttcattgttttagccaggatggtctcgatctcctgacctcgtgatccgcccacctcggcctcccaaagtgctggaattacaggcgtgagccaccgcgcccggccacgactactactattctttctctttcttctccctgtccctcccccttctccctccctcctcctccccctgctcctcctcgtcccccccttcctcctctgccttcttcccctcctccttctccctcctcttcttcttccttttcttccttcttcctttttctttctttttttctttttttgagatggagtctcctgtgtcgcccaggctggagtgcagtagcacgatctcggctcactgcaagccctgcctcccgggttcacgccattctcctgcctcagcctcccgagtagctgggactacaggcgcccgccaccacgcttggctaattttttttgtatttttagtagagacggggtttcaccgtgtgttagccaggatggtggcaatctcctgacctcgtgatccgcccgcctcggcctcccaaagtgctaggattacaggcgtgagccactgcgtccggccttttttttttcttcttttttttcttttttttgagacaaggtctcactctgtcgcccaggctgagagcagtggcgccatcatggctcactgcagcctcaccctcccgggtttaagccatcctcctacctcagcctcctgagtggctgggactacaggtgcaccaccacacctggctaatttttgtattgtctgtagagacaagggggtctcgctatgtttcccaggctggtgttgaactcctgggctgaggcgatcctcccgcctcgacctcccaaagtgttgggattacgggcatgagccacggtgcctggccccaccagtgtctggctggagacatcctgacagggcgaattctcctgcaaagctgggtaaccatcatggtttgtccaaatattgagttgaaatctgtttcattttgctcacttggctgtttagagcataagaaaataagattctttgacatgtttggaaacagtgtttctgccctcccaataatgcccaccacacccactttttttccctttaagctgaacatctttcacaggagagggatctgagacttctctctagcctgatcaccctctactggacatactctaacttgcaatgtcctttacagctcccaccacaaaagcagagattcagaaaagtagggtttggtttctgctccgaggaaagaccactgtggacgtgacagtctctcctcccccaggccctccgtttctgtgcctacttctccttatgtgatgacatggaataatatgtgatgacatggagccagtgcctacagcaggtggtggcctcagataggcagagaaaggaagggtccagaggtttctgattttgccaagtgctccgtgctcattggtccctgggcatctgcaggagaatggaatatgtttcccttggaggaaaggcatgcattgctgagcatttggaggaaggaattagaaagggggctgatcccagctctttgggaggctgaggcaggcggatcacctgaggtccagagttcgagaccatcttggccaacatggtgaaaccccatctctactaaaaataaaaaaaaaaattagccaggcgtggtggtgggcgcctgtaatcccagctacttgggaggctgaggcaggagaatcacttgaacccaagaggtggaggttgtagtgagccaagattgtgccactgcactccagcctggcgatagagcaagactctgtctccaaaaaaaaaaaaaaaaaaaagttgggggctgggctagaaaagaattcctccaaatccatggctcagtgggataattttctcttcrttttgagtatgtgggtcatagacaagtattactattattttttattccgtgcgaggaagtgtataaatgtagagcatttggtgaccgtatgtcagggaagggctgtttacttttgcacctttgccacaggccggcacggatggttctgggcgaggtgaatctctgggaaaaggggcctttattggcagagaactggttacttgaagcctgcagtgggaggagaggagagttagagtcctgagtccacccactgtgtacctggcttcaagggaagctggtgattgttaaaatgagcctctgacaggcagcgcatgttgacaaaggccattaatttcatttttcaaggttgtgcattggcaaaacttggaattattccctcaaagttttgatcctgtaagtttagtctgtgtttagctccactgtactgtctggtgaatacaaaccaaactgaatcaaataacccagtgcaaccagctaactaaccacctccccaggtgaaaactaggaggggcagggaagckktggaaagaaatgggtttgtggttttctggtttgtggttttctcatttatatgagtagttgttatgcttgaatgtgaagttcttacacttgagtgtgaaggtcaccccttcacaytgcatagtgcaatgcagattctcaggccccgccatggaaagtctgacagtgtgtctaggctgtagccccagaatatgcatttcttttctttttcttaaagaggcaggttctcattctgtcacccaggcatgtgcagtggaatgataatggctcactgcagcctcgacctcccaggttcaagtgatcctycagcctcagcctccttagtagccacaggcacatgccacyatgcctggctaattaaaaaaaawttttttttcgtagagatggggtctcccagtgttgcacaaactggtctcaaactccttgcctcaaatgatcctcctaccttagcctcccaaagtgctgggattatagggatgagtcatgaccccggctgtgaatgtgcatttttaataaatatcccaggtgattctaatgcaggtgctctgtgggccacccttttgaaagttatgggaagaaattacctggaatgttttkctgggatgacttccttctccagctgcgtgatacagatgcccctgcttacgctcagctgcaggaatctaggaaaagaataagtgaagttcgagaaattgcatatttttatttctgcttaattcaagcagagagtagttaagctgaaagatttgtttggggctgtcttgatgaccaaagaggtcaatccagtgttaataaagaagatcaggctgggcgcagtggctcacgcctgtaatcccagcactttgggaggccgaggcaggtggatcacgaggtcaggaaatagagaccatcctggctaacacggtgaaaccccctctctactaaaaatacaaaaaattaactgggtgtggtggcaggcgcctgtactcccacctacttgggaggctgaggcaggagaatggtgtgaacccgcgaggcggagcttgcagtgagccgagatagcaccactgcactccagcctgggcgacagagcgagactccgtgtcaaaaaaaaaaaaaaaagaagaaaatcattaatagtaagaaatcagtggttaggagctgtctccttaaggggctcccttccctagtgttagaaaaactctggaccacatgacccagtgggctgtgtttttaatgaaaaaatggattacggcacatgccacgttctaagtgtaggtattattttggtaactttttggtgtgtgtgtgggggcactggtttgtgatgtaaaatgtgcttcttcccatgcatcacggttaaaacactggacagcatctgctctaccccataatgactctggggagatattctgagttcctacgtttctgagaatttccctgacgtgtgagtgatatagaccacatgctcagcagagtatgggctgcagcggcaagagctcacaaaactgatttcctccgcagactggctgccctgcagcccagtgttaatttatttaaataaagatggagtaggcaggtgacagagatggatgcccgtaataagattaaattagtgggaactggcaagaaggcatgctcttttttggaactgatagtggagagatgagggaatatcacattagaaaaattggaggagggccctaattggaaagaggaatccagatgcaggaaatctgggttctggtgggaaggctgccgtgataatctaatcaggatattgctgatgtgtaggggaaggcccctctgggaagatgccctatttcattagaagagcaccttgagaatgcctcctgttaatggttgaactgtaaaaaagaatcacaaaacaaaacaaaaacattctttgatttctttcttgctctagaaatcaactgatgagccttctgagaaggatgctctgcaaccaggccggaacctggtggcagccrgctacgcactgtatggcagtgccaccatgctggtccttgccatggactgtggggtcaactgcttcatgctggacccggtgagagacctcacaggaggctgggggcttrgctggtgtctgtgagcaaatgaatgatatgtgtgggggattggcaggggtatgtggaggtgggaggtgatgcccatggagggacagagatgatgatgtgtggtggaaagrgggcaggagaccaagagagagtgtatgcctcccgagcagactatggaggtgagaaatgccatctcagactggcacaagagggggtctttgttccaatgtgaattcctcagagcagctgttactcaaatgacccaaatgccaggtccaggcaggccatagggatgatgaagtgtgctggggaaggaaggccggggggcaagggtggaactggggtgaactgaagagttccagcaattacaattgggaggagggggcccgccttgccaaggcttctattaatgsttcaagaaacactggattgtaaaaaacataatgtttctgcatgtgtgcaacactatgytggccaactaaaatgcatttatggacctgatggggctgtagatattctgtttgccataaactgtatccatccatttctagcttttctactttagtcaccaaaaggctgttttcctgagaygaatgggtgtgccaactgaagcagtggacgacattgcttcttcaaaaatagctcccacatttattcgtgtacatttacacaaaccttcagttaactggtgcagtctttctttctttyttttttttttttctgagatgtagtcttgccctgtctcccaggctggagtgcagtggcgtgatctcggctcactgcaagttctgcctcctgggttcgagcgattctcctgcctcagctcctgagtagctgggactacaggcgcctgccaccacacttgtwtttttagtagagacggggtttcgccatgttggtcaggctggtcgcgaactcctaacctcaggtgatctgcccgcctcagcctcccaaagtgctgggattacaggcatgagccaccatgcctggccaacttttttaacttttagagatgtcctcctatgacattagtgaactatgtgtaaagtgctttttgctggcaaactgaaccccaggaacagacarggaayaggaacyttctgtgcgagataggctgctggaggtgaggccgggtctgtgtgtggcaggaaggctaactcaacacaggctgcctttgtcccaggctgtcagggaagtggactttcacctccttggaagcatgggcacttaacaaataaacaagggtagggtaatagcactagttaaagtcgccaaatgtggtgacctgggtaggggtggggtgggggagttagtggcagaaccagagcaaagttccacctgagcccaggatggaatttcgggcaccactgatgtttgctgactgtgatttgcygggccctgactgcttcccattcttctggtgccttctcttgttacctttgagttggtggaagcagagaaaacattcaatcccttcttgtttccagattgcaggggagcatccctgtagggaagcttctgtgtgtttgatagtcttttgccctcctcagtcctgaatgtttggaagcrcaatgcagggctgctgggatttgattccagcccttctgtctgcggtgcctgacggggctgagcctcccgccagggaggtgctaagtgcttcctctttgtttgcgcttgctgcaaagccaggctgacggtttctgctgaaaacactgctacagctgtactcgggtttccagcggcttcaactttctgggagcttttatgttttgtctctgtacacagacttycctcctttgcaccatggacagtctggctgggccctgcgctctgcacccagcaactgttgtgagatggctttcttttctatatagttttttgaaagacatttatttatttatttttctaccaacgataaaagaatattccggtatacttgtggtcaaaaattttgaaaatattaaaaaaggcataaaagtaagaaagaagaatcacttccagtgacacctttcaatggccactgtgaattctcccctccctttctccctgtctgtctggtttcaacgtattccatatgggtaggaaccaatttctgctgtggaataaatggctaggtagagaggtgtcggtgggccttttttcttttcaactcttgtgtcaacgtcaagcccctcctaaatgggcagagcctcgatcaccctcttgccaaaaacacacaggaacccataacaatcctcaatccggagcaataggacttctgcaacacttttcccccaaattcaaatctcctttgaagagcctaaagcttaaaggcataagcttaaccctgggctatgtgggaagaggcagtctgagaaaaacttcacacgccagcgagcaaaggccatcggaagttacgtacgccagactcaaaactcagggttctactttgttctataagaacgcccagaaaggagaactcccatcaaggtagaaatgtaaagccgagaacagcgctgagcacttgggtgtaactcagggactgatcctgcggtggcccgtctctcctgagagcccacctcccgcctgaaccaacccttttttctgtttggtaaaggcatacacatcttatattgctttggacacacggttcttactctcttgcaggcttagcagttgtttcacaagtctgctctccctatttttgtgtggtttctttcttgtttgactgaaatcatatgcaaacaaagtcgaaagtgtctgttatcaccctgatggcttctgcagcattgtcttgcttcccctcaccccattcacagttcccagagagcctggcaggtgtctcggggccccaagatgagtggtgcccgtgcgccgcgaccccagcccagcgtagcccagcccatcgctcgcctcatccaggcctgggggacccagtgcgctcgtcatctctccacctttccttccttgtctaaaaaggccatcggggagttcattttggtggacaaggatgtgaagataaaaaagaaaggtaaaatctacagccttaasgagggctacgcyarggactttgaccctgccgtcactgagtacatccagaggaagaagwtccccccagtaagtgagggccyggggagggtggtgcaggttctgggcatctggcaccagaggccgttctggaggcaggggcatcccccggagatgaaagggatccttgggatcgagggccttgggcctcatgtggggctcctgagcagtgtggaaatctattggttgatgacttaccctaaaggtgaaaggaagcagggatggagtggattgggcttccgtctacactgagcccacgatgaagttctcacctcagtactggagactggaattctcaccctgagacatcaaaaatcagtctccatgtcagcctttgctactttctcttggcagaagaaaattaggataataaagttaaacaaatgaatgaattcatggcagtaaaacatcttcccttctggggtccatggtcccagatgggatgaaatgtggttcccccactcaaatgcccgtcaagtggtgtctgccccttgctaggcctgcctgaggtgcatctatcagttatctcgagaccgagagtgcccatcgtgacatctccctaaagaggttacaagctagtgaatatgaagagaagaaatggctgtgtggagcttgctctatatggaatatctgattttgtcctttctttgtttaaaagccatcgatggctgctgtttgctagagatgaagctcaaatgtttgcaggacgttcaaggaggcctcagatctgccccaggctytctctccagcttactcatctctcctttcaccttatcctggattcccctcctgcccccaagctccgcacacgcacacccgagtcccrcaggctcctcctccaggaccatatccctctccacattgctaagcagacacttgtgcagtttcctctcctgtaaattacacactgcctcccacccctgcccggttccttagcttggtaacaaactttctcagcctttaaggtgttactaaatggtacagtttctgtaatgcctgcctcagccccataaccagaatcaaccataccctcgttggggcttctgtgggyaatctgacctattgtgagatgatgagaggctgtctccatttttccattttctatttattgggaacaggattctcatcacattttttagcacagccccaaatacataccttgtaggtgctcggtgaatggatgtggaatcaaagaaacttaggagacaccaagaaaactctctttcttattttctgcaatcctaattcttgctggtcttaacttgcaggataattcagctccttatggggcccggtatgtgggctccatggtggctgatgttcatcgcactctggtctacrgagggatatttctgtaccccgctaacaagaagagccccaatggaaaggtaagggtgtcccctggagagggagtgaggagcagatttcacttgcagcccacgcgatttagtttaggaagaagaaaggttttgctagctattacgctccatgctaggttgctacgtgtgtctgtagcatattcttttgtggattaaaggtaaagccagacgatatcaactaaagataaaaatagtctcttgagagcccttccagtgctatggcaaaagagaatgaacggtcaggacgaggactgaaagtccttagggcttccagtggatacagggcttggctggggcaaaatgaattccattcataaagtgaaatgaaacaacccagcctcacttccaaggcagcgaatcaaatgtgtatcctcagtagaagtcttctttgattgctttcaaaaggtgtaaaacagaggtaactagtgagtcaacatccactacttggaaaacgataccttttaggggaggaaagaatctctggggaaacctagagctttcaggtgagccgtcaccaccgactcactagtccaagcccatggtgttcccagcaggctgcagggtggctgtgctccctcacgctcgctcagagctgccctgctttccttctgccagggtgacagtgtgcttccttcccaagtattgtgtccttcttatgttttcccagtggacagatggctttttaggcagagtcttactcgtcgcccaggctggagtgcagtggcgcgatctcagctcactgcagcctctgcctcctgggttcaagtgattctcctgcctcagcattctgagtagctgggattacaggtgccygccaccacgcccgrctaatttttrtatttttagtagagacggggtttcaccatgttgaccaggctggtcctgaacttctgacctcaagtgatccacccgccacagcctcccaaagtgctgggattacaggcatgagccaccacgcgtggctgcctttttttttttttttaatgcaagaggagaacaggaacaacagttcccttaaacacaaaacctrtgtgtttggatgtatttgggtctgtttgcagcatgtggcatccagaatgaaggcatttctatttactgaaaccatcatccagctgtagctgcctcgggcatatcaacctgtgtggttagcctgctttccagcacttttctctaaagtcccccgaaattgttcctgaacacaaatattgaggctccttcttttttttttggtttttcaaaactagccatgacacctatgtggaaatagactcaggaaacacctgcagaaagctgtcgctcagtaggcagactgcatgaaaaggcatacaataaaaaagttaatatttaaargtgaatgccaagacgtataatacactgaattccaacccaaaagccttcggagaatcgtaaaaggaatgcacacagagttgcaaacaatatcacactgtttggaggagccggtctgctttccagatgtctgtagccagacaccaccatggattttttttattgcttttagaataggygaagctccatccaacacacacagaatcactcattaagtccagtttccatggtataaagagaaggcaatgatcgcttctgccaaaatgtcattctgtccagtatgcaggtggtctgtctcacatttgcatcrggtaatctattgctggcactggcttgatgaatggttgaatttaaccaaatggttaactgttttgtctcagatgcaacctggggtgggaggaaacttttacagcctcayaggaaggaaaaatacagtattcgttcccttggaaactcccaccagctctgcatgttttgctgcagaaaagtctcttttttacgcaataccttctgatacaaggaggccgctacccggtcttgttttccagctgagactgctgtacgaatgcaaccccatggcctacgtcatggagaaggctggggkaatggccaccactgggaaggaggccgtgttagacgtcattcccacagacattcaccagagggcgccggtgatcttgggrtcccccgacgacgtgctcgagttcctgaaggtgtatgagaagcactctgcccagtgagcacctgccctgcctgyatcyggagaattgcctctacctggaccttttgtctcacacagcagtaccctgacctgctgtgcaccttacattcctagagagcagaaataaaaagcatgactakttccmccatcaaatgctgtagaatgcttggcactccctaaccaaatgctgtctccataatgccactggtgttaagatatattttgagtggatggaggagaaataaacttattcctccttaaaaaaagtctcccttgctttgtgtcaaataataatgatgatgacaataataactgctgatgcatataacattagataactcatttaatcttcacaataacccaatgaatcagatactctgaataatccattttatagatgacaaaatggacgaggagaggtgaagtaattggctcaaggcttccagccaatgagtggcagtgtggggacctgaatgcaggcagcctggccactgtgagccagcatacggcttctccttcatgtcgtcccgttcaggcctggcccatcattccccagccttgttcaggattgcagctgaggaaccatgcagcctgaacatggcgactcacgccctcctagaaatgggggagctaatggcttagtggtggtacctgcatgtgaccctctggcctcccaaacatggatgtaaccatctgaatcccaagtgaaagtttactgtttacccagtggtgatttttctttttctttctttctttctttcttttttttttttttttttttgacgcggagtcttactctgtctcccaggctggagtgcagtggcgcaatctcggctcactgcaacctctgcctcctgggttcaagcgattctcctgcctcagcctcccgagtagctgggataacaggcacccatcaccacacccagctaatttttgtatttttagtagagacggggtttcaccatattggccaggctggtctcaaactcctgacctcatgatctgcctgcctcagcctcccaaagtgctgggattacaggtgtgagccactgcgcccagccacccagtggtgatttttctataaaagcacggcacttaactcacaaaggctaatagttcctacagtctagttaccataagaaaaaggattcactacaagaacagggtttaaggaaatgcaatttgttgcaagcaagcaggcttctcactaaactctctatagaaacagtttctccctccgctaaccctggtcttactggaccagagtccaagatcgtggcaagctctgtcaggcactaagtaacacctgtggccctccttgagctctagatataaaatggatctatccatatgattccacttgggaactgaaaacatgtgtgtatgtgaatcctgcttcttcccctccaaacactccccattcatttcacattttcccagcaggaaattgatcttgagcattggatctgcttctgcccactgaccagacagacccaaagccaatatttctccactccagctggggctgccctctgggaaagtcccctgacgcacaaagcacctcttgagttttaaacttcttgtaactcagctggcatctggttctcaaagcatgaagggagagaaatatggtctgggagccttttccatatatatatatcagggtgcagtggctcacgcctgtaatcccagcactttgggaggccaaggcgggcgggcggatcacaaggtcaggagatcaagaccatcctggctaacacagtgaaaccccgtctctactaaaaatacaaaaaatagttgggcgtggtggcgggcgcctgtagtcccagctactcaggaggctgaggcaggagaatggcatgaacccgggaggcagagcttgcagtgagccgagatcacaccactgcactgcagcctgggcgacagagcgagactcgtctcaaaaaaaaaaaaaaaaaaaagaaaaaagaatgagggtctttgcagatctaattaaagtaaggattaagatgagatgagcctagattacctacattaggatgggtcctcctctgaagccatgcatttttgtacaggttcatgacatggcaggagcctggaggcctaagccaccgccatgtcgatgtcagcctgggaccagaaggagagacaaacctttgctgtgctaagccgtggggatttcaggtttatttgttgctgcacgataacatacgctatcctgactaaactagaccaagcttggcaatatttttaacctctctgagtctccctttcttcatttgcaaaatgttaattgtaatatctattgtagtcaaggccattttcatcataggtaacagaaacccatttattctgctaaagcagaaaggcaatttgttggaaagcttcaggggactctcatgaaacctagcacccactgctttcctaaccccgaggacacacccttagtccgtcctggcattgtcagccaatccactgtgtctccatgtctcacaccaagttccccggagaaaaaaacctgacgtcttagcttgtgtccagttagctgcagccatagacccgggtcatataagacaaacgtggccttgggttttctttttatgggcagggcacgcctctctcttagatggggatcgtgggctgagcagataccctaaagggtctgccgtgctggaagcagaaatgctgaggtttcatgaaagagcgtttgttgagatcactggagacggggcatggaaggcattctaacagagttttgctaacagagaatatgctctcagctagtactgtagagtcacagtccagatcctagacttcaggtgggggccccgccctatgaactgccctaagactgccttactgttcagagactctgtttgtccttactacttccgcccaggcctgtgagggcctttcaccaagcacagcaagcccataaatagctctgtgatcaccaatgcatcagtggcgctgaaaaaagcgtgagctggacgctgcccccsccttcctctgggccttccagatgccccgtgtgtccacgctgttgtgtgccctgaaagaactttggcatttgctgaaaggtcaccagctgcaatttcagatcatgtaggtaactcgaacttccaacatttaaatgtagctgaaaggggcatgacagctgcacaggtgccagcctgggctggagggtggcagaaatagcaggccctcccttggatccctttacggggggagctgacttatacatggcactggccaatccycctccctcctgatccccaaattatccaggcttctgctcatccttgacacccacagtgccggacaaccggcgcctctcccagagatctgctcataacactggcttgtttgtttcacttccaatctgttgtgaacagatatgttaataaaacataataagccgagcgcagtggctcacgcctataatcccagcactttgggaggccaagacaggcttatcacctgaggtcaggagtttgagaccagcctgcccaatatcatgaaaccccatctctactaaaaatacaaaaggtagccaggcatggtggtgcgtgcctgtagtcccagctactcgtgagctgagatgggagaatcacttgaacctggaagatggaggttgcagtgagccgagatcgtgccacggcactccagtctgggcaacacagcgagactctgtctcaaaaaacaaaacaaacaaaaagcataataaaaataattacaggagtggctaataagcacctgctcaacatcactaatcattaggaagatgcaactactctaagccacagtgagataccacctcacacccattgggatggttactgtaaaaacaaacaaacagaaaataacaagtgctggcaataaggtggagaccctgggactcttgctcactgctggggagtgtgaaatggtgcagccgctgtggaaaatggtgcagcagttcctccagaaattagacagacaattaccatatgatcctgcaggtccacctctgggcacatccccgagagaatcaaaagcagggccttgaacagatgtttgcacgctgtgctcatggcagcattactcacactagcccagaggtggaggcaacccaagcggccatagaggatgaatgggtgaacagactgtggcgtgtccataccagggaatgctgttgagcctcagagaggagggaactctgacccatgccacagcatgcggggatggtgaggacattgtgctgagtgaaataagccagtcgcagcaggacagatactgtatggtctatgagggacccagtgtagccaaattcatagagacagcagaatggcgggtgccagggactaggtgttgggagggggaatggggagttcttgtttaatgggtacagaatttcagtttgcaaaatttgaaattgggattatgactataattggggtctagaactgttctatcatgcaaacccccattgccctgtcccctccccacacccctacccctggcagccatgagagttatctgtccccacaggtttgcattctggagagtcccctacaaatggaatgagactgtagatactcgctggagaccactgctgtcactcagcacaatgcctctgagactcgcctaagtgccacacgtgacactagtgtttgtgttgttaatagtattccattgtggccgggcgcagtggctcatgcctttaatcccagcactttgggaggccgaggcgggcggatcacgaggtcaggagattgagaccatcctggctaatacggtgaaaccccgtctctactaaaaatacaaaaacaaaattagccgggcgtggtggcaggtgcctgttgtcccagctactcaggaggctgaggcaggagaatggcgtgaacccgggaggccgaggtcatgccactgcaccccagcctgggcaacagagcgagactccgcctcaaaaaaaatagtattccgttgtatggctctcccagtgtgtttacccattcactgttaaggagattttgggtgtttgcagtttctagtttaactagaactgctataaacatctgtgtgtgggtttttgtgtgaatacacattttcagcattgttttgcgccatcacaggggaaaccttctttttttttgttttgagacagagtctcgctctgtcgcccaggctggagtgcagtggcacaatctcagctcactgcgagctctgcctcctgggttcacgccattctcctgcctcagcctcccgagtagctgggactacaggtgcccgccaccatgcccggctaatttttttctgtgtttttagtagagatgcgtgttagccaggatggtcttgatctcctgacctcgtgatctgcctgcttcggcctcccaaagtgctgggattacaggtgtgagccaccgtgcccagccggagaccttcttaatcagataacattagcttcaaaatgaaacctgaaaactaatcaaccaggcctccgtcttcaccctgcagtcatttactggaccagaacttggaagatccagccactctgtttctgtagtgatgtcaaaggaatcatcattggtttccccatgtgaaaggcaaagcttatttgttaatggcaacatgacgtgttaggatcaaggaaaggtccattccgcagttttcacaattcccagagctcttgggaaaggaagagttttccaagtttgatcctcatgatatcaaaattaaaatgttcttacccaaaaaatgataactcctgttattagcttattattattattaaactgatactgagtgtcagatggggtgaacagattaatacaaagtggcatctctatttagatgagtctttcattaaacaggaacacacagagtaaaacacactggaatggccctttctccagcttccaatagggaagttggattgattattatgttggcagtggagcaccttccagaagaaacatgagctagaaatgatacccaagtctttaccttacccttagcaactgacagaagtgaagccattgcagaaggctctcttgctaataactttttttccccagcatatttctcaatgtgacagtattgttctgaatgatgaaggcaaccacttttcatttggattcagaaacacttggaagcagtgataatatgtcttttcttttcttcttcttcttcttttttttttttgagatggagtctcactctgttgcccaggctggagtgcaatggtgcgatctcggctcgctgcaacctccgcctcccaggttcaagcaattctcctgcctcagcctcctaaggagctaggactacaggtgc

SEQ ID NO: 93367 - DNA, 40729 bp, Homo sapiens
cacacctagaagccatccagaagaggacacacctctgtcccagacttctatcattaagaccatgtgggtcacatcatctctggaccagtctctggctgggtgttgtgaacagtccagggtcagaaataaccaggcccacgtttgtgtctttccacaatgtcaggattttagcagatttttttgtgtttcaatcacaaaagccatgagctccatggggttcccaaggaggcattctcattgcttcccatttactcagtagtcagagccacaggcacacaggctcaagccactccacaagtcagtcaatactgcaaaccatacacagtagtgtgcttagtctatatataaatgttacagattaaacattccacaacaaagtcacacttaacatcaagaggaaagagaggctgggtgcggtggctcacgtctgtaatcccagcactttgggagactgaggcgggcagactgcctgaggtcaggagttcgagaccagcctggccaacatgatgaaaccccgtctatactaaaaataccaaaaaaataaaaaaaaaataaaagccaggcatggtgacaagtgcccataatcctagctactcaggaggctgaggcactagaattgcttgagcctgggaggcagagattgcagcagtgaagacagagcaagaccctgtctcaagaagaaaaaaagatggagttacttatgtcaagggagccactgctttaaactggctcacaggcccgccttggagctggggacaggtcaaccacaccaaacccaggtggaattcctcaggaagtatttagtgtgctgttaccagacagttggcagagagaagaaagaaagatccctgtccaccagaaagttggagctaggggccagacagggggtgatcaatgagagcaggcacacaggggatgagaggagacggaccctgtgccttgcctctgcctgtgctgttccttctgccaggagagccttatggagtaattgacagaacctcccctcccgtgtaagcagtggtctagatgttgacatcctgcctttcttctctagggcccaggaaatgcctgttgaaataaattgctggaaagccaccacaccacgaaccgtgcaaattgtcagactgttctttcccatgtggatatgaaatctgctttggagcatgggcccagtggggctgcagggagcccaccaccttccaggaccactactgtcttagccaggactaagagttatggactgagacctattaactgagggcccttaggcaaggctgtgcctggctccttaagccccagggtcctcctgggtaaggggtgcccctggaaagggcttagcaagtggtaggagttcaccccaacagtaactatgccagtgctttatccttcccttattgcaggtagaccaaagtggccacaggctttctattcaacattcacaaccagatgaccagctccagtttactgatgggagagaaacccattggttcaaagagtttaagaatttcagcctagctgggcgcggtggctcacgcctgtaatcccagcactttgagaggccgaggcgggcggatcacaaggtcaggagttcgagatcagtctggccaacacagcgaaaccccgtctctactaaaaatacaaaaaaaaaaaaaaaaattagccgggcgtggtggccggtgcctgtagtcccagctacttgggaggctgaggcaggaaaatgacgtgaacccgggaggcagagcttgcagtgagctgagatcgcgccactgcactgcacttcagcctgggcgacaaagtgagacgccgtctcaaaaaaaaaagaaattcagcctagaagctgggcgaggtggctcacacctgtaatcccagcactttgggaggccaaagcgggaggatcattagaggtcaggtgatcaagaccagcctgaccaacgtggtgaaaccctgtctctactaaaaatataaaaaaattagccaggtgtggtggcgggcacctgtaatcccagctactcgtgaggctgaggcaggagaatcacttgaactcaggaggcagaggttgcagtgagccgagattgcgccattgcactccagcctgggtgacaagagcaaaactccatctcaaaaaaaaaaaaaaagagccaggcattgtggtgcacacctgtggtcccagctacccaggaggctgaggcaggaggatcacttgtgcctgggaggtcaaggctgcagtgagttggaatcacatcactgcactccatcctgggcaacagagtgagaccctgtctctaaataataataataataataataaatcccagcctgagtaagagtgtctcaaaaaaagaaagaaaaaaaaatctgcccacacccaccctgctaagagaggcagattcaaccccaggcagatcactctcttctttcacaagcatcccagccctctccatctccaaccagaaagccagccacgagccatgccttcccttcctctcagagcctgtgtgctcaaccttaggaggaaagggacctgccagggtgctaggagggagggaagaggggagcactgggctcagaggcggagggggtgctccgggggtcaggagagcccagggcaacatgggccaggctgtgcttccagggcagagtttcacagatgagtgaactgaggccagggcaggtcagacacataggctcttttgtcccctgcttcctccttcacgccctggcctctgaagctctccctgcagtcgggacaggtcaggctagaaaataatttggcctcaaaggctgctggggctttgggggtcaggcaaatttgaattccaacctctgcttgttttttcctttcttacctttattttgagataggatcattttatgttgcccaggctggtcttgaactcctgggttcaaatgatcctactgcctcagcctctgtgagcttaggttaatttccatcttgggctcagtatttttcttttttctgggacggggtctcgctctcacctaggctggagtgcagtggcatgatctcggctcactgcaatctctgcctcccaggttcgagcaattctgcctcagcctcctgagtagcagggatgacaggcaggcaccaccacatctggctaatttttgtatttttagtagagatgggattttgccatgttggccaggctggtcttgaacacccgagcttaggtgatccgcatgcctcggccacccaagtgctgggattacaggcttaaaccactgcacccagccaacagcctccgtttttttttgtttgtttgtttttgagatgaagtctcgctctgtcgccatactggagtgcagtggcatgatctcagctcactgcaacctctgcctcccaggttcgagtgattctcctgcctcagcctcccgaggagctgggactacaggggcacgccgccacgcccagctaatttttgtatttttagtagagacggggtttcaccatgttggccaggatggtctcgatctcctgacctcatgatccgcccgccttggcctgccaaagtgctgggattacaggcgtgagccattgcgcctggcccagcctccgtttttttcatctgtaaaatggggataacagggtgacctcagagggttgtgagattaacaagctgcaaggagaccgtttccccagacatagccaggaagagcttgtgggtctgggcacagctccagcgatggctattctaagaaagccattcccttctcaattctctttaatccctttgcttaagtccaggggcaagtctttgctgggtgctggcctgccttgaatatctctctacacctttcgaatcttccttttttttctttttttgagacggagtctcactctgtcgcccaggctggagtgcagtggcgcgatctcggctcactgcaagctccgcctcccgggttcacgccattctcctgcctcagcctcctgagtagctgggactacaggtgcccgccaccacgcctggctgatttttttgtatttttagtagagacggggtttcaccttgttagccaggatggtctcgatctcctgcccttgtgatctgcccgcctcggtctcccaaagtgctgggatgaatcttccttttaacaaggagagggcaggaggaactcagctcttggaggggcaacaggacctacccgggctttataacattgttttagttttatttttactgttgccttctagtctctgagatactggtgttccatttagggtagcaatacaaagtttctctgaaaaatacatttgtgatcatggaaaagccaacataaagcaaaagcattaaaagtattacaagtgggccaggtgccgtggctcacatctgtaatcaccacactgtgggaggctgaggcgggtgaatcacttgaggtcaggagttcaagaccagcctggccaacatggtgaaaccctgtctctactaaaaatacaaaaattagccatggttgtgcatgcctgtagtcccagctactcaggaggctgaggcaggagaatcacttgaaaccaggagacagaggtttcagtgagccgagatggtgtcactgcactccagcctaggtaacagagtgagtctcttctcaaaaaaaaaaaaaaaaaaaaaaaaaaatgagtattaccagtggagaaagggtccgcattcattctttttttttttttttttttttttttttttgagacagagtctggctcttgtcacccaggctggagtgcagtggcatgatctaggctcactgcaacctccacctcctgggttcaagtgagcatgtccagctaatttttgtattttgtagagatggagtttcaccatgttggccaggctggtcttgaacttctgatctcaggtgacctgcttgctttggcctcccaaagtgctgggattacaggcgtgagtgcttgcctggcctcttgtttccgttttaagatgggagaagtaacagcctgtgatgggaatgacccagggagaatggagagagggcagggtttcgggatcagtgttggcgtgaagggtcgggatcttctggagggggtggtcgtggccaggagctggacgggttcagcccggtcccaagagggaagggactgggtgctacctcagcgggtgggtgggggagctggtgggaattttctactgattccttcattcgaagtgtatttattgggcacccattgagtgccaggctctttctcagggctaggatagaggttccattttctcagtggcttgggcactgggtcatcagctgagtgagaggatgggcgtcagcactcaagaagtcacccaatggtttcattttttgcagtctttgttgtcccagaggagtaagaactaaaagcaccaggactgtgacatgctggaaacatggcatgttccaaagagaataaaatacagttttatgatacacgaattgtgtgtgatacattccaatttctcacattgaacaaattaccaatagcaatatgctgtgaagatggggcgaggtgagagtgaggaggaggagtagagaaaggacggggcggcgttaaggatacagcaaataactggaattccgcaaacactggggtgatgcaggcaatgcccttagcacggtcccggcaggaggcggtgggatcaggccgacccgggtcccaggggtgacagcgtcccttctccactgcagaatatcgaggtactcaaccctctgaacctcagttttctcatcagttcaatggggaaaacgggatggtaacccgtaatactggcggcgcggaggccggggagcgctccctacctgttggccggcggactggggactgtccgcacccgccccggggagcagcgagggcgcgcgggcggggtcgcggggaccccgcaagggctctggggaccgggacccgcagggtaggtcgggacgggcggggcggggcggcctgaccccgccccgggccggaggggcggtgctgcctcccgccgggccccaggcactgccctccggccgccgcgccgcccgcccgccggggccccgctgtccgccgcccgccgccgctggagctagaggtacgaggggccgcgccgatgttgcgggggacgggggctccagggggatcctgcggctcgcagtggggaggaggcgcctcgggaaggcaggggcaggggcggaggggctgggccgccgccctagcccgggccacctgttctggaggcgacatttgtgcgcgcacgaaccccgcgcggcggtcccggccaccgcctccaccccaactgcgccccgaagtggagcgcggcggcgggacccggagccccggccctcgcgggcaggacgcgcctggctccggagccctcgagggcagccccacccggttgggtcccggggctggagagagggcgtcggggagaagccgggttcgaggcaggctctgcccggccaccgtgggtgagtcgcgctcctccgtccgggggaagcctgggcgtcgggcggtgctcgccccggagcggatgcgaccggggacggggatggagagcggccggcaggagggggctctgccgggctggcagcgtcggcgccggccttagggagggtgaggatttggacctgcccagaagcgggaagggccctccccgtgcgggaaacggcctgggtacgagctgggcacggggcgagccggttggagtcgcccggcctccgcgctcgcctcggatccgcaggcgcccctccctcctctccagctggggaaggttgaggactgagcgggagcggaactgggcttgggagaggatctgccggggcacctggtcccagcgcccatcccgtttcactgccagggcgagtccccttccctcagtttcatcacctgtcatccggagggacaagttcccacctggatagtctcggctgagcctctggccctgagtgggttaaagcgccatttcccctgcacccacctttccctcacgacaccctctctgcggcttcctcccctccgccaacgtcgagtgattgttccgcgaaggccccttggggtcacgtaccctgcactcagcaaataaccccgagcacctggtgggtctcaggccaggtctggccttcccgttcccgccaccagctgcccaaagacttcccctttgtcacctcctcccaaagaatgagggagccaccctgcccagggtcccatagcagagtgcggatggagccaggcctccctcaagatttcccacagccctcttccagcctcaaaccttctccaggacccgaaaccctgctacactgtgtttccatagctgcarccccccaaaagagggtccccaaatcaaaggaatacaaaggaaaacaaaatagaaaggaaaagaaaggaagaggagagatggaatcctctctgtcattagttttctgtttgtttgttttttagggtctccctctgtcacccaggctggaatgctgtggcagctcactgtagtctcaaactgctaggctcaagcgatcctcccaccccagcttccctagtggctgagactgcaggcacacaccactacacccaatgttgtcattagtttttctctcaaacatttttctaatgccttgggtgcctgtcgtttcttgtctgctaggacagctcagtattagaggataaactccaaaatggacagccatctacaaaatatgttttgtttccttgtactaattgaagccctctagctgctaggttaatgggtccattaatttccagttcgtgtgatgggccctgggaccccagtgtggagcaggattggcagaatctccaggtggtttgtgtggaacaccaggaggttgtgaactaccacatcagccccagctagcaactcccaagcccacctggccacggggccactgggttcagacctccaaggatgcagttcagctggggatgcaggtcccggaaggtggtggcaggtggrcggcctccaccaccaagccagccatctgagttctgaagtgcacctcctctcactctccccagctgcctccttctttggggacctgctaggcgtgctcacaaactcctgttgatcaccctgcattttcattggctcaccgcatgcttccctccagattggaagctcctggagggaaggacccttgtccagatcccagagcctagtgccaggcctggcacctagcaggtgcttcctgaatattgtttgaatgaattaaccgaaagaagtaggaaaaacaattcctgtttgcatacttgaagacaactattgttaacatttgcctttttttttgccagacctttaaaaacacgtttttccagccgggcgaggtggctcaygcctgtaatcccagcactttgggaggctgaggcgggtggatcacttgaagtcaggagttcgagaccagcctggccaactkggtgaaaccccccatctccactaaaaatacaataaattaactgggcgtggtggcacgtgcctgcaatcccagctactcaggaggctgaggcaggagaatcatttgaacctgggaggcagagagtgcagtgagccgagatggcgccactgcactccagcctgagcaacagagcgagactccgtctccaaaaataaataaataaataataaaataacacgtttttctgtatttgcatatcttgtctatataaaatatttttccattagtataatttcacgagcattcctcatcgcagacattttttatatttttcaatgcttgcattttgctatgtcatgttgagttattggatctcttgactttttaaaaatatatttggctctttttgataatgttacattgaatttctgcatacatttatacatggccasatctttcctgggaaggaatkaacctggtaatcagtgcgtatgaacttctagaatggctgtatctggacccagctagatatttcttcgtatttcctagaaatgaaactcctgggtcagagtacgagaagccaggttctttgtgtgttgcttattgattggtttgagctcatcagtaaggttttaccccttgtctggtctttgtgtgccaaggatctttccccagtttatcatttggctcttatttgtkggtgtgtttgtgcgtgcgtgggtgtgtgtgtgggtgtatgtctgtgagacagagagatagagaggagcagcaagttttttgttttactttatctgtgtgtgtgctttctgatgagggagacttggctgcatttatgagctgatgggaaagctagaagagagagctcagctccctcaggcccaggagaaggagggacaggttgataggctgaggtctccgaggactgaggaggtgggaggatgcagtgctgctcccaaggatcctcccgggctggtgaggacaggaggcaagagggaggggcttgggggacacttgatgaattggctttgatcttccccagagggagttggaagtcagcrgaggggagggccccagtctttggtgcttcctccctgggagggagcaggtgtgaacactcccattgatgactacgcagggaggagagagcctagttcagggtgagtccatgcagggccaggttcaaagcaggctgtccacataccaaccacaagcccttgggaattgctcttctctccgaggctctgtttcttgtagctatcaggaagtggcagctctttgaataagtgccttttcctctcccatctgccacctttgtcttccctctggacatatcctgggggttcaggagcttccagctgtgcagttggccacaggactaggggagcccccttcccttccagaccagtgtccacataccctcccctgtgcccacacaccttcccctgtgcccgcactgtcacccaccacaagcctactccagcaggagcmccacagccttctgcggtcacgctgtgcagtcagctggcagacrgggagccaggtggaccagcacatgagagcgaaacaggaagagtgtctgtcttcacctgtttgaaagtcattgtcccagatatagttacgggacccagagagccctgatcatctgtgaccatcatttgctccttccccttcagktgggggtaggcctctacccattaagccagacactgttacctgaccttaccagaccctctcagccaccatgctctgttattcccattttacagacaaggagactgagtctcagagtcaagcacctcctcttggccacagtgagaytgagcccctagccctggtgcagccccaggcaaatgaggctgggccacaggtagacagaccccyttcccccagcaaagggtgtttgaaccccgctctgccgctgcccagcaggccttggtttcctctacacttacactgtagttaatcataagaggacctgccacacaggatggtgagggattgaacaagtcaaagcagraaaccactttgaccaacggctgcacatggtcagtgctcagaaaatacacgccattgttactattaaaccacacagctccaggcctgacagtgagcttttaataaatgttaactcaacactggagaagccttctcaccccgtcagcagtgcaaacagaaacaacagtgagatcacatttgccactcaccccagtggtggagaggatggtcatgcaccccactcgccctcctatgccctgggagagcctgtggtgaggcaagtgtgccctgagcctggagtaggagtgggagagagcaggttagggctccatatctgaagatttaaattatatttctgaggccgggcgcagtggttcatgcctgtaatcccagcactttgggaggccgaagcgggcggatcacctgaggtcgggagttcgagaccagcctgaccaacatggagaaaccctatctctactaaaaatacaaaattagctgggtgtgctggtgcattcctgtaatcccacctactcaggaggctgaggcagaagaatcgcttgaacgcaggaggcggagtttgcagtgagctgagattgcaccattgcactccagcctgggcaaaaagagcgaaactccatctcaaaaaaaacaaaaaaaaagattgtatctttccggccaggtgtggtggctcacacctgtaatcccagcactttaggaggctgaagggggtggattgcttgattccaggagttacctttttttttaaatataatttttgagataggttcttgctctgttgtctaggctggagtgcactggtgcaatcatggctcactacagcctcaacctcctgggctcaagcgatcctcccacctcagcctcctgagtagctgggaccacaggcaccctccaccattccctgctaattttttgcaaagaaggagtccacttatgttgcccaggctggtctggagctcctgggctcaagtgatcctcacacctccacctcccaaagtgctgggattacaggcatgagccaccttgcccagccctgaattacrtttcctttgacccagagggctcacttctaggaaccaatcctatagaagtaattaaggacatgctcaaagatgtaagtgatggttaccatggtgttgtttataaaagccaaaaagatcaaaacatttcctatcttgaccacatttctggtggtcaagataggaaatgtatgaaatgaaggcaggaactaccttaaggtgggagacaatgttgccttggaatttatggtatgaagctgtattgctctcttagatctctaagacgtaagtcacactgtagcactcccaaaatcatcccaatcaaaaggcaagtccttcagcagctctcaaggccccctgtggcccaccctccccttatctttctgacctcctgtcctggaacccccccaccccacatactctgctgtttgctcagaactcagccacactcgcccctggatctttgcaatccctgatcttcctcctccctgagtcacttactccagggccccacagtgtgttccctggcttccttcaggcctcagcgcaaatgtccccttttcagagcagcaccccctaacccaactgtatgtagtagcccctgccccgcagcccatctccctgagtgcatttttctcttggcacattttaccccctgatgtatttctttatttcttttctttttctctttccttttctttcttttttccagcctgtagtgcagtggcaccatctcggctcactgcaacctccgcctcctgggttcaagcgattctcagcctcccgagtggctaggattacaggtgccagccaccatgcctggctaatttttgtatttttggtagagacagtgtttcaccatgttggctaggttgatcttttttttttttgagacaggaccttgctctgttgcccaacctggtgtgcagttatgaaaccctggctcagtcttctgggcgcaaaccatcctcctacctcagcctcccaagtagctgggactacaggcacatgctaatttttgtattttttgaagaaacggggtttcactatgttgcccaggctggtcccggactcctgggctcaagtgatgctcccgccttggccttccaaaattctggaattacaggagggagccaccattcctgccttttttttttttttttttttttttttttttttgagacagagtcttgctctgttgcccaggctggagtgcggtggtatgagcatagctcactgcagcctcagccttctgggctcacgcagtcctcccacctcagtttcctgaatagctaggactaccacccctggctaattgttttatttttattttttgtagtgatgyggtctccctatgtttcccacgcaactcttggcctcaagattctcctgcctcagcctcccaaagtgctgggattacaggcatgcgccactgtgcctggcctctggctaatttttttatttttattttttgtagagatgaggtcttcctgcgttgcccaggctggtattgaactcttggcctcargatcctcccacctcagcctcccaaagtgctgggattacaggtgtgagccacctcgcccagtcagcacctgatgtctgtctgtctgtctgtctktcttttttttttttttttttttgacagagtttcgctcttgttgcccaggctggagtgcaatggcayggtcttggctcactgcaaccgccacctccygggtccaagcaattctcctgcctcagccttacaagtagctgggattacaggtgcccaccaccatgcctggctaatttttgtatttttagttgaggtggggttttgccagattggccaggctggtctcgaactcctaacctcaggtgatccacccgcctcggcctcccaaagtgctgtgattacaggtgtgagccactgtgcccggccagcacctaatgtgtttcttcactaattttcccctactagaatgtcagctccatgaagccaaagacaatccttctcttccctgttgtacatattccctgaccttggagaggggccgccacaacattggcgcccaggcacttgttggatgaacagtcaaggtgcgaagggcagtgctggggacttgtctggtttctttccaggatgacttcttgcacgaggttgagcagaaactctcacctgtgaattgtcacctcctgacttggtcttctgcacccttggccttgacccaagggggcgggtggcatggagccgctctaagaggtcagtgatgttggcttctgatggaatggacagaggtggtgccaggagaccagattaggaaggcctttctagaagggtcctaagagattgtcttttctcagctctttattttacagatgaagaaactgaggcttagaattgagggggaggctacagagcagggtgtagaagatagacaggccccttctcaggcagtatccagttagcaaaggtggttaatgacaagaacacgcagtaggtgatgctgggggagcggggggagaatgagcactctcttttgctactatttttgttgtagttgttgttttattgagacggagtcacactctgtcgcccaggctggagtgcagtggctcactgcaacctctgcctcctgggttcaagcaattctcctgcctcagcctaccaagtagctgggattacaggcttccgccaccacgcccagccaatttttgtatttttagtagagacagggtttcaccctgttggccagcctggtcttgaacttctggcctcaagtgatccactcacctcggcctctcaaagtgctgsgattacagrtgtgagtcaccacactcggccttgctactggttatttttaatctttaagacagtaaaacaggtgaaagtgaagcaatatggaaactttctttcaaatagaacgaactcaggactcttctaactcagaccaagatttctagatgccctttccatgggcattgcatttgccaggcaagatttccctgtgaagagctttccctgcgatttgcatctctgggatctctgcgcatagcaagtgaccaagtcagaaaacttatccacatccaggcagcctggcacaacaggatatccccacgtgtgcatgtgcgtgtgtccagagcgaaggtgtaagagcccagattcaaggtcactcagtgctttcggaactgagataaaacccggtggaggggttgcggggaatttcactctgcccctgagaagccagccccacccagccagatccagcttcctgtggggagctagagtgaccctgggagggaagggtggcctcagggaaggaagaaaggcgctcttgggactggcaagtagtcaggtactttaccatgaagagctaaaggcatgtgacttgatttgtaccttcaaataatgaggcagctgtaatttgcatctgcgtagagtttatagtttgcaaagggcatttcccaggattagttatcacatwtgatcccggctttgtgggcaggactggtatcatttactcatcctttcaaaaaaatacgtactgagaccagtcacggtggctcacgcctgtgatcctagcactttggaaggccgaggtgggtggatcacttgaggtcaggagttcgagaccagcccggccaacatggtaaaactaaaaatacaaaaattagccaggcgtggtggcacgcatctgtagtcccagctacccgggaggctgaggcaggagaatctcttcaacccaggaagtggaggttgtagtgagccaagatcatgccactgcactgcagcctgggcaacagagcgagactcgggggtggaaaaaaaaacaaaaaacaaaatacagaaaatatgtattgagcacttactatgtggtaggatctgtgctggccccaggggagatgactgagtaaaaacagcattggtctctgcccatttccatgctatcattatatcattgtttatttaatcagcctcttcaagaaagaccttgggttgtttctaatcttttgcaactgcaaacctgtgaccttgtgcaaatgtcattcatctgtaggataaagccccagagtgagatagatgttgttaaattgcggctgagcactgtctgcatgcccactggctgtgtatgagcatgcctgtttgctcacagccttgccaaaataatgtgttaagtgttttggatttttgctgatctgatatgtgagagatgctatctgagtatgtccatttgcatttctattacttataaaaagatccttgctctagcttacttgtttagaggtcatattttgtatgtgtgtgaattgtctttggcccattttgttttggggtgttagtcttcttattgatttctgggagctctttatatattagaaaaattcgacttatgtgatatgagctgcatttaagttgtcccaggttgtcacttcttttttttttttgagacasagtcctgctgtgtcatctacgctggagtgcagtggtgtgatcttggctcactgcaacctccatccctcaggttcaagcaattctctcgcctcagcctcctgagtagctagggttacaggtgtgcaccaccacacctggctaattttttttgtatttttagtagagatagggttttgccatgttgcctgggctggtctcaaactcctgagctcaagccrttcaccagccttggcctcccaaagtgctaggattataggcktcagccacaaggctgcattgttcttatttatttatttatttatttatttatttatttcgagctggagtcttgctctgttgcccaggctggagtgagatggcaccatcttggcttgctgcagcctccccctcctgggctcaaactatcctcccacctcagcctctcaagtatctgggactacaggtgcataccaccatgctccactaatttttgtaattttttgtggagatgaggtttcaccatgttgtccagactggtcttgaactcctgggctcaagcaatctggctgcctcagcctcctaaagtgytgggattacaggtgtgggccactgcacccagcctcacatagatgtttaatatcttttgttaagtttaaccctgagtatcgcgactgttgttgtaagcggggtcttctcttttcccataccttctagtgacttgttatttatatttaagtgtgtgtgtttatactaccatctttagtttttactttttcaattatttatcttgacttttccaggtatacaataatatcatatgaaaatagcaatagttttaactatttctattgsgttttctttcttttgtcaaattcctctgataaatacacccagtatagtgatggtggtggcagcatctgtgtcttccctgagcttagtattagtgcccaggtatgaaactgtgtattcgtactctctggagtatgaagctggttcctggcttctgtgttaatctatataattttgttaaggaagtgtccattgattcataatttactaagtgttggctactttgttaaatgttttttggtgtcactggggatgatgatttttctgcttagatctatttaatatgatgaattatattcatgatttcctaattatgttgaaccatccttgcattctttgaataaaccccacttgcattcctgaatcacccccatttttttattttttttattttttgagacagagtctcactgtgccacccaggctggaatgcagtggtgcagtcttggctcactgcaacctgtccctcgcaagctcaagcgattctcgtatctcagcctcctaagtagctgggattacagttgtgccccaccacactgggctaatttttgtatttttagtagagatgggtttttgccatgttggccaggctggtctcaaactcctgtcctcaagtgatccacctgccttagcctcccaaactgctgggattacaggcacgagccaccgtacttggcctccatttaattttaatgtgctgctgaattctatttgcttatattttattttggatttttacaataatattcataagtgaaattggtcagaaggatattctgtgaagccgttgtcaggttttggtttaagtatttgctttacttaaatttttttttttttttttggcctggcacagtggctcgtgcctgtagttccagcattttgggaggccaaggcaggtgggagcctaggaattcaagaccagcctgggtaacacggygaaaccccatctctactaaaaatgaacctggtatggtggcatgtgcctgtagtcccagctactcaggaggctgaggtgggaggatcatgtacttgagcctggaaagtagaggctgtaagtgagccatgatcgtgccactgcattccagcctgggtgacagcagaccctgtcttaaaaaaaatatatatatatatatatatttaaattttcctttctatatgttcctgtttaacagtttaaacattatctgttatttctgagttttccaggattccctcccaaaatgttttgccctggtgcttttgttttgtaatggtagtccttttataattctgtttctaatgtggaagttgtcctgtgtagattagctatgtcttctgggatccatttgatttattatttttgtccagaaattattttattcaggttttaaattttatttgctaagtactatcttattttttaaaacaattatctgcttatttggttattttcccatttagcgtttcctagtttgtatgggaagctttctccccaccctcctatcttgattaggttagttggtggttgtatattttattggcttttttccaacaagccagctttttaccttatttattagttctaccgcttatttcttccctaattgatttcttttccttccttccttccttccttccttccttccttccttccttccttctctctttcctcttctcaaaacagggtcttgccgtgtcatacaggctgaagtgcagtggcaccatcatggctcagtgcagtcttaacttcccaggctcaggtgatcctcctgagtagctggcactgcaggtacacaccaccacacctggctaaatttttttattttttgagagggagtttcgcttttgttgcccaggctagaatgcaatggcgcgatctcggctcactgcaacctccttctcctgggttctcctgcctcagcctcccaagtagctgggattacaggtaggcgccaccacacccggctaattttgtatttttagtagagatggggtttctccatgttagtcaggctggtcttgaactcccaacctcaggtgatctgcctggctcagcctcccaaagtgctgggattacaggtaggtgccaccacacccggctaattttgtatttttagtagagatggggtttctccatgttagtcaggctggtcttgaactcccaacctcaggtgatctgcctggctcagcctcccaaagtgctgggattacaggcgtgagccaccgcacccagccttttttttttttttttgtagtgacagtctcactgtggtgcccaggctggtctcaaacgatcctcccaccccagcctcccaaaatgctctgagattacagacaggagccaccatgaccagccatgtttctgtgttttattttgtggttctttttctaacatttttaaactggtgctttatttatttttatcctttctgttttaattgttacatacactggtggctaaaaatatcctgatcattgctgtagctgtatcctgtagatatggatacttggtgttttggtatttgttgktggtggtggtgttatattttgagaaagagtctctcactcagtcattcagggtagaaaatgatgatgcagtttcagctcactgcaacctctgcctcccattcaagcaattctcgtgcctcagcctcccgaggtagctgggactacatgcatgtgccaccatgcctggctaatttgttgtatttttagtagagactgggtttcaccatgttggccaggctggtctcaaactcctgtccttaactgatccgcctgcctcggcctctcaaagtgatgggattacaggcgtgagccaccatgcccagcctggtgtttttattatttttatttgctaggaatcccatagataaaatttttttaaaaattcccgatttttaaattaatttctagtcatattgcttcataatcataaatttttaaaatattttttggatgttattgacattttctttggactgaatatggtcagatttcatgactgttccatcagctcagctcttgaaaagaaagcacagtatctatcactagggtagagagtttgaaatattatagtaccttactgattatcttatttgggtcttctgaattcttatttctgttcatgctacttaatgtttcttgaactgaaagtggtaaattaaaatctcttattagtgttttgatatatttatcctagtatctgtaatttttctattctgaaaattgctacagtattatttgatgcattatgaattataccgttagcataataaattgcccttctttggctaatttagtgaggtttgttgtgattttgcatcattttatattaagattwttgccccagcattttgtttgcatttgcttttatatctttgcttgttctttttttaatttttttttttttgagatggagtctcactccatcacccaggctggagtgcagtggcgtaatcttggctcactgcaacctccgcctcccagtttcaagtaatcctcctgtctcagcctcccaagtagctgggactacaggcacctgccaccatgcccagctagtttttgtatttttagtggagaacgggtttcaccttgttggtcaggctggtctcgaactcctgacctcaggtgatccacccgtcttggcctcccaaagtgctgagattacaggcgtaagcgaccgcacccggctgttcttatatttttaaccattctaagttacttcgtttaaggtatgtctcttgaatagagaatagagataggttacaggttatgcttgaaatctaatctaaaaatctttttctccttcaagattagtgggtgaaactttttttttttttttttttttttgggatggagtctcgctctgtcacccaggctggagtgcagtggtgtgatctcagctcactacaagctctgcctcccgggttcacaccattctcctgcctcagcctcccgagtaactgggactataggtgcccgccaccacgcctggctaattttttgtatttttagtagagacggggtttcaccgtgttagccaggatggtctcgatctcctgacctcgtgatccgcccgccttggcctcccaaagtgctgagattacaggcgtgagccaccgcacccggccaactttttttttttttttttttttgagatgtagtctgtgtcacccaggctggagtgcagtggtgcgatcttgactcattgcaacctccacttcccaggttcaagcgattctcctgcctcagcctcccgagtagctgggatgacaggcacacattaccacgcctggctaattttcgtatttttagtagatacagggtttcaccatattggtcgggctgtaatttttgtatttttaatggagatggggtttcaccttgttgggcaggctggtctccaactccagacctcaaacgatctgccagcctcggcctattaaagtgctgggattacaggtgtgagccaccgcacctggcctggaattactttttaaagtgtttttatttttaaattcatgctgtaattttggattcgaatttgtatttgtcttgtgccagtattttcttctttttctttttctttttcttttttttttttttgagacagaatctctgtcgcccaggctggagtgcagtggtacgatctcagctcaccacagcctctacctcctgggttcaaatgattctcctgccttggcctcccaagtagctgggactacaggcacgcgccaccatgcccagctaattttttgtattttcagtagagagagggtttcgcccttattggccaggctggtctcgaactcccgacctcaagtgatccacccacctcgggcccccaaagtgctgagattacaggcatgagccattgcgcccggctgtggcaatattttcatagtgaattttctttatatataagcgagtatttgtgctcctcacccccgtttccattttgttttatgcctttaaatttttttccatatttgaattagttgaattttcctggagtggcaattaacaggaggttttggtggaaattgggagagaagccaggacagttctctgggtttctctggtgaaaggctccctcctctgttgccatggtaatgggttgtgctttttaaagtatggcctttctctgcatccactcctctttcacctccagaacctaacctgtctcaagaggtcacttgcctccagccctgagtactcccagttcattctggccgtagctcatgccttctgccatctcccttttagragtggccttttctggggtcttccactcttgagctcccccgcctccgccgcccccccccgscccccccattgccatgtctgctgcccgcaggtgctttgggccacactcaactgtggttgggagtttgcgggttttccctgcctcttagtttctctcatttgtctttacccatgttgctttgtataatttggtagaagagggaaaattcagaactaagctgctgccttattcctcctggaatgaagtccacctccctgagttttctgtttgtaacgtccacccagacagcaagaccgcctgcttgattcctggcttctgaggtgttaaaggcctgggaggaagaatattttgtaacctctgctccgaaaagagcccttctgcccttcttacaaacagcccttcagcccttcttttttttttaattttttttattattttttttattttttgagtccagagtctcactttgttgcccaggctggagtgcagtagtgcaacctcagctcactgcaatctccgcctaccaggtttaagcaattctcctgcctcagcctcctgagcagttggcattacaggcatgtgccaccatgcccagttaatttaatttttgtattttttagtagagatggggtttcaccatattgggcaggctagtcttgaactcctgacctcatgatttgcccaccttggcctcccaaagtgctgggattacaagcatgagccactgcgcctgggcacaaacagtccttcttataccaattacttcctcctaaaaactgtcattcttacttcttgggtagaaatattatatttatttgtgccttgaaagattgtggggctagggatggggaacaggacacttggtcctccaagcagggtttggaagctctgggcattgagttttcacatcaaggggggtctgagttccaagaccaaggagcccaccccctcctttgatggacaaagcagtgaaggcccagggaggggcagaggtgggtccaaggtcacgttgccaaatcttagcaggtgcggaagctgtcaggcagggcctggatttgaattctgtactcggtgctgtttcttggctctgtggccttctgccccagatccctcagagttcttggcgcctcaggtctgtgctaaggtgttacttatcccatgcagttagcagcaggtgcccatgtgtcccgccaaggttagagcatttggttagcctgcaccctcccttccccgcactgtgcagaagggaatctgaggcccaaaaaggaaagtgacctgtctaaggtcacactgcaagtcatcttcccgacatcactgctgagtgggccaaggacagcttcctagttctgcactttcagagtttgcaaaacactccttattgcaggccgggcacagtggctcacacctgtaatcccagcactttgggaggccgaggccagtagatcacgaggtcaggagttcaagaccagcctggccaagatggtgaaaccccgtctctactaaaaatacaaaaattagccaggcgcggtggcaggtgcctataatcccagctactcgggaggctgaggcaggacaatcacttgaacccgggtggcagaggttgcagtgagctgagatcgtgccactgcactccagtcttggcaatagagtgagactctgtctcaaaaaaaaaaaaaacaaaaacaaacaaacaacaaaaaaaaagcccactacttatttatttaatacatgtggttgagccctaggctgggcctagtctctgcccccaaggcattcacagcctggtggggacaacacacacacacacacacacacacacacacacacacagtggggcagcatgctctctctcacacacacacacacacacacacacacagcagggcagcatgtgccagccaaggctgcagtgtggagggcagaggtgctgcggccagcggaccacactgtgatgtaccccggcctgagtgccactgtggcccctttacttttctgaaagttaaacaggggagcagggaccgggattggctggagtaatccccgcatccctcactgggggtcaggctgagctaagacaacctgccaaccccattatttgggccaggaccgcctgactccaccaggtgcgtcctcggcaagtgaaggaacccggtgggcgttccaccttatcttcacgaaggctccggaccctttgtctcccactacgtcccctccccaaaaccacccagttccagtgagtccaggtgtcctcttcctggcaagggggctcccatgccagttgggggtaaagagygtgtttcagccggacacggcggctcacgcctgtaatcccagcactttgggaggccgaggtgggcggatcacccgaggtcaggagttccagaacatcctggccaacatggcgaaaccccgtctctactaaaaatacaaaaaaattagccrgacatggtggcgcactcctgtagtacttgggaggctgaggcaagagaatcgcttgaacccgggcggcggaagttggcagtgagccgagatcgcaccactgcactccagcctgggcgacagagcaagactccatctgtgaaaaaaaaaaaaaaaaaagagtgtgttcctctggtgggggagcccctttttccggggggggacacaagtcctcaacagcggctgcacatctaggtgccttcagtcctgtgagcccggccctggccctctctgtctcctgccattgcagccccacccctgatatgatgttgtggggtcagggaccaagaaaggcatcccggtgtctgctgagggggatgaggagagagaaaggagagagagagaaagagagagagagacaccaacctggagtggcaggagggagagaaagaggggagggacaaggagtcccagggagaaaaagcaggaagaagacactgatcagggggatgagacattcattggtcgattgaggaggtcatcagaaggttccgtcattgacttctgggctatcctttcctcttgtgtggactacgtagggtgggatccacgtgtcatgacagtgtcacgtgggtctctgtctccttcccttggctctgcttgcctcagggctggcttcattaccaggcagcctctaccttgacggttcctggctcacacctagtgaccccatgggaagcacatacctctgcttggacctgactaggttctgtgtgcctcagccggaccactgcggccaggggaatgtggtactatcattagctggacctgagtcagtgcttatggcaacagccagggagcagggcccacaggcaggggtggctccccacaggacagcaggtgttctcaggaggatgaatgggtgcagggtaggtaaacctagatgacccctctgcctccactgcagaacagcrgtgcatgtgacttttctcctttttctcctgctgcggygggagcattctttatggagctgctatgttagtgatgttcaaagccacatgtgaccttagggtcatggggactctggagaaggtagtgggagaagtttcctttctacctcaccctggccaggggtccacctcgggctcctgtctgagtctgggatccagctgagccctgaccacacttaatccccacagcaacctgtgtcctgggtgctggtgttacccctgtccacagacaggttcagagaggtggcctgtcttgtgggcacgtggcagggccaggaaggaagctcaggtatgttggtgcaggccgttgtcctccaggcctggccacataaagtcctgctcaggaaggaagccgtgaggcaacgagctgggagaccctgggggtgaagcccaccttggtccctgtctgaccaggcaagggtggaggtgggtggggaggggacccgatttggctccactagaggcaagtatgaccatgggacagggatggcaggctctcaccatccagttggtgacagstgtgggactgggagcatgataaagagcatgctacgtcctggctgcatgtccctgcttcctgaccttaaacactatcctgagtggtccttcacttccagccccatcagagacttctgcacacagatacccaccagttcccctgccggaggaaaggcctataatgcgatggccgtggccacatctgttgagggcctgttccgtgggctgggccctggagatgcattgcctccctccatccctccaaagtggagttaatcccattttgtgggcagagagactgaggctccgaggaggagcatggcctgactgcagtcacatggctggtgacacagtgggagcacccgtgtgaccctggcgctggtgtcttacacctcaggggtctggggtcacaatcacaggtcagcaggggtggccacaccccagcctggccacgcacaggggccagctccttatctggagaggcttggaagccacagcagtatccagtcgtggtcactgatgcgccccaccttggccactgctgggcctgcttctccccacttcccacctttgaatgagctgctggcctcccaccacccgaccgtggctttgctcctggagttccagttcctgggccctcttgttgagaccccaagaacatgagaagagtggaaatagcctctggctctcctggagggccattcctcatctcatcagtatctgttgagctcctgctgtcggctgaacctgygtcagcaccaggaacagaatgagagcgaggagcccctgccccttaggactgacacaacggaaaacacatacaatcatttccaggggacgagggctgcgctgggcgcggtggccccatctggtcccaccattgagccctggagcccccgtctcctgggtagattgccccctacctcgggagcagcccatccccagtgacccactgcgggccagtgttggtgtagrcccctgggttagtcggggttctccaaatwaacagaaccagtcratgagaagatgaaataagacatcctctctcagctcagcagtgaggcaggagaacgggggcgaattcctccrtcctcagcctttccttctactcagggttgggggcccacccacactgggggccatctgcttcctgagtctgccattcgaatggtaatctcatctggaaacacccccagacacacccaggagtaacgtttaattggggcaccctgtgtcctggtcaagttgacacatgaaattaaccatcatagccccgactctggtttggaacaaacatctctgatggccaccccagctgcagagctcctatgggactggccgaggcccctgtggcaatgacagcctcacagctcaacatctccctctgtgcagtcctgcgtcccttgccctcacaggractcagagccctccccttgccctgcatggggctctccaagtcctcagtcagctccccgggccaggcccatgaccaagggcattgaaggaaatgtcgagtgatgtgaccgagagtgacaggagggtcrtggccactcacaccarggggcaagaaaattcaggatgagtccgcagtgcaaagtgaaagcaagtttactaagattgtaaaggagccgggcgcagtgtcwcatgcctgtaatcccagcactttgggaggccgaggtgggcggatcacttgaggtcaggagttcaagactagcttggcaaacttggtgaaaccaaatctctactaaaaatacaaaaaatcagccgggcatggtggcacatgcctgtaatcccagctactcaggaggctgaggcaggagaattgcttgaaaccagtaggaagaggttttagtgaaccgagatcgggccattacactccagcctgggcgacagagcaagactcataaaaaaaaaagaaggtaaaggaataaaagaatggctactgcatagagcagcccctagggctgctgcttacccatttttatggttatttcttgatgatatgctaaacaaggggtggattattcatgcctcccctttttagaccacccaaggtaacttcctgacgttgcgatggcatttgtaaactcatggtgctggtgggagtgtagcagagaggacgaccagaggtcactcttayggccattttggttttggtgggttttggccggcttctctactgcaacctgttttatcagcaaggtctttatgacctgtattttgtgctgaactcctatctcaccctgtgacttagaatgccttacccgtctgggaatgcagcccagtaggtgtcagcctcattttactcagctcctatttaagatggtgttggtctggctcacacgcctctgacacctttgcctctcggggcctctgtgttcccgtcaggacatcggaatctccaagggcataaccctggtgctctgggagcctctctgtcagcactcagcctggatggagggctcagtgcggactccgttttgttgggtcatggttggccagtgctaggctgagctgggctggacacagggctggaggggtagcgcccttaytgtagggacaggtgggggtgcaatttgtgtagggatgaaaagcaccagcttggagggccttttctaggcccttgggcctagcccctgatgctgatgcccctagttggggtctgcagagctggtgscaagaacctggctggtaggggtctgacccagcctttggccttctgtctccattgccctgcacctctcgattttttttttttttttgagacggagtctcgctctattgccaggctagagtgcagtggcacgatctcagctcactgcaacctctgcctcccragttcaagcgattcttctgcctcagcctcctgagtagctgagactacaggcgtgcaccatcatgccagctaatttttgtattttcagtagagrtggggtttcaccgtgttggccaggatggtcttaatctcctgacttcatgatccgcccrcctcagcctcccaaagtgccgggattacaggcgtgagccaccgcgcccggccatgccctgcacctctcctctctcctcacttcctgcctaagatgagtcatggggaatcctggcgatgggagccatggaagggcttagagcaggggagtggccacagtaacaggctaactgggagtagctccctggtgacagggcgggaagtagtgagcctggaggcaggggcaggcagcaggggtgtgccargcccagctgacaaggtccaggacataggctgcaactgcgaggcccgtctcgggggccaggagcatgctttgggcctgaggtcacctggatattgggctgcggccaacttggccccatacacagtttctattcctgggtcttgggctctgacaccaaatatggcgtggcctgagtctggcacccccaaytgtggtccgacgacatatcctgctcctccaagtgggcccggaccccgcccacaccatggagtcagatcatgccagcactcggggcccccaagtgggcagaggctcctgctgctgctactggccctccaactgtccaccygtccgcgtggttcacatggggttaaaagtactcaggaccaaaatagcccctctccctgcagaagaaagacaggggcagggggcaccatgtcttggttcacaccacagccctgtccttgctacccgcatcccagggagctcacccggcctctgccccccacmtttcgcactggcccacttggtcacacagcgatctacacactcattggttcactcttactggtcactcactcgttcactcattcattcatttactgatcattcattaattcactcattggttaactcatggaatcactgcctatttattgaccrcatactaagagctggacaccgttctaccatttcagagctgaacaaaacacaaaacatacctatcctcatggggttatgttctagacagacaaccaaagcaaataagtaggatgtaccgtgtgttagaataaatgcaaggatgaggaaacgagggggctctgaggtgatggggggagttggaatttcagggggcccagggaggacctggtgggaaggggacttttgagtggrcatctgagagaagaaccctccaagcagaagaacagcaggtgccaaggccctagcagccgtktgaggcctgaaaaacaggcggccaggtgtggctggggcacaggtggcggggagagaagcagaacrtgaggtcagggggacacatggggcccagtggatcagggcctcatgtcattcagggtctgagctgagaatgacgtggctgatatacttgtaaagcatcctgctggctgttgagtgaatgggtcagagtgagccattttcccatgtgcctgctgcgtgctgggaaccyagctgggtgccggggagagaagatgcaggtgaaccctagatgcttattcccatggtgcttgcagaggtctggagccaccactgtctcctccatctgacctgctcatccttggtgcttaaccatgtgtcacctccccaagggagtcaccatctttgtctgtttccttttttctttttttttttttttcctttttgaaactgagttttgctcttgatgtccaggctggagtgcagtggtgcaatctcggcgcactgcaacctccgcctcctggattcaagcaattctcctgcctcagcctcctgagtagctgggattacaggcatgcgccaccatgcccggctaattttgtatttttagtagagacagggtttctccatgttggtcaggctgttctcgaattcccgacctcaagtgatctgcccaccttggcctcccaaagtgctgggattacaggcgtgagctaccgcgcctggcttttttttttttttttttgagatagagtctggctctgtcacccacgctggagtgcagtggcacaacttggctcactgcaacctccgcctccctggttcaagcgattctcctgcctcagtcacctgagtagctgggattacaggcgcacaccaccgcgcctggctaatttttgtatttttagtagagacgaggtttcaccatgttggccaggctggtctcgaactcctgatctcaagtgagccaccacgcctggcctctttgtctgtttctaaatgatgcccccaccagactgagaactcctttagggaaaggctgtgtctgattctccccttctcctgggtaccagtgcagggcctgcccctattccctgagtgtcccctgagaggtggagcgagtgaatgaatcagtgaacacatgagccccaggcctgacctgcctgtgtggccagggggacgaggcctctgagagccagcgacctgtttcactctcttcttgccatcttttgcagatggatttgcagccgctgcaagtgtgtggaagggccgtgttcgtgttggcaaagaaggtcggctgctgagccagggcgtgtctcccggaggcctgtgggctgccaggatccccacctctctgcaatgggctgcccaggctggtcagttaccagccagtgacatcagcgaggttccctgctctctaccctgggaagggcccagcctaagttaccaagccccaggctcccagtaccaccctcagcctatgtggattgccaccccaccttctgcctgtccttgggargggaccgactctyagctccccttagcaatcaggttgcacccagtcccttgactttatgcccaggtttcctggcacctaaagtagaaacgatgcaactgcccctcgggcttgctgagggtcaaagggggtgtgactttgtcatggagcgtagaagtcagagtcgatggtgatcccrctggctgttaacatcgatacagttcaggtcagcatgcaccaagttcctccaacacaccaggtacattggctagccacctctcccaggcagggcggtgcagtggtgagagcagggaccccagccaggtggcctgggtcctaaccccctgcactgtcattgctggctgtgggactctgcacaaggtactgcacttctgtgcctcaatttcctcatctgtagggtgggggtggtgattgccaccccatagggtggttataaggggccacacatgttcctatgtgtgagatgctgagaaagtcacctggcatggacaggatggacagccagtatttatcgaactatgaatgaatgaatgttaccctttagtgggttccagcgtcctatcctgtcggtgggaagactgaggctcagagagctccgtaacttgccccaggtcacacagccggttcaggcagagttggggtytcatgcctcccaggtgttcccacagtcttttccccaggagcagggtccaagcctgctgctcctccaaccacctgcgaggcacctgggcatgttcctggccaccaggaaagagaggtctaatggcagtagtaccagtcagcgtcatgtgcctggagcgagtgccctgtgagtgcacctgctgggccagcccttagcaaaccaacgcctgggcctgccggagccccagacctcatgctgaacatcctcagggcccctcagtggcctgtccttagacgaaccccaggcctggtttatggagctgaggcgggcatgagctgggcctcaaatcccaggctgccaatcctcacagagccctgtgtgtcacatggcgaagccatcacttctgacagtccttacgcagaccagactctggcctgggcctgtgatggttacacaccwtgggtggcactggcctggtccttgggkgagctcacaggtgtgtcrcagagagtggaagggaccctgctcagaccccagtccatggcccactgtgctcccatttcgtaggtgagcagccagcaggctggggttcaagccttggcccctgtgggcccaggagcccatgggcttggaagccagccttggctctggctgatgttcacaggaagcgttttccttgtggatcgggaatgccaacggcctccctgatggcgggtgctcatctcttgcagaccagccggttcctgctggaagctcctggtctgatctggggataccatgtccaagccccccgacctcctgctgcggctgctccggggcgccccaaggcagcgggtctgcaccctgttcatcatcggcttcaagttcacgtttttcgtctccatcatgatctactggcacgttgtgggagagcccaaggagaaagggcagctctataacctgccagcagagatcccctgccccaccttgacaccccccaccccaccctcccacggccccactccaggcaacatcttcttcctggagacttcagaccggaccaaccccaacttcctgttcatgtgctcggtggagtcggccgccagaactcaccccgaatcccacgtgctggtcctgatgaaagggcttccgggtggcaacgcctctctgccccggcacctgggcatctcacttctgagctgcttcccgaatgtccagatgctcccgctggacctgcgggagctgttccgggacacacccctggccgactggtacgcggccgtgcaggggcgctgggagccctacctgctgcccgtgctctccgacgcctccaggatcgcactcatgtggaagttcggcggcatctacctggacacggacttcattgttctcaagaacctgcggaacctgaccaacgtgctgggcacccagtcccgctacgtcctcaacggcgcgttcctggccttcgagcgccggcacgagttcatggcgctgtgcatgcgggacttcgtggaccactacaacggctggatctggggtcaccagggcccgcagctgctcacgcgggtcttcaagaagtggtgttccatccgcagcctggccgagagccgcgcctgccgcggcgtcaccaccctgccccctgaggccttctaccccatcccctggcaggactggaagaagtactttgaggacatcaacccsgaggagctgccgcggctgctcagtgccacctatgctgtccacgtgtggaacaagaagagccagggcacgcggttcgaggccacrtccagggcactgctggcccagctgcatgcccgctactgccccacgacgcacgaggccatgaaaatgtacttgtgaggggcccgccaggtcacctccccaacctgctcctgatggggcactgggccgcccttcccggggaggcaagattgagggcccgggagagggaggcccgagctgccaccgggcttaggcaggctgttgaggagctgtgggagcaggcccagtgggaggctgtggacaccccgaggacagtgtcctgtctcgaggcagggctgacacatggtgccatagccagcggagggcgctcagtgagtgccccgggccttctagacaacaggcaggaaggatgaacctcagggcacccccaggtggtgcggaaagccaggcagttgggacagaggtgcccacgagggcagaggccrgtgctaaggggatggggaagaagggacaagattcccagagaggagaggaggctgttggtaggaaagtggcagggctgggggagacmcagccccaagggtccggggcggaggatrctttgttcttttctggttttggttcctctttcgcggggggtgggggaggtcaacagggactgagtggggcagaggcccagaagtgccagcctggggagccgtttgggggcagccccttctgcccaccccatccttcttcctctccagagatgccaggggggcgtgtatgctctrccccttccctcagacaggggctgggtggggaggctctttaggctcaggagaagcattttaaagaaacccccaccctgccgcccgcattataaacacaggagaataatcaatagaataaaagtgaccgactgtcacttcgggccttgtgattggtgaagtgtgttcaggctcacagcctcctccgctccattcttctgacggggaatccactgggtggactggtggtgactttgccaaggtctcacaacctgcccagcacggaagggctcgggacctggctcatagccccagtgtccctggtgatggagagcccccgcagtggggaatggggggagcctgtttttccctcctcctttttcaaggctcacaaacacggaaggttgggtcccaccagcacaactccccccatgacaagcctgaatctgtttaacataaatgggaccaaatgtggacactgaggagcccaccgccggagcagggctgagctgccacccatccagggagaggtcccagtgagggagctgtgagggcctgtggctgaaatcccgggagggacctgaagtgccttgtgggcggctccaggactgggccataggaatatctgctccccgcagggcgagaccccagctggtttgcattgtggaagctgcctaggcgttccccaccaggactgggggtgctgccaggaacactggggcccagcaggctgctttttggcagctgaagggggaggcattcattggcctccgttttctgcccacagaccgtcttgagcagcgtgggaaggaggtgagctccctggctcttaggagtattcaagagcaggttatgtgtcgttttcttgggtttctttctttctttttttgagacagagtctcgctctgtcacccaagctgtagtacagtggccccatctcggctcactgcaacctctgtctcccgggttcaagcgattctgacctcaggtaagccactgcacctggcccaggttttgtttttgatgaatacaaaggattgttaagtcagtgatttctccagccacagcagcatttcaaatgagcaggttttacttaaataatacaaatcatatcctaactatatatgtatgtgaacaagtgagatgaccttttagagtccagcattgtttagtcatttgaccatcatacagtgagtgcctactcggtgccagcatgaggtcaggagttcaagaccagcctggccaacatggtgaaaccccgtctctactaaaaatacaaaaattagccaggtgtggtggtgggcacctgtaatcccagctactcgggaggctgaggcaggagaattgtttgaacctgggaagcaggggttgtggtgagccgagatcgcaccactgtgctccagcctggctgacaaaagcgagactccgtctcaaaaaaaaaaaaaaaaaaggccgggcacggtggctcatgcctgtaatctcagcacttcgggaggctgaggcaggcagatcataaggtcaggagttcaagaccagcctggccaatatggtgaaactccatctctactaaaaatacaaaaactagctgtgcatgacttggggcgcctatagtcccagctactcgggaggcagaggcagaattgcttgaacccgggaggcggagtttgcagtgagccaagatcgcaccactgcgctccagcctgggtgacagactgagatttcatctcaaaaaaaaaaaaggaaattatgaaattatgtgcataaatgtctgcttagggcagagaggtgggtaggaagtgccagttcccagggaggatgctgttgactccttatccacggccattctcctcccgcttctttcttgctaaggaaaccccaagtttgttcaaccctcaggtagcttagggctgtagaggaagtgggccctccctaggcctgggggtgaatctcttttggtctaagccagtcctagtcattccagtcccttcctagtaatttgagtggaaatgggcatataatgctattctggccaatgagagggcaagtcagctggaaaagagggctctgagaaaatgttcatagacaagaaagcaacatttctgcatttggcaaaagggtgtaatgctccaagcaatggcagccatcttgaggccgtgaggggacaagtctgagatcaaatgtcaccatactgcatccttgaagacatgaagacctcagcgagctgctgaattaaccaaccctgaaagcgccctatcccgactccttgtctcgtgtgttagatgctatttaccatcctcaagtgtccattcttcttgtggtccttagaaaaagaacacagcgagttctaggcagacatagcacctccccttggcagctggctgtggccatgtgactaagtccaggccaatgggatgtgaacaggagtgatgcgggcaactcatggatgatcttaaagacatttgctttgggcactctaacccgcttcccactggctggagcatggcagcagctggagtgctttgcagggcacattttgggggtggcagagtggccccagtggccttggagcactcaccttgggactgtaatgtgagacagaaacaatcttctttttttttttttgagacagagtttgactgttgttgcccaggctggaatgcaatggcgcgatctcggctcaccgcaacctccacctcccgggatcaagcaattctcctgcctcagcctcccgagtagctgggattacaggtgtgcgtcactacacccagctaattttgtatttttagtagagacagagtttctccatgttggtcagtcaggctggtctcaaactcccaacctcaggtgatcagcccgcctcggcctcccaaagttctgggattataggcatgagccaccgtgcctggcctaatttttgtatttttagtagagacaggatttcactgtgttggccaggctggtctcgaactcctgacctcaggtgatctgcccaccttggcctcccaaagtgctgggattacaggcatgagccaccgtgcctggcctggtctcgtttctctccttggaagttggtggggaccggggctgggttctgatttttggcagtggactaaagctgggaggaatgtctcacgtctcacctccccttggtttcctgctgctgctgctgctgctgccgccacacccaccctggaaggggatgctcctcctcccccaaccccaccgcagcacagatcacacctgagtccagggcctgaagcctggtcccaccctgacccccaacctcacagcagaattccgagcacgccttgcactgggctagtccaagttagaacaagcagagatttaggaacaagtgaaccatgaaaccagacttccaggaacacgggggctcactcatccccgatctctgttgggcactcagaggacattacaatttaatatttaaacaagaagttgaatattgatacaccagcaagggggaattattttccttcccctagagctgctgggaaaacgactccctgcttgcctatgcctggccagctgggaagattcttaaataaccgactggacaccggccccaggccacgcagtgctcccccagtaaaggataggtcywcgtctttctcagtcctggccaaaaacgtctgtgaacacacccactagaaacaagccaggaacaaaccgctgctctgaggatctgattacatttccccagggcaggtttccaccagagcgagcgcccctccctcctcctttcccagaactcmgttgcccaacaactgttccagctcctgctcctgaggcgggggcagcctgaggaaaccagggcctcaggcgacagccggctctgttaggcaggggcaggacaaagtgcaaggtccctctggaatcccccaaggcagagggcaggagccagactcctccggtagctgtgggggctcggaaggggacattagactctggtctgtggctgttggcgcagggaggtgaagagtggtagctgccccccgaggcaggcactggaccccttctcggctccccagccagcctccttcctaccctgtgcacagaacagtgaaggtctgggttcaaatcccagcaccgccacctacttgctgagcctctttctctgtgtggaaagtggaggtgtgataacaccactctgtgtcgtagagaatgtgttctgtgccaggggctgggctggctcatttgatcattacaaccatgctgggagggggcaccacccatctctttgcaaaagaggagatgcacaactctggccaggggtcggtggccaggaggcaggaacggaggatctttgggacccctgccctgccccgggccttagacccattgctcccagcccagaggtgcaagaacacagcactgtgatgggcagaggctggggtcctcacctggccgggtggtgtggtggcagcgggcatcttctggccttgcagcctttctgctgttacctctgccctgcctgtgcctgtcctcactgcctctgtgttctccaggatgctactcttatttctggccagctggatcctactcttatttctggccagctggatcctggcccatttacatagttgcattaagaggctgggctgaggccaggtgtggtggctcacgcctgtaatcccagcactttgggaggccgaggcgggcggatcacttgaggtcaggaattcaagaccaacctggcaaacatggtgaaactccatctatactaaaaatacaaaaatcagctgggcttggtggcgcatatctgtaattccagctacttgggaggctgaggcacaagaatcgcttgaacccaggaagtggaggtagcagtgagccgagatggtgccattgcaccaccacccaggttggagtgcggtagtgcaatcatggctctctgcagcctcaaattcctgggctcaagagatcctcccccctcagcctctgaagtagctgggactacaggcatgggccaccacgcccgcccagctaatttttaactttatttgtagagtcggggtttcaccatgttgcctgggctggtctcaaattcctggcctcaagggatccacctgccttggcctcccaaggtgctaagattacaggtatgagccgccgcgcccgggctggttattgtttcttgatctggtgctggttaagtggtgtgtaatttggtgaaaattcaccgattttagatttagagtttgtggacttcaagaacatttacatgaacaacaagacagaggccgtgagggtggaggagagggcagttggagaggcacttgggccagggaacagggctggatgttggggatttagggtgcagcctggcttctggccaagtggctggagagatgggaggatgagcagatgagacacgcagctgagactgaatgtgaggggccccccagagatgtggctcccggggacccagattgagaagatgaccttaaggtgatgggaagtggtgccgtaggaaggagggctggttctgggtgaggcagctgaatgaggagcatggaacctgagcacccattctaggggctgcctgcccccagagagtgggttctggaggagggcctgggggagatggggagaggaccagagccagcagcatccaaggagtgagcagggtagcatggagaagttctggagctgctgctgacacgtggcctcaggaaagagaaccaaaagctggggccctcagagccccctgtgtcagcagcgccaggcaccctggtctgggacaaaggcaagtggccacacccacctatttatagaaggcagctgggagggatcaggggagccttacaggggccctgggggagggggcactggcaggggatgatgaaggctctgccaggtctctgccagccccgcccataccctcagagcagaggccaggccagagttcaaggagatctgggacagatgcaggccgactgcaccctgcaggcacagctgggcctaggagcaggggcttttgtccatctgtgctctgtggagtgagggagctttttcttctctggccttgctgtcctttcctgtggtataggagaccccatttgtctatgccatgagaccatgtactcctcctggagcccagggtggggttccctcttggccccagcccaatccagggttg

SEQ ID NO: 93368 - DNA, 22816 bp, Homo sapiens
acttatgacagaccaatcatatactctggtcctgctttaagtagcatttttatagcagacatgtttacccttaaaatactgaaaattgcatgcctcattatatcagtatttaaaaaattttaagaatatattatttaaattttattacttatttggagtaaatgagataaaatagcttgtggggcattatactaattgaaagatttctattagtcttcattacttaattttagaaaaataaagaaataactaacattaaagggctataaaattcaagcaatcagtgcagatatttttctgcactgctatttggaaatttgatgaaaggcaatctctaacgtctcttaatgtctttaagatgttatgatcttcagttcaccaggttttgccttgcaaaatggcacttgcaattttttaaatgatgctttattttttaaatgacgtaattttaaaaaatcgtgcttcctgcatgaaaacttcccagatcttaagtatttatttaattaaacttataaaatgagaataatacatgcaaaatgttagttttcaagtgcttgacatgtatttcttcatttagtgttaaaaaccaagtgaagtatccagggcaattattattctgagaagttagccaaccagcctagggtaacaatactttaaaggaagctccagatgtaaaattgaactttttttgtagtttatttgtttgttttgttttgttttcctagctgctatagacatgaggtagatgcttgattttttccaaggaaggaaaataatttatattacggtgaaaatagaaccctcccacctccaccctccaaatatgagtcaatgcaactccaacagtggcttggccttgaattagtatggctgcagggagccaaggaaagcaggttgaagacaataacttttcatgttgagttgtttgagaaccttatacattctggatattagttctttggcagatgcatagtgtgtaaacattttctcccattctgtaggttgtctctttattgattatttattttgctgtctagaagctttttagtttaattaagtctcatttgtttatttttgtttttgttgcatttgcttttgaggtcttaatcataaattctttacgtaggccaatgtcctgaagagttttactaggctttcttctaggatttttatagtttcaggtcttagatataagtcttttaattcatctcgagttaatttttgtatatagtgagagatagggtctagaaaaacaaataaccccattaaaaagtgagcaaagaacatgagcagacatttgtcagaagaaaatacacaagtggccaacaaacacaagaaaaacgcaacatcaccaatcattagagaaatgcaaattaaaacaacaataagataccgtctcacacacatggacacagggaggcgaacatcacacactggggcctaccagggagtggggagaaagtggagggagagcattaggacaaatacttgatgcatgtggggcttaaaacctagatgaagggttgataggtgcaacaaaccaccatggcacatgtatacttatgtaacaaacctgcacattcagcacatgtatcccagaacttaaagtaaaataaaaaagaaaagaaaaaagaaagatactgtttcacaccagtaagaatggctatcactaaaaagtcaaaaaacagatgttagtgaggttatggagaaaagggaatgcttatacactgctggtgggaatgtaaattagtacaacctctatggaaaataatatagacatttctcaaagaaataaaaccagaattacgattggacccagcaatacctgccactaggtatctacccaaaggaaaaaaaaaatgttacatcaaaaagacacctgcatttgtatgtttattgcagcactatttacattagcaaagacgtggaatgaacccaggtgttcatcaatggtggatttgatgaagaaaacgtggcatatatatatcacggaatactgtgcagtcataaaaaaaaagaaatcatatctttcagagcaacatggatggagctgaaggccattatcctgaatgaaataacccagaaacaaaatcaaatgccacatgttctcacttataagtgggaactaaacaatgggtacacatggacatacagaggaaaacaataggtaatggggactccaaaagaggggagggtgagaggggcagtgagggttgaaaagttacctactgggcactatgttcattagtcaggtgatgcatatactagaagcccaaacttcaccactacgtaatatattcatgtagcaaatctgcatatttacccactgaatctatgagaagttttataaagtatgcatattttaaaaagacaataacttttttcacataaaatattacataaatactcactacctacacagtctgaataactataggtataaacagctgaaatttgtcaggtataaatgaaggaaaggacaactgagccaaagggaataatgtgtgagaaggcacagaggcgggaaagaataaagtgtgctatgggaagagtaaaggatgctctgtagctgaagcagaaggtgggcaaatttgggaagaaaggctgggataaggctgaaaagtaagtaggcaccgaggcttctgaaaactcctgaatgccatttagaggagtttgaatttcaccttaaaaaacttgttattcaaataatatgtcaaaggagttttaagctttgtcggaattatatgatttttattgtttagattctattagtttccattaattatgttagatgaatgcattttgtgcataactggtcacatatggttgaaaaggtttactttgactcccactatgggaagagtaaatggtgattagattacacagctcaaacagctgaagaaaagggtgaatgctgtgagcattaatttttatcctacataagcaggatgtgtccttcatttaagtgatgtctgcaggttagcacctatgctttatgacatgcaaagaggcactgtttatggccaacaaggaacaaggattatttagggtagctggttgcccagagagaaattagatgaaatgaataaggccagagaagggcactaactttgctgagtgctaacttcattggcctagtcagttgccttacatatagcatctcgtttaagcctcacgagaaccctgcaaggggggttattttctccatttcaaagatgaggtgaatggggtcaaagaaaaatttaagcaaatggccacctaaatgcttctgaaatgtcaaagcaaaatttcacctgttatttctataagcaaatgccatcaagttattgaaaactgaagttgagcatttaaatttgatcctaaaaaaatcataaagtttaaggaactttcctccatttaaggtgttattaatatattttaagagaagaatttgtttttgaaagaaaatagtttgcatttgctgaccctgatgatgaaatcttgctgcacagatttgggaggacttcgtctttggattcatgctcctactctcaaataaagtgactaccttaggttgatacattccagggagggagaccagttgggacaaggcctaggctgctctcctacaaatttgccatgaacaggagccaaactctaagacctgattcaagtggcccagctgtcactggtgacacactcaggggctgggcctatcatgttcttatacaacctagtgagtcaagctttggaaaataacattgtcagggaagaacgtaaaagttacgttatttgtgacagttcagtagattaatcaacaattttaatttttatcagccattttcacctttctatgccagaacttgtttcataaaaatgaaaatgtaatagaaagtgcatgcctctataatatgtaaaatatctaggcaaaattttgcaattactttgtgggcaatttctcactcttttttttttttttttttttgtagtgcaatagaaatgccaaatggtaacttgtagaagatttgagttagttatattacctgataccttgcaaaacaaaatgccaagtcatgagtaaaatatagttaaattttatatccttagctcttcaagtttataatgttaacgtacaatcctagatgaaacttctatattggacactatttccccaccaataacttttgtttatttaaatattttcctctctcttactctctctttctctctttctctatatgtgtacagtcatttcctacaaattgcccaatatatcaacttttcagtaatggcactgtgagaaatgctgccaatatgctaggagataatttgtagttaatcattgctcactcttttttttttctggcattatttawctcagtgtatacctaacagttttctttttcaggtgaactccagaaatctcaaagtcttgaacacacagtttagaattatctgtttattgacagagaattttgaaatgtataggcaaacatgctggaataaatcaactaagatgcagatagtaaatttgccgatgaggtttttgaaaaatgtatttgcagaaaaatttagataaagtttctgaaaaacttactatggcctaaaattacatgacttaatataaattgtcttgaaattccaatttctattaacttcttatgggaaagtataatgcaatacaaatcgtaattttaaaggctgcacatctaaagctattaaatatttcactttgcaaagtttacctagcatttatttgaaattatgtgctattgtgcgcgtttaaaattaatcataaatagcactttttttaaaaaaggtatccttctatgcataaataataacaacatgatgaatttctagatcgttcttggtataaatgttattgtcttctctgtatgattactatatcaaataacatgaaatttatttgccaatcttctaaccactcataccagaaaaagaatattgtaatgattgagtggattggtttactcatacaaataattatacattttataagaactacaaaacatctccattaaccactgcagtctttctgatcaaacagtgacagataggagctgagagtttaagggcatttgtttactatgtttgcttggattttccgaactgccttagttcctgattccacactgctattgtgtggatcaaataatcccttgtcacaaaaataccctggggaatgactcccctggcgtccaggttatgagtgtggtcagtcattccacatgccttagggatgagctatctgtgccatgacgagcgatttccttttcgatttgtatccaatactaagttttgtaatccccaaatactaaatactattatcaataaaagttaattaaggaaatgtatatcgaaatattgttcaagatagcactgaaattaggtttatctttcctcattgtcttaaaaaattattactgaattaaaacaggagaaattttacaatatactcttaaaattgtaaatatctactactgacctctttgatatgaaccataaccagacatttaaaaatatacttttgtcatgtagacacactagatatgccacttttattctcctttgcatggttcaatgtataagaaaacaacttagtagggggagaaaaaaattaaaagccattctgtaaatctttccctctttcttttcttgcaatctctcattgtatcttggagagcaagaccacaggttttaagaaatatgactcattttatgttagtggccttccaatacttcagaatattcttgatttttcatgaacagaggtacagctcagggagtgtggctaaatcagtcccagtctccagctccgcgtgaacctgggatccagacatctcctggatatctggcgctctctgagatccagccctcggtttcctgcaagccaaaaggatccgctaggttgggaaatgccgcctggtgcgattccagaaagggccatctctttaaggataacggacttggagggcctcttcaccctctcaccctgctccggaccctttcttcccatcctttgctcctaggattttacatgttgcctgcaaagggagtcaaacttagggggcaggcaaacaaacgagttctttccagcctctgtaaccggatcgctagagcgaaataaactcgcacaagtgtccagagatcgtagccagacagccagcctgcgcttgaagcaacttttaagtgaggctgcaagagccgccgggatgtagattttagttcgtggccaagcacaactacgacaccctgtccctgcccccaccccatccccaagaatgcatggaggaaggagagaggacgaggtgagggccgcctgcatttctgcacgtcggcgccggttagaaaccctgcagttttgagagagaagaagaggagatggaggggccaggagccacgactcccgggagagcgcagggaggggcgtgggtgccccttcgcccacctccgcccccgtcacctcgacagctgtcccgctcttggaattcattggcttcctctacccggcctcccaaacaccaccccaatctagtttagccccccgccccaccctcgctgacctaataaggccatgcagtgtgcggggsagctacataaaagcgcgrgctcgcggcgactctgcaccacgcaggggaagagaaagcaggagccgtccagcacggaggaaggcgaccatggccaaggagtggggctacgccagtcacaacggtragtgcaggcagccgcgacccggccaggaagggatgccagtccaggagagccctgccattgcacagaaatgggcaactttagagactgcagtggaaaatgtaggagtagaataagacctaacatttactgaggcttttcaactgccaaatgctgctgcttctttttttccttcatctcatttggttctccctagtatggagtttttatttcccttggagaaaactgaagtgcagagaagttggatcacttgcctaagatcccattgcctctgagaagtcagacagcccgaggtcaggtgtgactggcccttattctgttttactggacaagcacctaacctgagcttggtgccggtgtgagaatctctgctctgcctaagcttctccctaatccaaggcaaaggaacatgggtgtgctctgaaacccacaacacaatgctcaaatgtaggtggtcaatattattttattccaactctatgatggaaggtgtcattggttaaaaaaaaatgtgataaagtttatctgaaaaataagcctttgagcaggcagagtgaacacactgagttaaatagtctccatgtgtgctattcacaaaactaccaacaggcctgaaatgaatgctaagtctcttattgcccagtctgaaacctaagacctttttgaaatcactgtctagcctctctgtattttgctggtttagtcaattagaaagaggccttgggttgtgccaccaaataaatacatctcctcgactttatttcctaggtcctgaccactggcatgaacttttcccaaatgccaagggggaaaaccagtcgcccrttgagctgcatactaaagacatcaggcatgacccttctctgcagccatggtctgtgtcttatgatggtggctctgccaagaccatcctgaataatgggaagacctgccgagttgtatttgatgatacttatgataggtcaagtaagtatgacaatgaggtagaatcacatggatgttttcaaggtccatattgacaaaatgtggtttatgacacagtaccagaattaayggggagagggagcactttatcttttaaaatgcagatgacatttgactttgctttagtcatgaataattatatttatgtattgaagaggaatgtcacaccctccaaacttggtctctgtgaaaacggccccatgtccaagctaaaagttggcaatgcattccygaaatggaacacgataggacagagatgacaataaactcaaatgagtattcttcagactccgatggcctatacctgagggttcttgtgcttcttgtccatggtctggagagccaggcttccactctcaattgcatagattccattctacaaagccagatatacaatagaaaccctaaataggcactttcttcccttggtgcctgggaggtgaccaatctaggggagagaacagggccactgaaggtgtcaagatgacttgccttcaagccttcagtggggttcatctgattaatcatttgggtgagtatttttgaaatatctgacaatttcttcttgagtagtagtttgtgtgtgagacagcgactgaaaratacatgtttagaaaaaacaaatctctttatttcacctacactagtaagcaaatcagtataataaaagaagactagtcagaaatactttatttcacgataaatgaggtaagaaagaatcttcctttaatattttggtgcttgatatacagcaaaataattccttatagccccatctctaataaagttatatttattgatatacataaatgaacattcttaatgattttgtaatgaagaatgatattcataattcctacctaccaggaggttccaagttacagaaatttaaattttcttaaacagtggtttcgtattgctattgtttccttttttccccttctccttatatatcaagtaccattttgaaagcaacataacaaaattaaacatatctattaggttgaaccatatgaaaatgccatttttgtgtgcaaaaatagttgaatattgtcaatttcatatagtttcttctaataaattggactcacatgtccctataataactgttctgagtggttggacaggaaaaatgcaatgaattgaaccactccatttctacctgaacaaactcatataggcctagcctcattgtttgaggtctatatttatggctttccctgggccacttagtgtgggcaacctcttctaaaatagctatgctctgaattctattttgatctagcttatattgccaaatcttgatcttagggtttctgcatagtttccaatatactttggaagacatttgaacctctaaatcactctgcaatgggttgagatgtttatcaacaagcccaaattaatgctgctgagaattatctagtttaatcatccacattgattggttttctgggaaatttctgaattttccatttcatctcatttgaatagacacagtctaaattagacgtagatgaaagtttttgctcgttgtcttgaagaaaagtgtagttggaagcaacacgtggagaaggaattcacatctgctcagtgatcatcatgcaggcactatgatgagcactttaaggtgcttaatctcagttaatcttcacagcagctctgaaagtttggtattattatcaccttcttagagatgtgaaagtgggttcagagaagtttagcaacttgcctgagaccacagaactagcaaggggtgaagccagcattggaaacctacctccacctggttctcaactgtccagttcttcccactgcaccacactactgacttgttctttgggtgtatgcatcctcattgtctatctgttgttttaattttgctttcctaaatgttaaaatgatgtttcaataataatgaaacaagcaaacaaaataagaaagacagaaaagaacaatcatttatcttgacatatccccagacttcattttgtgaggagtccagtgtcctgggagtggcaccatccacccagcaaactgaccacattttgtccattaagccttggctctaagagcacttggttaaagtagagctctgtaaaagaagcatgaattcactgttgaccaagcttatctgaatcacagtgctgagagggggtcctctccctggaccctaccgacttcgccagtttcatcttcactggggctcttcggatgatcatggctctgagcacaccgtggatggagtcaagtatgcagcggaggtaagaggaactgccataatccattctcggtctcatacagtgaaaactgcaaaattaaaaataagaaccacagcaacaaagcatcatccactgcttttgtttcaagtctatagttatgaaaagagctgtactagttttagctgaactgaagctgctgaacattctaggctagacaggtaaaagggtataggtgagttggcatcaaacatgaagatttccaaggttatgttaagaaactggggcgagtgcagtggctcacacctgtaatctcaacactttgggaggctgaggcaggtggattgcttgagcccaggagttcgagaccagcctgggcaatatggtgaaaccctgtctctacaaaaaatacaaaaattagcctggcatggtggcatgcacctgtggtcccagctactcaggaggctgaggtgggaggatcacttgagcctgggaggtcgaggctgcagtgagctgtgattgcgccacttcactccagcctgagcaacagagtaagaccctgtctcgaaaaaagaaaaaccctaaaagttagaaattggatagctacttaataagaaagcccagggtcctcaatggaactggaaaaaggatagctaatacttattaaatgcttacatgtattaactcattagatcctcttagctaccttatgagacaggttacagatgaggaaacagaaggcatagaaaagacacataataaagtcacacggctggtgagtgctagtgctctacctgatacagactggcttcagaattcatcatcttatccagtgccctatactgcctattttataagaatatagtgctctaaaaatagcatttagaaattctgaataatgcttatgttccaatctcttaatgaaccgtgtgcatatatatgtgtgtgtgtatatctatatatacacatgcatacatatttacacacacrtagagatatgtgtacacacataccatttaatctgagcacatactactctctgtctcagttaactcattaaagaaaaacatgaattttaactcagatcaacgcatcaaattacaagggtttaagacaggcctctgacatgttctctttataaagccaaaccaataagtggtggcaattgccttggaggtgaggaccaattcatttttcctgctttattcttttccaaagataggctctggttaacataggggctgtgacagaagctcagaaacacactatgaacatgttcttaagcagaatcattaggcatcttagttcttggttaaattaaattctgtgaaaccyaaagtacttcactgtgatctttctgtttctttacagccaatctagagagccatggcaagataaattaagtattgagaatgccttctagacatcttccccaaccaaatggggaaagttgagtatatttcttacagatgcaggcaaggctttcagtttgacctttgcacatgggattatttcatacttttggtcttgaataaaacattttttaactgctgcaaatgattgtatcctcttgccattctctgtaactcagcatagaaagtttgattaacctaactggtgctcatgttctaaattaaggtcaggttgccaccaggtttcagagctctggttgataaaaggagataaataaataattttatatgctttttatttgagccactagaaatgttaccaaaatgttacatgctactctttcaaattttctcagcttttatgagagtgctcagcaaccttagcctgtacaatgattgggtttattgtggataatgttgtacttatttccatattccaggaatttaccttctaatctgtcttctatggtttcagcttcatttggttcactggaacccgaagtataacacttttaaagaagccctgaagcagcgcgatgggatcgctgtgattggcatttttctgaaggtaaagtaaaaattgactatatattttcttccaaaatgtatttccctgccaatggttagcatagtttgagtttcatttcctcatttttaccttcctcctttcatatgcattttattattcattcaactaatcaagatatttctgcaaagatcagctcaaaatgtcttacttttctctaaaagtgtatcttttaccacactccaggacccctagcacttctaaattttccccagatgtgggaggtgtgtgtgtgtgtgtaggtgttggggacagagccttagagtgagcttattacggtggtggtaagggcaaaggtggcatatatttattttcctttctcactgctcaacttcaattgcactggaaaccagaaaagtcagtgttgggaaccatatgattccaagtccctggctggacatcccctcggcttgaggtggtcaccactcacgtgatcccaggctaagatagcacatggaatgtgtgtgttgttgagccaaccttgctttaaagaggacttagtgtcattaacacatgaagttagtggtaacataatctagatttcaagccagaggtgaaaatctggcttctttctctttgaatgacctaatttgttttaggttcttaattcattgggtcatttttggtacctgagcacagaacagcaggaggtggagtaggtctgagaagaaagacaatgagtttagtttgggatacatagggtccattttggttctaaatctggtttttagaaaagtggaatgactttgcagagaaggtcaaagacacagaactagatgaacgtgtaattttgtggtcctgtacttcagaagcctggagtccaaatttagatcagaaaatatatactctaaaatcttgaggaaaaataaacttatgtttttgcttagtacgagatattctggcagatttataaacactagttgcagatggatggatcaaaatcagctttgaagacaatcctaaactatggagaagtaaaagaactatacttggatttctgttttcttacagataggacatgagaatggcgagttccagattttccttgatgcattggacaagattaagacaaaggtaaacaaaaatcattttccctcctaaaacataaagcagattatgcagattttctttacatattttcaagtatttttttcacctaaaatctgttactaagtttgatggatatgctaagcatacatataaaaataaatgctattatatttgtatggcatacagtttttagagcaatttcacatatatcagtttttttaatggtcatagtcatcctgtcagataatcactttctcaatggagtaagtgagagtcagagaagttgagtggtcaccgcatcctcgcccaacacacacacacacacacacacacacacatacacacacacactgcatatatgcatgcataccatcacggagctactaaatgtcagccagtgctggtcttttgagtcttggtgatgagctttctgggaagcacttaaaaatttaaaatcttcacaatagactcatgtaagtaacagaaacattttaattattttttttctgaccgttctaatcaaatattattgagtttcattaacagagaaagtaagcattccaagtagatcattcaataaaaatacaagcctgatattttttggtatcatcaagaacaaaacattaacttatattaaataattcaattacacttgagatatcagtttctcctttttcttgagtgatagaattatcacagatagttctactcacagctaaaacactaaggaacacagtatgacagtgattgtgtcagatcaagtaataatgtgcaaaccagcttccctgctttgatctttatttctgaaaggcttatactttgtttagaagttctattttctctattgcatttgaaattcattcttacaaataaagtggtgagggcattggggtgggtgggcatgtgcatgcatgcactcactgcacctgcaacctgctcttacccagggcaaggaggcgcccttcacaaagtttgacccatcctgcctgttcccggcatgccgggactactggacctaccagggctcattcaccacgccgccctgcgaggaatgcattgtgtggctgctgctgaaggagcccatgaccgtgagctctgaccaggtgagcagccttgtgaacacgtgggcttatgttgctgtctgcctatgtaagatacagatgctaaatcaaaaatacatagctactaactggatactcactgaacagctctatggccagtaatttcatggtctgccctggttaattacaaccagcctgttcagctttctaaaacttggcccccaaagggtaccaggataaatgcaactcatttaaaagtagttttgataccgaacatgactgagtttatgctctataaacactttaaagggtttagattaatatgagtctttgttaatttggacgttgccaaatactgagcactggtaaggagatgggatgataaatacagacctggagaagagaaaggtgctaatggaaaggatttaacaattttgtatgctatatattatttctgcagttttacagatacataattcaaggctcaaaagttcagtaatttgtccatgatcacacagccaagtgcaggattctaatcccacctccaaactgtttccagtactttttggcatctcttctcaaggttcccttcttactgtttgatctaaagagtgtcctggtaacattcattaaagacactatcaaggaaaagctgtgtaggagaaaataagtgggcaagaacatggagaaaaacagattgaagcaagtaaacaacacagggactcacaacctagagcatgcatgtactctaatagtaaaatcagtttcccagtgtgtgtctcttgcataaggcaacagctttcatatttatgtcagttgtaaactcaagtttataaagacatttttattaaaagatcagatataacaaccttgttcagtgatataactattttgaaagaatgaaattttttcaaggagaaatctaaaaatattttaatatagaatcatagtgttattaatgagaatttcttattttcttatcctttaagaaagaaaagtcaatttaaaattgaaaatgtagcatgagtttgatttctttttgctcttaaaataattgactccataaacttatataataaaggtctactacattttatttacactgatatatggatgtggtcatcctctccaacaaagtatgtagttcatactgacccctcaaataaaaagtaaatgtttcagattcaacaggaaaaggttgtgaccagagggcacagtgatcctgtatagaatgaagaaaagggctttacaaataaagaaaaaatgtgtgtcactctagagctgctagctaaatagctctggactggacactggggacaggttgtgtggtttgcttgtcatgtttaaaacaccagtattggccaggcacgatggcttaacgcctgtaatcccagtactttgggggtccaaggcgggtggatgacctgaggtcaggagttcgagaccagcctggccaacatggtgaaaccccatctctactaaaaatacagaaaattagccgggcaaggtggtgaacacctgtaatcccagctattcgggaggctgaggcaggagaatcgcttgagttctgtgaggtggaggttgcagtgagccaagatcacaccactgcactccagcctggctacagagcgagactctgtctcaaaaacaaacaaacaaacaaacaaacaaaaaaaccaacaacaaaaaaaaccccagcagtatttatacctctttgtcacgtagtgtgtccagttgatccgaatgtcttgttaacagtctgcccctgccctttgcagatggccaagctgcggagcctcctctccagtrctgagaacgagcccccagtgcctcttgtgagcaactggcgacctccacagcctatcaataacagggtggtgagagcttccttcaaatgaggctgctggatcttgccctcttcaggaaaggaaacctaccaytggagagcttggttccttgcctccttctggtgctcytactccaagtctatttcatttttccacactgagcaatgaatgtgagagatgtggtcaccaagatctaagttacttgttgaaagaaagttactttcgacaagatctaatatgaaagcatagatttcacatttgatctctgtaataatcatctttcctataaaagtagcatttttggtaaagtttcaaagaagaagaaacagagatggaagagtaaagatatttttaaaatggctagctattgggcaccagtttttctgttatctaaaatttcacacaacttcattgtttttatttttatattatgagttgtcmatcttaaagaaatatgagtaattctacatgtagtagaggtgtatgaagatcatataacaattaaacataagccagaaattaaaatgactatagacagcaagaattgagctaataatatgttttaactcttaacaccagcaagaagtcagtcatttattgaagttttagctactaagattacttggttttgattaccagtgaaaagaaaacacaatacaatcaggagttttcaaatttttgattcagtatttgaatttcttcttcataaatgtagttgaatttatcctagtatttttctttacctgaagkagggccatttatttttaatttcactacatttttctttgcatgattattaaaataaaaactgcctctgttgtgtttctcactggaggctggaatgaatgatcactagaacacaaaagagtgaatgatgacacttgaagtcaaagcagttgtactgatcaccagaaccaataaagacataaatggaaaacgttgagtgttgtgttttttaaatggaaaggcatcataaatgacaaaaatggagtttaactaagagcaacaaactttgtaagtttgtttttatagctgaaggatggcactaagggctgaaattctgagtttggatgctacattcctcaaggagggccagaaaaaaaattaaaaagcaattagtgaaggccttctgaggaaactgcagaccagaagaggaatgtatggccatatatctgatagtgggaaatactttccagaggcctcaaaattggtttaggattctggggttcagactagtgcaatgggttttaggggcgtgaaatcaagtcagactgtagcttttacatccatatttttaaaaattgtgcctttaggatgatgctggcctaacactgcaaaaatccatatatttagacctttaagccatttaatataatatctttagacataaagtctaattttgcagttagtggctttgatacgtctttcatcactcactggccaatatgttaacttactttagaaagtgacaggaataagctcattaccctaaggaatgaaataatattgggtcaggagagtcctgagatgccagaagtcaaatcacgtgacagagtcctatgaggccaaagttatttaatagattaccacccaggtgaagtcaagccaggttggtcagtgtgaactggaagtgttaattaaatccctcgaaattaggaggtgtggagctttgatcattagtgaaaatacacaagctgattctctcaaggtacttacttagtaatgcttatgcactgtaaaagatgtatccagtattgactctatgtgggggaggaacatatgacttaatgtcagctacaaatggtccttattccagtatacaagctgaacaaggttagaactgttttgagggaaaatgccccatcaaaagaggctatcttcgtagaccatatgctctatgagggcacaaatatgcgtcttgcatgctgacattcaccttgttgtctgatactgtgtccagcacataataattaattaatatttgttgaataagtgatgtcatgaatgtagatgaatccaggtaaaatacttaccttcttgaacaacacgtcacatggttaataggaatattgtttttgtttatcttagtttaaatctccttggaaaatgatctcactagcttcaggtgggagctttctagtagaacatacttctccccctccctccagtctgagtcattgtcaatgctcacaattatcgcccatcttaaaatttcctcacagcttctcaaagtgctgaactcagagttctgtgatatgtgatattatagatgtccattagaatattaaagacatactgtgtccttattcagcagggggatcattttcctgatcataaacaggccctcaaacaattgcatttcagatacacacagccttacaaaggggcatggccaagaactgctgtgataaaaagatttcagcatctgccaacttttgttcttcagggtataatcattgtaggtattttaaaatttcaaaatagggcagaaactaatttgaatttgtgtttcataatattccaatgatcatatcattaaaaacctatggatagagcagaattaacaagaatttatctaacatagggtattgttgaaagtatgcaaatatatatttacatacatatacatacatatttacatatatttacatatatttacatatatatataaaacttttttttttgagatggagtctcactctattgcccaggttggagtgcagtggtgtgatcttggctcactgccacttccgcctcctgggttcaagcgattcttgttcctcagcctcccaagtagctgggattacaggcatgcaccacaatgacatgctaatttttgtatttttagtacagatggggtttcaccatgttgtccaagctggcctcaaactcctgacctcaggtgatctgcttacctcggcctcccaaagtgctaggattacaggcacgagccaccgcgcccggccaagactaagggtgcaaatatattgttaatgtaatacctgccttttaaatgagcagacaggatatatttatgaaaaggcaaataatttcaggaatattgatccaaaattctttaaactgtacagtcagtgagtatttatgtagatgagtgagaagtattctacatagaacatgcaaaactggagctctcagtgtttaaccataatcatttatgtaattaaatatagttgaaattgatcacctattaacaagcttggatacatgtggaaaaattaatatgacagttattaagatgagaattggcacaaataaaattggcctaagagaaatacatatggtctaaacccacatcaaagaccacacataaagaaaattaattagactctaggttcttttctaatgccttcttatctgatattaaagacgatctccagttatgagcaaaatatattattttagcagaagaagaagaagtgagaagaggtaagaaaaatgaatgataactgtgaatgtcagatttttaaaatttcatatttgaggtatagaaatttaatgatttttttaaaacctacccctaaagtagttcttaaagtcttaaaatacaaatgaaaagcaaaatcatgtttgaatgttattttcacttaggtcattagatggcagcaaaacatttaaaaatttcatgtgagtcactagatggcagcaaaataattacaaaaatgactgacattaaaagccatgctgttctttattcacactaattgcagagcaataaggtttaaaaattgtttttgacagcctatttctgtttttcaaatgtttactattagccattaatatctatgcaaaagaaaagagagtgaaggattcttacatatttttgagtctttatagctaaaaataaggcctgagggataaaagaatagtaggaattgaactgaaacttaaataatgggaaattaacattttaaagccctcttcagttttcaggaggactagattgaagtcacacaacacttgctgaatgtgtggcatcaggcaagttaatttctctatgcctcagtttcctcatctgtaaacaggaatgagagtaatacctgcctccagggagattttaagaattactggtaaaccacttagaatagtccttctgacataactcgcaataagagttaacgatgatcttttattaattaattttacatcaaccaagaaaaaatcggatgccttattcaatacctaaaatcatgtttctttctttaggtatccattagtaatatcgtgaatccacacctcatcaacaggtaatattaaaagagtttctataacaggctcacctctgcttgttattggggaaaatggtattttaaataacaataacttttgtcccatatatataggaggcaaaacaagatgtggtcacattggaaaccagcacatcactagaagcagcgattcagaggaggaccaaataacttttcctgaggaagcttctgctccaggagttctgcccctttcctgagaagcatatagagttagcaaaacatccagaaaataaaccaaagaggagagttggaagaaccatagcattcatttagttcaatattgattttcaaatgttggcaagatagaatcccttggagtgcagcgcgaagtggaaaaatctatcttaatagtaaatacagaaagtctcctgccatgaaattaattttggacttgtctgagcatgccataaagtcagaatcctaaatgagatgcacaagtcacacctgagggaagagcttgtactttggggtgattcgactacaaaaaaggagataaaacagtctaggcataaaatgcagcataaaggaattaagtagagagttaaagaactactttagatgtgaaggtgtttagtaggcgctgccacttgacaacttgaccgcgtaagtaatcacaggtaatcagcaggagttaagagcaaatctaatggtgtaatcacaggggaccatgtgcgctgcagcagcataaaacccagtgatttaaaagctaattttagccaggttagaattgactctgctcagtaaacaggaatcagatcctcccttgtatttaaatctttctcaggtagaggagactggaattccagggaaatattttggccattaagtgtacatattctctgttccaacatgtccatacatttctataatatgtactcagctcatttgaaatttggatggttccagacgcatttgttcagggtaattcttaccctaaaaggaacctggctcccatggaactataatacaaatggaagtgtttgaaaatactgcgctcacagaatttacacttctgctcttgtgagatcagtttacagcaagatctaaggcatcacaaggggcacttggatggatcaggaccccaaagaagggggcctattaagggtaggaaaattgtacaagccaagcacagcagatgtaagggcaaggccaagtgctgggaagaactaagaactgagaaggctgctcatcagtgaatatataggagctcagattctcacactgggaactttaggagtaacaacaacacttttaaattatgtttgtaatataaaagttggggtgtgtgtgtgtgtgataagtagtggtgacagggaggttttatgaaggtaaagactttattggtttcattatactattgaagccccagcacttaacacagtatctggaacctagaatggagctcaaagatatttgttgcatggttgaaggaatgaatagatggatggataaattgatagagggatggatggatgaacagacagatggtgcaatgaaattcctaaaatactgaatgccagtctaggtccatgagctactgggagctgtggcctcatcttaggaaggccagagactggcttctcaaagagttcttgcagaaatatacagatgtctgttgctgcaacgcaggcttctctataaaaagagtgtgcatggaagaagagaagcagctttacttatatccaaagcttatcatttgcaaattttaattttaataactaatttcacttagtataaaagagacatgttttaggagatataacagcagagtctctccccacatatttatctcttttagcactcatgcttctaaagtgcaagttgaagaggtagattagcaatgagtctgtggcattagactctgatgacactaattggcatgattcatgctggtacttgaacttacccactctctcttttctctaagtttgccttaattttctcattagcgactttagttctccatttcattcagttttgtgtagagatgcttatggcaagttcacgtacataataaagatacctcttcctaacacaaatctttgtttcacagtcatgattagcaaagtatgataacttttgaaaatccaaaaagcatttccaactgacatattccactccacaccagccaaatagatggtaaattcaggtaaatttcctccacaaacaatataggcatatacaccccatgtatgttcaggtactgataattactaccttgaactttataggatagctgagaatttttttaaaaaaagctttacctcagacagtaaattattagaagtcatggtcaattatgatggtggtgggttggggagtggcagggtggaacagtaagtactttgtggcttaacttgtaacttgttatgtaaatttcagagagcctattataaatatttcttaattaaaagagtattttaatgacgccttatctgagaaggtctaattcattccttttaatttgttttctataacaaagggcctgttgtcaagattgtgaagtgtactaagtctcttattcttgggagcttaattgatatgaaacattgattaggccccaagaggagtggagagttgcagaggaattatgaaataaccacaaggcataaaaaagaaagtttatagcttcagggtaatgctttcagctgggcaaa

SEQ ID NO: 93369 - DNA, 33774 bp, Homo sapiens
gtaagcatgttagtattattcaaggactcaagtggactcctgtgccagtttctggagcttttcatatttgtagcttctcctcttcagtactctgctctgctcattccaaatactttggcctcactgaaatctgatcttcatctcctcagcctgttgagtctacctttctcttctcagattctccctctctctgctagggtcctggaaatgtctccagacatatagctgaagtaattggtgatctcacctcatttgttttcctttttcacttattttagtcttgcattgcttattgtccaatcttgggaaacttcatatatattttccagacttttaattatttatggtaaaagagcaagtctgaagccagttgccccatcatggctagaagtgtaaatccctcagcttataatttttgaaagagactttgcttcatgccttacaagggtagttgtggaatgcgcatgaataacaacctctggcttagcctgcccctttgtgagcctccttgtataattcataattgtttggtgcctcaaacatcttaggtatggaacaaatatatatatttggtacaaattattgttagtcgatttttttttctttttgacttttctcttttgtggtttctcttttttcactttcattacacctctcaatagtcatgctgtgatctttgggtctgttgaattttgcaactcttcctatttactctctcttcttgttcattggcacctggaaaagtttgttattccattctttagtactttcagttgtctcccattccaaacccattgagagtgcatattttgaaagaagctcataaggggtggaagatgggctaagtgggtatacaacagggttgaccggaaaccacagagaagctaagcagatctgtaaagctgtatttgtgatgtaaagagagtaaagttaatctagaattgtgcaatacattacagcagccactagccacatatgaccattgatcagttgacatgtgactagtaccacatgttaatattgatatgataatattttgtatgtattgaattataaaaatcgttaacattattttcactggtttctttttgcattttaaatgtggcttgcttatattcctattgggcagtgctaatctagaaagcacaagagaggggaagggaagtgaggttttaagaaagacagtacaatgaccagtctgcattttagaactgactttctaacagtgtatagagaacagacagaaaaggaacagtctgagggcaaggaaggcagttagactactgtgatggctcaggaaagacatgatttgtcatattcagtatcacaaaagttgtatttctgtttgataaaattaccatttactacattagtattggaaagcagactataaataaaacaaaaaaataggctatacaaagcgtatttgcatgaatttgttttggaaagcaaatacccagtcttacacacctgtatatacatactaatgccccctggtattcattcctgactatattttagtccaaggctagactaacacagcctgggaaaagatggccttccgtggattgacacaaacaagtcatttggaaatggtgagaagaaattgtccctcctgacagctctgctacttaccaactgtgtgttcctgggcaggttgattaaactcatgtctcaccgacttcataaggaaaacagctaatcctttaagtttggtgggagattaaaggcaaaaacttaaaaagtgtggaaacctaaataattaatgctataaaattttaggtatgcttgttattctaggccacaaagaaaaccatctttatgcataacagaagagggttgactatacgttcacgccttgggcctggatagtgaaagtgtgacccactcacatttggcaggatggttgctctctagaaggtgtgaagcaattaaccacccccagaacttcacagtatttttctgctcagggaagtttgggatactccagagagcatgtcttcctcaccttcaatgatcttggaaagaggctgagctagataaagggaagcaggacaggctctctgaaggttaagtaaatgagacctcctttggctaacatgctggttatctggccacacaggtgttctgaaacctttctttccctcaccaggagtttagtatcacaaggttgtcagaagcagagcctaaacttaaaccaatatttaactctgctgcaatttgattagaagcatccaagtttggcatttttattttcaaatgtgcaaggtttctggggcaaagttgaactgatgttatataatgcattggtaaataggacacatggaattaattctcagtgagatcccatcttggctgtcaatgccatgaggtagtagggtgaggactctcaatgcttcattaccatttgaacagcttcttgtcaagcctgcaatcctgagatgtgaggagtgacagaggctggtagaaagtagggttttgatgggagctccaatctgcctctggtgttgcagggtctcctatgtatcaagaacattgagctgctccaagttcagatcagttgtgtctagggacccaggcaacactgggtgaattttctctaaattgtgggtatcatacgggctcagactgaaggtagaacaatagtcaccactagggactgaactgaaaaatgcccattagaatttaaaatttaccacaataaagtgaatacttgagcacttatattctgtgatatgggaagtggcaggaaagggattttcaaaaaatcaagtattagaaaaaaatctgtccaagcattagtgttatccgtaagtaccatccaaatctcatgttgaaatttttagcccggcatttaatgtttgatacatggactgttcatggaagtagaagaaacattctataataaataatctattggttaagataatgttaattgttataacccttaaatctcaaggcttaagataataattcatttattgctcacgtacaatttaaaatggatgtttgtgattgtgggtagtgttccattaagcagggatcccaggttccttccatcttgtgtttctaccagcttcaacacatggcctttaaggatttgtatttgtctgcatcaagccacagaaggcatggcacatggaggaccatgtgtgggtttttttgttttttgttttttgagacggagtcttgctctgttgccaggctggagtgcaatggcttgatctcagctcactgcaacctccgcctcccaggttcaagcgattctcctgcctcagcctcccgagtagctgggactacaggcgtgcgccaacacgcccggctaatttgcttggatttttagtagagatggggtttcaccatgttggccaggatggtctggatctgaccttgtgatccacccgcctcggcctcccaaagtgctgggattacagagctgagccaccacgaccagccactgtgtgggtttttaggaacaggactgacgggggtgcacatccacgcactcacatctctgtagccagagaactggttacatgaccccatctccctgcaagggaggacagagaatagagtctagttctattccctgtagaaagacgctagcaaggccaggtgcggtgcctcacgcctgtaatcccagcactctgggaggccaaggcagatggatcacgaggtcaggagatcaagaccaccccggctaacacggtgaaaccccatctctattaaaaatacaaaaaattagccaagcgtggtggtgggcacctgtagtcccaactactcaggaggctgaggcaggagaatggcatgaacccgggaggcggagcttgcagtgagctgagatcgcgccactgcactccagcctgggggacagatggagaatccatctcaaaaaaaaaaaaaaaaaaagatgctagcaactttgccacacatactatgaaaatagacgcttctagatagtacattgttgtctgaatgaaacaatgtagtttataacatttcacaacccagcttaagagttcaacaggattatgtatagaggaagttattcatccagagcagatgtaatagacggctgattatgtaccattccgttcttagcttttataaatttgagaagttgaatcttcttgagatattataaaatttgaacttattttagtttacaaaatatccccacagatttcactatttcagaatttggtgactattgatcctaattctttatactatattaaacaaatgtccccctaattatggattacattttgtgccatctaaaatgacaacttagaaactttgtgtgaattacttggtaactcacacaaaatgtaaataacttcatggtaaaaccagaggaaacaatgactgtcataggatatgactctgagatcaatgtagcattaccatcactaaatactagagagatgcaagacttctgtttttagaggcttctggattttttttttccacatgttttgaataaaagaaatttcaacagctttttacttatgagactgtggagacaattattattgcagccattatgcaaaataaattgctttgcttttcatattcattccatttgttcaatcatccatcagagatgttttgaaggcctgctgtgtatcaagcactgggctaggtgctaggatgtgacaacaaggccctgagcattccagccttctctgagtttataatatacaaatgatcagtcttaagtgagagaagttctaaaaagaaccttccttagagggaacaagggaaccagcttaaccatggctggggaagattgcctgaggaggggatgaaaggctgatatttgaaagattaggtaggaatttgccatggtgtccatccatggatccttccttgtgccttctgtctttatcttaacaattcccttgccaaacttccttgaacttcccttgtacacgataattctgttgcttttctctatacctataaacttttccaggggattgaattatttttgaccacttttgacctacgaatgtgacaatttcaacaactcagtgtatagctgtgacactttcaggctaaaaggttctggtctcttaaaattatggtatcacattgtactctttttaacatttattgtaagcaatccatcattaactgaaaacatcccagttattttccatcaaacaattctctttcagattattttttctaaaccattttcttccaagttgagtcatattttttctgcttattcatcatttcatctgatagtggggtcagtgattctgcctctatgctttcggctgtacctccaattccttttcttagcttgtttattctttcctccatgacattgttgagaaataaatcagttctatggactatcaaaattaatcaaatgcttttccagaaggtatgagctctcttgaaggattgcttctatttcactgtttttgagggtaaggcaaggttatacaaaaatggcaagagctggtaggctgctggtatttgtttttaagactgctgttatcaaatctgtgaaaacaatttaatttcacacatgcccacagacaggcacagagaattgtgaacttaaaaagagacagaaagactagaacctttactatatagaacctttactataatgaaattaaagtggttttgagctttacataatcacatatctaccccctttctcatcatcccacaactactatggaaaactttactctgtcaaccttagtttatctatgattaaaattagaaacacatccttgggcctttctttgcatgccatttttccacggtttcaaaaagataagcttcgcctataaaaggagtttttgttgctatctggttgcgtgtggaacctgacggaactgccacggtgagtcgggaacatgttttccaggcctaattgatcagaatgtatccattttcccccagaggtctaaatgaactaaaacttgccgatcttttaaaaacttagccagactcaatcatgtttttaatttygtgtagatgctgccactttggactctttcactgctgctgggagcagtagcaggtaagaaaacaaataaatgttgagctgggagagattcacttttcaacacggtcaggagggctagggcagctgaattcaggccgcagtaataacatgaagatttacttcaaggagtaaagcacaggagacgcataagagcacaggtacatggagtagggttgtcagaaaacatctaagatgcccagttaaatttgaatttcagataaacagcaaatatttcccacaaacaacaaatatgtgacatatctatactaaaacattatcatttatctgaaattcaaatttacttgtattttgatttgctaaatctagcaaccctgacatcaagtcaagttaagagtttgaaccttggctccaccaccacctacaactgtattaccctgagcaaaattcttaactcttctgtgcttcagaatctttgtctgcaaaatggggagagtcggattccccatctcctaggattattgtgagaattaggtcagattagtaaaccatccaacccagcacctgacacatggtaagatgttgagaaacgcagcccccacaacagctgctactcttactcctaccattaatctagatttatcctccttagagaagagaacccttctttgggttatttttttatggagtgacattcaagcctagagttgtgttaaaccatggatttttggtttggttgtttgtgaacagcttcttcatcacaggaatgaagatgtcctgcagtacagcaaggatggggatatacggttttggcctttccataaaattttagctctcctttcaaagcccacagctaaacagtggctacaagaagttaaggcttagggacacagggctgtccctttcttgagcacctatagcccaaggaagatatctgagtttagaggctaaaaggagtcccacgttgggattgggcagagacacaaggggagtgaagtgatccatgtggtagaattgaggaacaagaacaacagcctgtctggaatagttgtgttgtcttttgaagctgttttgtgagtgtgtggctaggagggtgttgagagtagcagaggaggaaagtctaccacacagtgtaattgaactcatatattggcagacagatcattaaaaagagcatgtttgtaaaactaatatccttctgggggattgcaggaaaagaagtttgctacgaaagactcggctgcttcagtgatgactccccmtggtcaggaattacggaaagacccctccatatattgccttggtctccaaaagatgtcaacacccgcttcctcctatatactaatgagaacccaaacaactttcaagtaagaactatcactgtgtttagaactaagttctttgggaggccgaggcgggcggttcacgaggtcaggagatcgagaccatgctggctaacatggtgaaaccccatctctactaaaaatacaaacaattagccaggcgtggtggcaggygcctgtagtcccagctactcgggaaactgaagcaggaggatggcgtgaacccgggaggcagagcttgcagtaagccgagatcgcgccactgcactccagcctgggcgacacagtgagactccatctcaaaaaaaaaaaaaaaaaaaaaaagaagaagaaccaagttccacctgttttctgtaataaggatactgaatattcaagttcttaagagaaaaaaatcagccgtgaaatttgcatctttgtagatattcagggcactgagcttaggtattacttaatgtaaattgtttataaaagattcattaacttcatattattcttgtccttcctctataacatttaataaatattgtaaatgtagggctatatttatacatataaagtatataaacattcccaatattatatatttatgtaatctcctattatatatatgtatctctacatagataaagacatataaaaatacacacacgcacacacacacacacaaagccttccattgtatgaagaaaagatcattaccaccaagattataacagacatattatcccaagttgaacaatggcaaacatgttgtgatgactgggaaatggcaacatgatgatgatagtgaatactgtggttgctatggaggaatcattattcacaaggatcctgaatcctagcagtcttctacttactgcccctctccatgtacaaatggttctattggctactataggaaactgacatgaaacacttttctgtctaaacaggaagttgccgcagattcatcaagcatcagtggctccaatttcaaaacaaatagaaaaactcgctttattattcatggattcatagacaagggagaagaaaactggctggccaatgtgtgcaaggtgagatgtggtcatctctcaaggaaagatcgtttccaaagtggtaattaacaaacggtaaggcactggccccgaccaatgaggacagtgcttggaggtcttggaggatattcagacccctgctgggcctggagttcctaggggaggtcaaggaggtggtggtgggaagagggggtttaggatggtcagagcagtgaggctggcaagcacttggtggatctaggcagtggttatttaataactgatatggaggtgtttcaacattatagcaacagatgctgtcatgctgatgcacaccagctggttataggcccctgttttttcattagtttttaattttatgtgaagtgctaagaggtctcattttgcctgaatgaattcttttcctttgattttcacttgctactctcggatctcctctggtagcaataactttgaaaactgtgtaggttttcatttttggcttctgttgtttcaacagcggtgatcctattttctttaatttgcctttggctatatgccctgtcataaagaagaatgaaaagacagaaaatcaaatagaataaattttcctagtaactgctagtgcttgaggaacattactgttgattcatttattcaagtatttattcatgtattcatcaaatttctttgacctgctgtcgcacaaagggagtagtcctttcttcagaggtgtcaagaagaaagacacaggctgggtgtggtggctcatacctgtaatccgagcactttgggaggctgaggcgggcggatcacgaggtcaggagttcgagaccatactggctaacacggtgaaaccccgtctctactaaaactataaaaaaaattagccaggtatggtggcacgcacctgtaatcccagctactcaggaggctgaggcaggagaatcgcttgaacccgggaggcagaggttgcagtgagccaagatcgtgccactgcactccagcctggacaacagagcaagattccgtctcaaaaaaaaaacaaaaaaagacacaaaggtcctcctaagcccatacagtttcaggtctgcctctggctcaaagcaagggcagaatgagtcaactccagaacctatccattgatcctgaagacagatgagcactgtagaatctgtacactccgcaagtttaaacacaagcagtaaaaccacaacttgtcctccaaaataatttaaagctgatgattactggagggagggtaataatagatatttatagaacagcraagaaaaaaatgtgattctcagttcaaaaggaatatagttacctttgatatggctatgcaatttatttctaagatcccaaaggcaattgtggtttgtttttgttttgttttgttctgcattgatttggctttgacagaactattgctttgagacgcagaaacaagtggtttaaactagaaggataaaggttctacagtccagtcctgactctctccttagctaactacgattagcaaatcttttccctgctttggatttttccttttgaaaaatggaaaagttgcagatgatttctaagattgttccattattctcaaattctttttttttttttttttttttttgagatggagtcttgctctgtccccccggctagagtgcagtggcgcgatcttggctcactgcaagctccgcctcccgggttcacgccattctcctgcctcagcctcccgagtagctgggactacaggctcccaccaccaggcccggctaattttttgtacttttagtagagatgaggtttcaccatgttagccaggatggtctcgatctcatgacctcgtgatccacctgcctcggcctcccaaagtgctgggattacaggcgtgaccaccgcacctggcctattctcaaattctttttgaaaaaaaaaaaagaagctatacataaacacactcagacaacagaattccttccagaactaacctccatgaagccctaattaaatgccatcaaacaaggctttccatagatatctggtaggcaatgttttcatgtgaaatattaataactctttagtgatgtacaataaaacacgttcatccaaaaaatttgattagtctttctattgtggaaaaacttatttaccttcaatgtatttatataaggggtcctaacattgtctttcattcattcattaaatatttactgagcatctactgtgtaccagaatctgttctggacactgaggctataccagtggacaaggtaaacaatgtccttgggtgcattctattaagggacaacgtagtcttatggcatttaggatgacctaatgaacaacacattgtaccacattttatacagtttatacacttttttcttgaactaaatgtctctgtatctgctacagtagaaatcccaagaatccagttcccactatggtcaaattccagtttggagatgattttaaactttagcagagattatatatctataacagactaaaagttttgtcaattgcattagggttaaaatgacattgtgtgggtcaaggagggaatttatcctagtcctccagtatgttaactagtaattaataaagatcctgaattatttatctgtttattgtgccccttccaccagaatctgttcaaggtggaaagtgtgaactgtatctgtgtggactggaaaggtggctcccgaactggatacacacaagcctcgcagaacatcaggatcgtgggagcagaagtggcatattttgttgaatttcttcaggtaattactcccggattgcataaaagcctgtacacatggttttccagattatctttccaaaaaaaaaaaaaaagcctgtagatttaatcatagataaagacacttctctactcagatatgatgtttctcttggctacaaagaaaaattaaaaaaaatctagctttgggtttcatcaataacccattatgttaataaactagtttttttaagttaacttattcaagcaattggtaggttgtttttaataaattccacgagtatttgttttaattttactagttattaccaatgtcaaccttaagattaatctagttttatttgattttagttttgctttcttaagagaagcacggtgataacaagctaacctcatttggtaacaaaaaccacagaaaatgttatacttgaatgtgtttaaataattgtttttatttttactttctaatccaaatacttgcttcatcatctctggataacaactcttcatgttcattaagagttctctctccatagtaaaacaacaaaatacagccctacttccaccagattaaaagttaaacccatttccatttttcattataactattttaaaaaacatggaagtcaagtgctttggaaaggcagtgtatcttcttgacactgaggtttttgaaggttctccctctgcgcgcctcattgaattctgcaatacagtcatgcaccacacaaggacgtgtaggtcaatgatggacttcagatatgatggaggtcccataagatgacaatggagctaaaaaattcctattgccttgtgacctatagctatcatgataccacagcacaacatattactcatggatttgtggtcatgctggtataaacaaacctactgcactcccagttatataaaagtctaccacatataattatgtacagtatgtaatacatgataatgataataaatgatgacattactggtttacatatttactacactttttatcattattttaaagtatactccttcaacttattaaagaaaaataaaacagcctcaggcagatccttcaggaagtattccagaagaagacatgttatcataggagatgacagcttcatgcatgttattgcccctgaaaaccttccagggaacaagatgtggaagtggaagacagtgatattgatgatcctgaccctgtgtaggcctaggctaatgcaggtgtttgtgtcttagtttttaacaaaaaattttgacaagttaaaaaaattatcataaaaatggttatagaatcaagatataaagaagtaaaataatttgatacagggatacagagtgttttaagctaaaggttattacaaaaagttaaaagtttaaaaaaaataaaaattgtggcctggcacggtggctcacgcctgtaatcccagcactttgggaggccgaggcgggcggatcatgaggtcaggagatggagaccatcctggctaacacagtgaaaccctgtctctactaaaaatacagaaaattagctgggcgtggtggtgggcgcctgtagtcccagctactcgggaggctgaggcaggagaatggcgtgaacccgggaggtggagcttgcagtgagctgagatcgtgccactgcactccagcctgggcaacagagtgagactccatctcaaaaataaaataaaataaaataaaaattgcataaagaaagaaaaatattttaaatgaactgagtgtagagtaatgtacagtatataaagtcttcagcggtgtgcagtaatgtcctaggcctttacattgcttaccacttactccatgacttgcccagagcaacttccagtcctgcaagctccattcatggtaaatgccctctacagatctaccacttcagaatttttttattttttttcagacagagtcttgctctgtcgcccaggctagagcgcaatggcgcgatctcggctcactgcaacttccgtctcccgggttcaagtgattctcccaccttagcctcccaagtagtcaggattataggcacccaccaccacgcccaggtaatttttttacttttgtagagacggggtttcaccatattggccaggctggtcttgaactcctgacctcaggtggttagcccaccttggccccccaaagtgctgggattacaggtgtgcgccaccaaggccagcctaaaatcatttataccgtatttttgctgtatgtttttaggtttagatatatttggatacacaactagttacgttgtgttccagttgcctagagtacacagaacagtaacatgctgtacagatttgtagcctaggagcaacaggctgtaccacacagcccaggtaggtagtaggctatgccatctaggtttatgtaaatayactttatgatgttcccacaacaatgaaatcgcttgatgatgcatttcttgtaacgtatccctgttgttgagcaactcatgactgcacttgaaaacattctgaaaaggttttctttccgacagtcggcgttcggttactcaccttccaaygtgcatgtcattggccacagcctgggtgcccacgctgctggggaggctggaaggagaaccaatgggaccattggacgcatcacaggttggtgaaaacagtgaaagataccaggggggttgaggcaagatgatctcttgaggccagcagtttgaggccaatctgggcaacatagcgagactcctatctccttaaaaaaaaaaaaaagaaaaaaaggacgctacaaacttagactaaatgcagcctgtatgtgatttaaaaggaaatacaagatggaaatttggtgcaaccctacgttttaccttttcacattttctgaattgggccccatgatcagaaatcgctgttctgaggctttgtaaagtcttcattgataccaatctttggtctacagcactctgtttaacatatttatattgcacgtgactagaatatgaattaaggacatcgagagattttattcatgtctatttccccattgaccgacattcacaaaggacaagtttcatgaatagaataaatttcataaatagtagaataaatataattaaacctaaggagctgaaatttgtataactaattatattctgtttcattagcaattgctaatgtgcttaagcctcaaacataaccccagagttgtcagggaaaaggtggtcagggtgctctgggctgccagttctgtgtgctgctaatgagataacgaatagtattttacaaacctgaggctggctgcattcagccagtgagctcacatattggatacccaggttctaaaacctctgtaaggttataagaaagatgctaccatcctggatctgagaggtgattattttaaggaaggaccactttcctcttccatctgtgttcaacctttttgtctctgacttggtgattttctttttaacccttgggataagtcggctgtatttggacttgggataatctggactgcctatccgttcatttgctgaaggggagatctgcacaagattttcttttccacagtctgtaaatgtttctttcccacagcctgctcggccaggtgctgtgcagtgaatgcctgtggtctcagtgacgtttgtgaaagccaaggtccttgcccttgtgggagttcacagtctaatggggactattttaaccctgcgtggtttttagtccagtgtgtcccagagtctacctcttttgttgtaactgctgctagtgactaagactctcccagtgactatggagccatgaggaaaggcatattgtttggtttggggaaaattcactttaaagcaaatagctagaagtagattcctcttcagcaaatggtcaggtaaggaagaacccgttcatccctttccatgcataactcatattttactcttaatacttgtactcaggacttgtcataattcatgaaacatactctttactttagggttggacccagcagaaccttgctttcagggcacacctgaattagtccgattggaccccagcgatgccaaatttgtggatgtaattcacacggatggtgcccccatagtccccaatttgggtgagttcctcaacccgtcccccaaagggtgttatagtgtctgagtctatatacattagcataaaccctcatgtrtttttatgatttcagggtttggaatgagccaagtcgtgggccacctagatttctttccaaatggaggagtggaaatgcctggatgtaaaaagaacattctctctcagattgtggacatagayrgaatctgggaaggtagaactattatgtgtagaaagagatcttcttgggagaaagcttgtgttttgttttgctaaacttgctaaattctttggaattgtacaggtctcacattttacataacaaaagacttttaattgtatccatgagatgtaggttttcactgggataagtgggcatgaggagactgggaaagaaagcgtattttcagtcaacttcagagtacctaattcagggaatgagcttttatttatttaaaccaatctttttcttctacagtattttaaacctttcatttaattacagtattacctattataatcttaaacagtactcaacttgtgattacatcacaaatcataaatatactttacaaatgactttgttctgtgacctgcatragctcacactaattagagaaatctattcaaccactatattctgaatatgacgttaacttggaaaaataaaatctgtccttgatgtgtaattgtgtctgattcaaagggactcgagactttgcggcctgtaatcacttaagaagctacaaatattacactgatagcatcgtcaaccctgatggcyttgctggattcccctgtgcctcttacaacgtcttcactgcagtaagtagactccaccttccgcataaagaattttgtgactgtcacttctcatgactggtgtgctttcctatacatgacatcattcaatgaatgtttatacttttgaacttatacatgcctttaattatatgtatttaaatagtgataaattagagcactttagagaaatgagcttgtacatggaaatgtcctgtttactttcatytgtgttacttttgtatgcattgggtaaatgtccaaacttgttttagaaataaccctaaacagacaaaaaataattagtctatggaaatctgagcaatatctgtaggatgctgatgaacatggaaaaattttcttaaatgctgacctttctaactattaatatataattatagacatgtggacatttctgtgcaatttcataatggccaaaatttttttttgaattttcatcttatttggtattctcttgatatcttggttgaattatttatttaattttactttaagttccaggatactagtgcagaacgtgcaggtttgttacataggtaaatgtgtgctgtagtggcttcctcttggttgaattctttatatgtgatctcaaatatgacatatctattgtctgggtttttttttttataaaattgactttgctttgtaccataaatttttgaaataaaaatttaaaacctatggatttaataagaaaatttccagtaacaaatgtgccagctgaagtcacaattacccaggatatataccttagtgattaagagagaggatgcaaatcttggtttcaccattaaatagctgaatatctttgggcaaaacagttctccaagaagtttcttcatgtataaatgtaaatactgatggcaaacttaacatatttggtgagaggacttaatgagaatacatacgttaattgcttagcccagagcaaaaaaatataatagcattcaattaatgttagctattatgggagagggagtacatatattattcacactacagcttccatatgcagtgagacagaagatcccttctttatttattttaactttatttttattttcttccccaatacccaacaataagtaatgggggaaaaaaataaagaagcaaacacaaaagcctcaggtttcattcagttaaaacttagtctaattcaacaatataaacagttctttcaagtgatactcatcacttgtataagaaaaaatgtctcagtcttgcagatttcttcacctttgcactcccttctaagcttctctccaagtgagtgctggggccaggtgatctggtggtggtggtcgatgtgtgttcagcagaggaaatgaattgggagtccatgggtgtaaagtttttgggctcctttcgactctgggtaatagccttgcctgttttattgatgggcacactgctgtatttagagatgacgtcttgggcttgtctattcttctggctctagcaatgccctcagagagctttggccatttcttcccggctggcttaggcaacacctggattttgttgaatgccaaccctgggactgtgataagcccataatatggtccattgagccaggagtccaccacttgccttcactgtagagtagccctgcccctcacagtgggaattgggacacttgtcctgccaacttggttcctccctctccatctctttttcccagaagtccttggtccagaaataaggggtattttcctatacgaatatgtcttctccaggtatcagcctcacagtaagccttaggctagctggggcattttctcttcacatagagaaaattccgggatctgaatccttcagggcttgatatgctaaacatgagctaaaacaattgaaaaaagccgggcgcggtggctcatgcctgtaatcccagcactttgggaggccgaggcaggtggatcaggaagtcaagatcgagaccatcctggctaacatttttaaacctttaaaaaaaaaaaagaattgaaaaaagcctgacttttgagcctattgtcctcctaataaattctattttgtttatcagaagctgattataatctctgttctacttatgcaatctttctttctttttttttttttttgagacggagtctcgctctgtcacccaggctggagtgcagtggcgctgtcttggctcactgcaagctccacctcttgggttcacaccatcctgcctcagcctcccaagtagctgggactacaggcgcccgccaccatgcccggctaattttttgtatttttagtagagacggggtttcaccatgttagccaggatggtcttgatctcctgacctcgtgatcctccagccttggcctcccaaagtgctgggattacaggtgtgagccaccatgcacagccaacttatgcaatctttctaaaataaattctagctgtaagtagatgaatgtcttgggagcaaattaggcaaaagagaaaaaatagaagatagatacacacacacacacacacacacatattctctcattgtatgatttgttttttttttgagatggagtcttgctctcttgcccaaggcttaagtgcaatagtgcagcctcggctcactgcaacctctgcctcctggattcaagcgattctcctgcctcagcctccagagtagctaggattacaggcgcctgccaccatgctcaactaatttttgcatttttagtagagacggggtttcaccatgttggtcaggctggtctcgaactcctgacctctggtgatccacctgcctcagcctcccaaagtgctgggattacaagcgtgagccaccacacccggctcgttgtagatttttatagtattgtgttgtttgacagtgaagttggtgacttactgttgtgaataatgaaatgcattgttaatctttgctgctgagacactattaaagtccccatttatcatcagaacagaactggctttagaatatttgaatggcgacaacatgtaggaaatatggtacacaactaaaagatagggcatcctcattcatcatttgtttgttttcactagaacaagtgtttcccttgtccaagtggaggctgcccacagatgggtcactatgctgatagatatcctgggaaaacaaatgatgtgggccagaaattttatctagacactggtgatgccagtaattttgcacgtaagtttctgttttctgtatcttatattcttattgctatatattttattattatgtccactgaaaatgtgcatacttgcttttctatacaaaagctttaaacaccccctctgcaaggtggaaaaatgctcaatgctatgttcaaggtaattatagctaattagggtggcagaacggagtttgggtcctggactcttaatgctgcaaaaataagtttcttcatatttgattctggtgctgaattcagaaggctttctctgctccagcctctttatattcagtcaaaagtttcactgaacaaaattctgagatttttgtaaaagcagaaaagtaatctaggagagagagatggcagaggttgtgagaatggaaagacattgacagatttaagagacgtttaggattgtaggctccatgggtgatgggaattagaggctggaggagtggtaggaatgggaacaggttctgggtttcttttccaaataacagaggaataaaattatttggatgagagttaatggggttaccgacatttttaaatactaatgacaaattttatctcctccccaatttgctctgcctatctctaaatggcaaactattggctagcaccaagaaaacgttcttttggttttcataaattaatatattcccaaaggcaatgaaaagttgaattatagaattttgaaaataaatgtagatatttagacaaaaagatagcagtaccctaaaatttggtgatctatgaaaataaattaaactgaaaaaatgtcacagttcacaattttacaactaccttttaacataaagttcttataactttcaaggataaattgtcaggttggaaattgaaaactaaatgtattccttagtcccttggcttgaaaaaaaatctgtcttaactttgaaaaaattctgcaaagcccctattacctaatgcctgtcccctaaacacatataaaggaatatctatcactatttcattagaaaattacacacacacacacacacacmcacacacacacaattataaataaattattcaaaacgtggcagtagtgggatgcaaattaacttgtttttagtgtcttttatctccaaactgacattttgcaatttttctcccttgcaggttggaggtataaggtatctgtcacactgtctggaaaaaaggttacaggacacatactagtttctttgttcggaaataaaggaaactctaagcagtatgaaattttcaagtgagtaaaataatattgctctatgcttttttttttttttttttttgagtcggagtctcgctgtgtcrccggggctggagtcttgctctgtcacccaggctggagtgtagtggtgcaatcttggctcactacaacctctgcctctagggttcaagcaattctcctgccttagcctcccgagtagctgggattacaggcgcccaccaccacgcctggctaatttttgyatttttaattgagatggggtttcaccatgttggccaggctggtctcaaactcctgacctcaggtgacctacccacctaggcctcccaaagtgctgggattacaggcatgagccatggtggccagccaatgcttcttaatgttggaatactgcacatgtataatgtatgtcatcgacataagagtttgtctattcattactaaatggaagtagagtactgacatgtataagggaaaaggaagcaattatgtcatccttacgccttagtaccattcagaattcagtttctaaatattttcatgctatttcctgataaaaccattcatgtttgctttgataactggcatctgatttatgatcagtaattaattagtctgcccacaaaacacatgtgaaaagatgatggcatactctcatcatttattaaattgtgggggaatggtgactaatacatgtttgaagttttactaaagtaaaggtgactaatatgagatgttcatggcaaatggactaccactgagttagcatgcatgtctgaatttgtttaatatgttagaatgcaaatgtactgccaatcaccttagccagaaatgcattgtaagctggtcttagaaacataaatgtgtatgtatatatgtacacacttacatacacacaaatatatatgtatatatttacatgtatgctcatgtatgtttttgttaacttcttaaatccttaggggcactctcaaaccagatagtactcattccaatgaatttgactcagatgtggatgttggggacttgcagatggttaaatttatttggtataacaatgtgatcaacccaactttacctagagtgggagcatccaagattatagtggagacaaatgttggaaaacagtaagtaatgaaaatcccagragatgtgaaatatcgagtctgtgtttatagttctattcccactaaaagtctaatttaagtgaaacctcctacaggggatcgcctacatcctagttgcagttgcttcctaatgccttctgtttctttagggaaaagggtagaactttaggaaacagctttgatcaattcatgatagatgtgtgttagctgatacaaattaaatgttagaatgagaaaccggcttcatgattctaaggtgagaggaatgtttcctttggcagctgtgcttcgtgctatgtgagtgcttcttgtgtgcatcttccaaacttcccaggctcacctaattgctgtttaagttgctggaaacacagtgaatgtttcaaggaatagaaataggcttttccaaatcactggtcttcttagtgaagacgaaggtccaggagataattcttggtttcaaccaggactggagtgtgtgggagccaaaggatggtgaactaccaggaaaggtgatctggtgataatcataacaataccaatactagaccaagtatttctgagtattaggccaaattctgaggcaagcactgtgcttctgtcattctatccttccatcctcataaaaaccaaatgagaagactttgcttctggcaaagatggagtaacagagcccagatttactggcctgactgaaataaccaaaattcaaacaaagtacatgaaaacacagttttccagacactgaacattgaggaataagggatagtgattgctgagagacaaaaacggacaagatggagcctggcagttgccccagcttactgctccgagagatttccaggatgtgtcacagggaggagaaacccaggcagagttcagtggactccttaagttaaagaatcagagctaagaatgagaagatccagggaagtagatttcacaggacagcataccagagaggagagagttgctgagggagaatcccagagattatgaaaagtctccctgaatattcatcaaggtactgattgacccatgtatgagaacaaaccagctggaggtcattgaaatatccatttgatggattagagaaaatagttcccctacttttgcaggactgrgaatggtgcttgtttccaccaagcagtctggaaaagtttataattcaaaggacacagggtagagtattttagaaggtcttgctttatagtggaaaataatttacctatattgaccaagatctgtaaagaaactgtttccaaataactgcattgcagaacaaaaaggtcaagaatatttataaagatccagaattatcaagtacctaaaactctaaaatccacagtatctgactttgactcaaagattcccaggtatataaagaagcagaaaaatacagcctataatgaggagaataatcaatcgacaccaaaacaaaactgacatagatgttacattagcagaggagaaaattaaaacagttcttaaacctgtatccatttgcttaaaaggtcagtaaaggcatggcatatacaggttaagtgtttctcatccaaaatgcttgagatccgaagtgattcagattttgaatttctttagactttaggaatagttccattatatgtaccagttgagcatcaaaaattaaaaaaaaatccaaaatctgaaatgttccaataagcatttcctttgagcatcatgttggcaatcaaaagtttcaaatttcagagcattttggattttttatttatttttaatatattttatttttccataagttattggggtacaggtggtatttggttacatgagtaagttctttagtgatgatttgtgagatcctggtgcacccatcacctgagcagtatacactgcaccatatatgttgtcttttatccctcgcccctcccactcttctccccaagtccccaaagtcctttgtatcattcttatgcctttgcgtcatcatagcttagctcccacataacagtgagaacatacgatgtttggttttccatttctgagtcaagtaactcaggaatggatttttttatttttggatttaggatgctcaacctatatagaaaaagacccacactgagtttctagagatgaaaaatacaatgtcacaaacaaaaaatgcacagaatgtaattaacagtagattagacattatagaagacaaggttaatgaccttgaatacataatagaaactttctgaaatgaaatacacagagaaaaaaatcttaaaaataactttaaaagaacatcagtgatctgtgggacaataataataaggcttatttatttgaaataagacccttttttaggtctttgaagaccctaacaaagaagggacagaaaaatatatgtgaagaaataataccttgaaaattttcaaacatggtgaaaactataaaccaacagatcaaagaaaatcacaagaaacatgaagaaaacagcacagcaccaatacacataaaaatcaaaatgctcaaaccaggtagaatgtacattattcaggtgattacactaaaaacctagattttaccactatacaatatatccatctaayaaaacttcacttgttcccttaaacttacacaaataaaaaaatgttgaaacccaattataaagacaaaatattgaaagcagtcagagaaaaaccacacattagaagagtaaagaaaaaaataacagcaaatttctaatcaggaacaatgcaagccagaaggcagtgaaacaacatcttagagtatggaaaggaaaaactgttaacctggaatttatacccataaatatctttcaaagacaaagatgaaataaagacttttaaaactgaaataattcctcaccagcaggttaacactaaaagaaatgtcaaaggaaggccttcaggcagaggaaaatgataccaggtagaaaagaattcactaaaagaaattaagaacacaggaaataggaaatacatgataaatacataatatttttaattcttattactaaattctctttgaaaaaattgactatttaaaaaataatgacagtattttggggagtaaataatatatgtataagtaaaatataacaatgacataaaaggcaggaggggagacctgaaaatatactattggaaggttcttataccatttatgaattggtatactttcccttgaaggtgtgataagttaaaaatatgcgctataaattctaaaataatgaaacaaataatgaaacaaccactaaagtaatgaaacaaaggataatagcaagtaaaccaaacaaggagataaaatggaataaaatataatccaaaatagagtataaaaagagctaaaaggggccgggtgtggtggctcacrcctgtaatcccagcactttgggaggccgaggcgggtggatcatgaggtcagatcgagaccatcatggctaacacggtgaaaccccgtctctactaaatacacgacgcaggcgtggtggtgggctcctgtagtcccagctactcaggaggctgaggcaggagaatggcgtgaacccgggaggcggagcttgcagtgagccaagatcgcaccactgcactccagcctgggtgacagagcgagacaatgtctcaaaaaaaaaaaaaaaaaaaaaaaaagagctaaaagagaacaaagaatataggagacaaatggaaaacaaatagaagacaatagactcatatctagccatgtaaataatcatataaagtaaaaatggtctaaatactacaattagaagacaaaacttaccccactgtattttttaaaactcaatatccaattgtattctggctatataaaatgcactttttttttttttttttgaratggagtcttgctctgtcacccaggctggagtgcagtggcacgatctcagttcactgcaacctctgcctcctgggttcaagtgattctcctgcctcagccgcctgtgtagctgagattacaggcagcagcaccactcccagctaatttttgtatttttagtataagtgggatttcaccatgttggtcaggctagtctcaaactgacctcaagtgattcacccacctcgaccttccaatacatctcgctgagtcagcgattttggtgttcgatatttacccatgaggcaagaacacatatgattatacaaaagatttgtacatgaatatttatagcaatttttttttgagacagagtcttgctctgtcacccaggctagagtgcagtggcacgatcttggctcactgaacctccatctcctgggttcaagcgattctcctgcctcggcctccccagtagctgggattacaggcatacgccaccctgcccagctaatttttgtatttttagttgagactggttttcgtcatgttggccaggctggtctcgaacccctgaccacaggtgatccacctgccttggcctcccaaagtgctgggattacatgtgtgggccaccgtgcctggcctgtagcagcttttattgtaacagccaagaagtagaaataatccaaatgtctaccaatagaggaatggataaacaaactatggtctatggtctgtccatacaatggaatattactcagcagtaacaaggaatgaactaatggtacactcaacaatatggatgaatctcgagataattatactgaatgaaaagctagacaagagtgcacacaccttagattccatttatataaaattccagacaattcaaactactctatagtgacagcagagccgtggttgcctgggaggagtgaatattggagggaatgggaagaagcaattacaaagaggaagaaagaaaattgggggatgatagatatgttaataactttgatgttggtgatggcttcagaggtgtgtgtgtgttgtgtgtgtgtgaaaacgtatcaatttaaatatgtacagtttattccaggtaaattaaagctcaataaagctgttaaaacaaaaatatatatcctatgaggtagatggttttattatccttattttatggataattaattaaggtacygtttctgaatttctatgcaggaagtttgactctacaaaattcttaactactacaaaaaaattcagttcacctttaatcatgtataaatattggtgcctttcttttcttgtgtccctgattgataacagttttaacctttaatttcctatttgtgaggctgccagtcattgaggaagtgagcgtgaagggaaaaaaacattttctgagcactttttttctgttcctggtagtttacatatggtaaggtattttattaaagaaaaatattccaaagcatcctaagtattgttcagcctgttctttctttctttccttttttccctccctcccttcctttcttccttccttccttcttcccttcctccctccctctgtcctttccttccttcctttcttctttccttccctccctcccttctttcttttcattccttccatccttcctccctcctttctttctctttctttctttctttcttttcttctctttctttcttttctttctttctctttctttcttttctttctttccttctttctttttttctctttctctctttctttcttctttctttattccttccttccttccttcctttcctttatttgatccacacagggaaagaaggcatattgttcagtcacaatgagaaaagtttgtcatttcagttcaaatattgaattaaaataatggttagccaacgtaacaccagaaattagaytttatacactgggctgatttcttatgatggtgactctgctgttcctgagttgcattggttgacatgggctaagtgttcagtgactgctcatgacaaatgagtctttctttttctttggggcgtctactgacagcttctctctcagctattgcacaaccagaaaataacactggaaaggagaattcagtcctttatgtagaagaggtcttccctcagccattgtctggtctccagcacagggtgcgcccttccctcagactaggaggttgggggcatagrttgtcctcaytgtcacactccagatatgtgccaggaagaggaggtgactttgtgttgttttttctccacaggttcaacttctgtagtccagaaacygtcagggaggaagttctgctcaccctcacaccgtgttaggagactactgttatttgaccaatgaattgacttctaataaaatctagtggtgatgcattacatgcctgtttcttttgtccaaaacctcgattgtttcaagtgaatctgttggatgaagtgactaaaatccaaaatttggagttggtcaaaagaaccaccaatggctgttaaattttgctgcatatttgaccttaagaatrttgtttacatggtactgtcatcatgttcattatcaatattacttatgccattctggtcacttaaggcagtcttccatgtccaaaatgaccccctcttggtgggctcacatggaaagactcacaattgccactttttccataatctttaagttctgtgtctgctcctaatcagatatctcaggggaaatgacacacaaggagataaggactagacagatccaatgctccctaacaggtctacctggtctatgtggggctcccccaaacccctcacttctgcagcctctttgatttttctaaagcgcaaataaatcatcttcccagtggtccccaggacagaatccatattctttagtaagccttgtgaggtccctcttggtctggttgtctccttggactctagcttcatctttcactatgttccttctggaactctacattctgaccctgtcccccaagagggttgtcttgatctctgatgctgctggatgttgtcaggaactcttcttcttcctgggatgttcttttctctgtcttcctgtctgttaagctcctactggttcttaaatctttttgtagacatcacttcctccaggactcacctccattatccatacccactaagacttgatgaggggcttaccactattatactcccaccacacccagacattttgccgtctcaacactggacttcccatattgtaattgcttgctggctcacttctctgtgtagcccatttctaaactccttaaggagttttcccattgtatgtgcctggcacatgcctggcatatagtagaagagaaaatatgtattttttgtatgactttcccactaatgggaccaacgaatgagtccactagggtcaggtacttaaaattaggccatgtctaaacaatacatcctaagaaagaaagggatatttgtgttaggtcttaaaagttgagtagggatttgctaagaggacatggtggaaagggcactccagagacaaggaacagcatagccaaaggcacagggctatgaaaaattgaaaatgccatttattctgtatttcaccaaaatatatgaagttaatcaacacacaaagacttgttaaagggccacccgtttatattaattaggatgtttcacttgcatgaatcaaaatctccaattcaaagttgctttaacaacaaggaagtgtttggctcacatgattggaaagttcagaggtcgaggaagcttcaggttttgatgacccagtcactcaataacctcttcaaaagccactttctttttctatcttctgatatctatggtgctagttctataccaagtctggctcccttctcagttgaagaatggccatctcccacaattgaggctataaacatttatttcacattcaacaaggagagaaagtgcatcttctttcctatttttttctcacaaaacttgtgagattcactcttattggcccctgaccatgggagtagaatgtgctgattgtcttaagtcaatcagtgaacactcctgggcaaagaacaaggccagcatcctcaatgtacatgaactatatagagaaggaattgatatctaaatgaaaaagggagttaagaatgactcatgggtcatcattacaactggaaggatggagttgccattgcctgaaatggacatgctttgagaggcacgattttgaagaggcaggtcagaaggtcagttttagtcatgtcaaatttgagaggctcatcaggcatgcaactgggcatggcatgctggcatttggatatataagcacagaagtgaggacagaaatctaggttagacacataaactttggcatctttagtctatagatgtcatttttaagcactgcacttccctgtaaagagaataatgcaatgtttatcacgtgagtgcttaatgaatgtttataattgtaattaccatgaggacctcatgaaactttcctaaacattaatgataatgatgaataatgaataataaaaatcaatgaagaaataggattatgtgcaaatttactcatttaataagattgaacaaaggagtttaatttttaaaaatcagttaaaaatcttttgtaaagaaagatatccattttcatcataacgaagctgtttccaagttagtttaatcatttcaaatgaatggtttactcaaattatttctatatttctaaacttaataaattttttggaaatactacttttagaaccctaaatcaaatttttcttcccctaagagatgaacatttgtgaaaggatgctgataatgttcagaatgcatgatgtaagatagtggtagagacaatggcagagaattgatgaatttgttaattcaagaagtgcttagagaatgttgacaatgtgccaagccctagtctaatatcagagaactaaagttgaaaatataggtatcatccctaccctcatggagttttctgtcttatttgatgtttctcgaagtgtgatccacctaatagaagacagctgatgaattagttggctagcactgcatagcacatcaccccaaagctcagtgacttaataacaataatcatgtattatggtcctgtgggccaacagacagatctcctgatctggggcagggttggctgattttgcttggtctcactcatgtatttattggtggtcagcttgtaggttggcagagggctggatggtttagtagggcctgtgtgcattggctttcctccacatgatctctcatccttcagcatgctagcctgtgctattgaacttgaactcccaagggaccaagaaaatgagcataagcaaggaagactgcttgaggcctaggctcagaagtagcaaaatatcattttccccacattctattgaacaaagcaagtcacaaggtaagcacaaattcaaagatgaatacatagactctatttcttaatgggaggagcttaaaagtcatattgcaaaaggcattgctagggagagtagcagggaactgggaccatttttgtaatcaatctaggtggtttctcagttttagtaaggaatgtaatagaaatatttctctcacttttgacaaatttgggttataaaatctattaatatttccacagaaattcccttcctttcttaagaattgtggtcatatgtgatgcagaggccctctgacattttgcctcagcatcatttccttcactaagaaaacattttttgtgggtgaatgtattttcacatcatttgcaagtagtagcttactctcatgtgttaaatgtgcattttatattattctcattctgttaagttatattctcattttgggctgtgaaaaaaaatcaatggcttcaagtggttcattgaagtgaaaaagcagcaatgaaaatactaacacaaatacaatatctcagaataagattgtaactgaaacagtggataagactcatatgaaactcccccctatcaatctttatatcttgaaacaagtggaaaatgtggtgttgctaatgggatacacaacaatgatcaactaaacttggctgatactagatctgagatcatttgtcctatacagtatcctgtacccaactccctgttctgcattgcttttagtcacgaatatttgccctaagtagagttgatgatgttgacgttttcataatattttcaaataatatctttgtatgctcagataaataattgatctttttctaaaacaagcaacaaataatgctttccaggatgaaatcaattaattttgtagttaaaggtagaaataaacccacagctacagtcattattcaaaattacatttcttgtagtaaaaactgttgcaaatcacactatcacacagaagcctaaaaaacaagccaaaataataatgatacctgttatactgggggagaaaacgaaaagtatgctatcagccaaattcccttatcacatgactaccttagatgttacatagcatcattggcatattgtttactatctggagtgtgctggagagatgtctcacattacaattggacggccccattcatgtgcagacttggaattggtttctggcacacaaggcacaaggaagagtgcttcatatatttcatttttttgtctacttgatcatttaattttcattgaacgttgttttgtgagccataacacagacagaaaacaaggcgctgggatctacacggatagaaccccaactgtgtttgcatcagggaaaagtgtggctgttaagatataaaaggtggcaaaaaattctaaatctcagagaataacggctgggtggtcagctaaatgcgtcatgttcctaataaaatgttgaaagaggccgggcacggtggctcacacctgtaatcctagcactttgggaggccgaggcgggcggatcacgaggtcaggagatagagaccatcctggctaacacggtgaaaccccgtctccactaaaaatacaaaaaaaaattagccgggtgtgttggcaggtgcctatagtcccagctacttgggaggctgagacaggagaatggcgtgaacctgtgaggtggagcttgcagtgagccaagatcgcgccactgcgctccagcctgggcgacaagagcaaaactccatctcaaaaaagaaacctctcacgaccccctggaatattcctactgacttcattctattaagcctcagctcaggaaacaaaagttctgctacaaattatcacaacaaaaaggaagatttatttctataactggtaaaaatagattatcatcaaaatggaaacacatagtaatttctcagagagagtctgcccaggagccctgggagttaaatactcctatatcagggcggactctcacctagctgcacatgggaatcacctgtgggctttttaaaggggcctgtggcttatgattaccctttaattggttggggtggggcctgggatttgtctgttcttttttttttctcccaggtgactctggtttgcagccaggatggagacaaactggcatgtcttgattgtgttttggcttcgtgcaccttggagttgtatgcaggaggcggagcttgcagtgagccaagatcgcaccactgcactccagcctgggcgacagaaggagactccgtctcaaaaaaaagaaagaaagaaagaaagaaagaaagaaagaaagaaagaaagaaagaaagaaagaaagaaagaaagaaagaaagaaagaaagaaagaaagaaagaaagaaagaaagaaaggaaggaaggaaggaaggaaggaaggaaggaaggaaggaaggaaggaaggaaggaaggaaggaaggaagggaaagaaagagaaagttgaaagacagagtgaaaattgtaacttcaatagaaatctctcttagcctccacctagccaaatcattgttttcactcattttctccattgttacagtcaactccattcttacctctgagcctattgatcatctcatctccttgaaacattttcttctctttgtctccaggacaccactttcccttggttctcctccatcttcactggctgtttcttttcaagtcttcctcatttccctgtgcttgtaacattgtagggccttagggtttagcacttgaacctcatctcatctagactaatggctttatgtgaaatggatgaaccccaagttgatgtttattacctggacctctcttctgaactacagaataactgcctactctccatctccacttagactctaagaagacatttcattttaaccatgcccaaaactgaactctgggtctccccctcaaacctgctccactgacatgcagccctccccatcttagttaatgcaatttcacctttccagttgctcaagccaaaatttgggagtcatc

SEQ ID NO: 93370 - DNA, 17365 bp, Homo sapiens
cagaacccagttacagtctccagccttgtggtctttgcctgtgcccactgctcaccaatcctggatgttcgaataccagggaagcccccaccttttttaaaaatagagatggggtcttgctgtgttgcccaggctggtctcaaactcctgcttcaagtgatcttcccacgttggcctccaaagtggaaaccccagtttcttgaggagaaaaaattcaacaaatttttccccaaataaagattagagaaaaacaaaacaaaagtgttagagggctaaaaatgaataaatcaggctgggcgcagtggctcacgcttgtaatccagcactttgggaggccgaggtgggcggatcacctgaggtcaggagtttgagaccagctggccaacatggtgaaaccccgtctctactaaaaatacaaaaattagccaggtgtggtggtgcatgcctgtaatcccagttacttgggaggctgtggcagaagaattgcttgaacccgggaggcagaggttgcagtgagccaagactctgtctcaaaaaaaaaaaccaaattttttttgtgtttgaaacagggtctccctctgtcacctaggctggagtgcagtggcatgctcgtggctcactgcagcctccaccttctgggtccaagcgatccttccacctcagcctcccaggtagctgagaccacagacgcttgccaccacacctggctagtttttttttattttttgtagagatggggttttgccatgttgcccatgttggtctcaaactcctggactcaaacaatccacctgccttggcctcccaaagtgctgggcttacaggcatgagccaccatgcctggccaggttacattatttaacctaatacattaatttagaaaaattgctcttttccatttgtaggttaggaaacagttttatgcaaattcttcattctgctgcttgattgaggtaatgttggattgttacgtcttgctcacagtaaagtagaggaaaagcaccctgtataatgaatattgtcaggatgtgagtatggcaccatcttttctttcttaagtaataattctagaaaagaacctcaccttatagtcaggcctgtgaggtatttttgaacacctgtcattatatacaactcctgggtggccacatggtcccttgccacaccagaggcctcactgctgcctccctccaagccagggtaactatttttctttttcttttctttcttttgaaacagagtcttgctctgtcacccaggctggagtgcagtggcttgatctctgctcactgcaacctcggcctcccgcgttcaagcgattctcccacctcagcctcccaagtagctgggactacaggcatgtgccaccatgcccagctaatttttttgtatttttagtggagacagggtttcatcatgttggccaggctggtcttgaactcctgatctctatgatccacccgcctcggcctcccaaagtgctgggattacaggcatgagctaccacgtccggcctgggaacctgctttttgaggtgactggacattataaacaaagaacctagaatgtactaggaattgaatctaggctgagtgcaatggctcaggcctgtaatccactgcagtgcacttcgggaggccaaggtgggaggatggtttgagctcaggagtttgagaccaacatgggcaacatagggagacccagtctctgcaaaaataataatttttaaaaaactaggctgggtgtggtggctcatgcctgtaatcccagcactttgggaggccgaggcaggcagatcacaagatcaggagttcaagaccagcctgaccaatatggtgaaaccccatctccactaaaaatacaaaaattagccatgtgtggtggcgttcgcctgtaatcccagctacttgggagactgaggcaggagaatcacttgaacccaggaggtggaggttgcagtgagccgagatcgcgccaccacactccagcctgggtgacaggtgagactccgtctcaaaaaaaacaaaaaaaacctggccagatgtgatggctatttgtggtcacagttatctgggaggttgaggtgggaggattgcgtgggcccagaaagtggagattgcagtgagccataatcatgccactgcactccagcctgggtgacagagccagaccctgtctcaaaaaaaaaaaaaaactagtaaatctaatggtcatcatacagccaatagttactgagcatttgcagtgatgaaatgtagagtggcaagtccaggcatggagaaataaatgaggaatgcagggagcagagtcagaaggcagaatcggctagaaagaaggcagtgcctgcttattttattattttattttattttttgttgttgttgttgttgttgagatggaatcttgctctgttgcccaggcgggagtgcagtagtgcgatctaggctcactgcaacctccacctcctgggctcaagcaattctcctgctcagcctcccgagtagctgggattacaggcacccaccaccacgccaggctaattttttgtatttttagtagaaacagggtttcaccatgttggccagctggtgtcgaactcctgacatcaggtgatccacccacctcggcctcctaaagtgctgggattacaggcgtgagccaccgcgcctggctcagtgtctgcttattgagtcccgcagtctcctaggcatttcataaatatcatctctcaccccatcacacccgtagggaagagtcaggacacatttcaactcctctttgccaaggaaggaataatgtgtgttccttggcttattgctttaccgtctcaggtctcagtttcctcatctgtaaatggggtctacctaccacatacaattgttgttctgctctaagaactttgtatattgccgggcgcggtggctcacacctgtaatcccagcactggccatcatggtgaaagcccatctccactaaaaatacaaaaattatccaggcgtggtggagggcacctgtagccccagctactcgggaggctgaggcaggagactaacttaaacccaggagacggaggttgcaatgagccaagatcatgccactgcactccagcctgagcgacagagtgacaccctgtctcaaaaaaaaaaaaaaaaaaaaaaaagctcaaggttaaaaaaaaagaactttgcatatataacttagcttagaataatatgtcttcagttattgtttgcccttatcattattacaacatatgaggaagccgaggctcagggaggctggtgctctctgtttccctccaccacttgcagtacacagagggttaaggtggaagctttgccctctgcagctggcccagacctggatttggctgcctgttctgccctggagaagcaaggccaactgtcaacacagggtgacttcaggtcatctgtggctatgcatggccagcctgccaaggggacttgacgagagggaagatcactgctttcctctcaggtctgatggaactagggcaggcctactcctgtcatgtccgagctatgagaccttgggcaagtacctctccctttctgagtctcagttttgtctcagttttatcttgggatacttatgtttttctgtctcagggcccctgtggaaactgagttggcacaccactctgctgtgccaacataagcatagttaaggccagtaactctgggtggggtaaatattacaatttaaaggggaggggttatagggaagtagaatatttttttctttttctttttttttcgagacagggtcttgctgtgtcacccaggccagagtgcagtggtgccatcacagttcactgcagccttgacctcccgggctcaagcaatcctcccacctcagccacttgagtagctgagacctcagatatgtgccatcacacccagctgattttttaaaattaattttttgtagagatagggtctcatatgttgcccatgctggtctcaaactactgggttcaaatgatcctcctgcctcagccttccaaagtactgggattacaggcatgagccaccatgccgggctgggaggcggaattttgttcagtctaaagataagctttttcatagctctggctgtagtgggagggagcagaggagtgaatgattgtcagttgggagggtgcagagtgggctcctgccctagggtggaggtgagggtggcttaggtgagacaacacagaggccctgttcagccccacgtcccctccctgtgctccctcctcctctctcctctcctgcaggcgtgggaggtatcatcattcagcagatttcaccagaggcagtggaggaggcaggtacctgagccagaattcagaatgtcttattctccacttgactctgccactaacttgttgtgcaactttgggcctttccccaggccttcattttcttttcttttctttttctttttttttttttgaggcggagtctcgctatgttgcccaggctggagtgcagtggcgcagcatcatctcggctcactgcaagctccaccttctgagttcacgccattctactgcctcagcctcccgagtagccgggactgcaggcgcccaccaccacgcccggcttattttttgtatttttagtagagacagggtttcaccacgttagccaagatggtctcgatctcctgacctcgtgatccacccgcctgggcttcccaaagtgctgggattacaggcgtgagccactgcgcccggccattttcttaaatatctaataaaaaatatatagcaaatgcagtttgtaaactatgacaatatgaccacgcaaaagattattatcttccaagactgctggtccaaggaaaggtcagtaataaagtggaagcattgtagcttatggaatgactggttagatttgggagaagccttagcaataatctagaatctgcatagataatacatctgaggattgggctttgtggtttacaaagcattttttttcctcttttgatcccagccgcttgtctggactgatacaaagcatttttattagtttgtcttattcaatcctcacaccacctcaaatttacagaggatatggatctggttaacttgtatgactatgtaacctcatgtcagtccacagcactgcctggaggtgggtagaggtggtcctgggctggaatcccagccccagtgggaccttgagcaagttactttagctgtctgcacctaaatttcctcactggcaaaacaggaatactggtggttcacacctgcaattccagcactttgggaggctgaggtgggaggattgcttgagtccagaagttcaaaaccagactgggcaacatagcaagaccatctctacaaaaattaaataaataaaacatttacaagggttgtggtgaagattaaatgagatcactcacgaaaaagctcagcagaccctgatgtgcagtaggtgctcaataaatgttagccagcaaaaaacaaacaaaaaaaaactcagctaggaaattgcagtactgggcttctgactccaacctcagtgttccttgccccacatcaagctgtttcacttcaaatcctctccatttcacaatggagtcaccccaggttgaaggagtgaactgtgctttggagggctgccctaagcaggcagcaaagagacagcttggtctccagtgacctgaaagaattatttattgccctgaagtccagtataccagttgccaaagggaaaagcttccttccaactggctcagcaagctgacagaggaagagtcgggttcttgctggggcagtcatgcagagctgggatgacaagcagaaggctggcagatctgtctctgggcagatggatcacctgatacagatgctggggcctgagccctgggattggcccaaaacagggctgtgttgacccaacagctgggcattggcatcctgtcaatctgccgagagcctagaaatagtgcgggggcagtctgctggtctcattgtgtcagaggaagcaaccatgcaggtgctaaccaagcgttaccccaagaactgcctgctgaccgtcatggaccggtatgcagccgaggtgcacaacatggagcaggtggtgatgatccccagccttctgcgggacgtgcagctgagtgggcctgggggccaggcccaggctgaggcccctgatctctacacctacttcaccatgctcaaggccatctgtgtggatgtggaccatgggctgctgccrcgggaggagtggcaggccaaggtggcaggcagcgaagagaatggaaccgcagagacagaggaagtcgaggacgagagtgcctcaggagagctggacctggaagcccagttccacctgcacttctccagcctccatcacatcctcatgcacctcaccgagaaagcccaggaggtgacaaggaaataccaggaaatgacgggacaagtttggtagaccttggacactagggaaggtaatggtggccatgctggtgggtgtgagtctacaaagggacattccaggagaggagagggggcagtggtgcaacccastgggagaggaacagcctgactttcagacagagccactcttgggtcagggtattgggaccacaacctaggagggcctaagactaggcctgtgttactatccttctgacctcaaattggcaattgcaatgaagtgatatggaaacagagggaaaagtggcctgtgagggcatatctcatatgcacatatatgtgtttgtgcaygtgtgcatttattagtatgtgaatgcttgtaaatgtgtgaattgaatgagtgtgttctcatcagtgactttgttaagaatttaattgaagaggggccrggcrcggtggctcacaccaaagcactttgggaggccgaggcgggcggatcatgaggccaggagattgagaccatcctggctaacatggtgaaacccaatctctactaaaaatacaaaaaattagctgggcgtggtggtgggtgcctgtagtcccagctactcgggaggctgaggcaggagaatggcatgaacctgggaggcagaggttgcagtgagctgagattgtgccactgcactccagcctaggtgacagarggagactccatctcaaaaaaaaaaaaaaaaacttacctaaggcatgcacattgatttaagtgaacattgtgaattccatttgtgtgacagtgtttcccaacattttttcaagtcacagaacatggaaaattattatatggcacatggggatacataggtgaggctgcttgcagtactgctacaacaggctgggggtactctgaccatcccaggttggaacccaccaaacgggaagccgagggaccagtcatggcactctaatccattccaggcaaactggagtatgcagacatgcctgttgggaagccctgttgtatgtacatatgaatatgtgttccagtctaagcctacatgtctatgcacagaggggctggggtggtgagtgtggatgagcagcaagctagacaagcaggtggtggcagagggtaggaggtgggaaggggccctagcatggtcaccactagttcactcatggataaagactagtattaatagaaattggaccacagcacctgccagttttgattctgtgccacctgccagccctgctcccacaaactggtctcattasttgtaaacaacatccacgtccattgcaatctcaaaaccacctgatgcagctatgtaggaaaagattctcatccccagtttactagtatggaaattgaagccagagaggtgaagtgactcacccaaagtcacacagtaaggagacaaaagtaagactggcctcaactttgagctgagtgttctttccatcgtacccactgtctgccattttgtgttatcttcataatctgtgtgaaggctgctctgtaattatgcggaataaacatgggacccccaaacacagagcctatggagagctctgctccaggcattttctcagccrtttttccttctcccgcttcaaacccaaactgtcaacctcaacccttcttccctctcccgttgaggctccctgagttgcctcacagaggttcttcttgaattagayggggctgtgtcaacagctctgggttcacgttctgattctatcactaatgagctgtggggccttgggcaagctaattcatttctctgggtttcagcttcttcactgaataataacagtggttgtaaaactaacaactggcatttgaatagttttaagatcactttgcatatccattatctaatggaattatcatccccccccacctttttaaattttgagacggagtctcaccctgtcccccaggttrgagtgcaatgtgcaatctcagctcactgccacctccacctcccaggttcaagagattttcctcagcttccaaagtagctgggattacaggcgtgtgccaccacacccagctaatttttttwaaatctttagtagagaccgggtttcaccatgttggccaggctggtcttgaactcctgacctcgtgatccacctgcctcggcctcccgaagtgctgggattacaggcatgagccaccgcgcccagcctatcattcccttttgcagatgagaaaactggaggcctgagaagtaaaatgagtccaagtttactcagtaaataacagccaagatgtgaaccctggcctaattagtctaattcttttcctctacagtggtrttccttagagccttagacttttgcagagtgggctcaaagtgggaactgggcatggcagagtgggtagaaaccacactctgactcactcagttgcttcaaaggccagagcagcaactctacgccataacgtttcaacacaccctaacctgattttcattcagaggcaatatggtatagcaacagttaaaaatctgggctcttgttctggctcttccattgacttctgtattatcctagacaactttttttttgagatggagtctcaccctattgccaggctggagtgcagtggcgcgatctcagctcactgcaacctccacctcccgattcaagcaattctcctgcctcagccacccgagtagttgggactacaggtgcaygccactacacccagctaattttttgtatttttagtagagatggggtttcaccatgttggccaagatggtctcaatctcctgaccttgtgatcctccccgctcggcttcccaaagtgctgggattacaggcgtgagccaccgcacccaaccttttttttttttttgagatggagtcttgctsttgtcacccaggctggagtgcagtggcgccaccttggctcactacaacctctgcctcccagattcaagcaagtctcctgcctcagcctcccgagtagctgggattacaggctcacgccaccatgcctggctaatttttgtacttttagtaragacagggtttcaccatgttggccaggctgatctcgaactcctgacctcaaatgatccacccaccttggcctcccaaagtgctgggattacaggcgtgagccaccacgcccggccctagacaacttatcttacctttctgtatctgtttccctgttagtaaaatatagcagagaaatcaaatgagttattccagctctgacaacctaggattytccttacagtgctgaggcactrccagttttccaacagcaacatcagcattgttcttcctgcttcaatgggcatgtgacagtatcttggttgtttgaattgatactgacttggccttttaaaaatttcttcactccacagatcccttcacatgatagaagacagactctttgatgaggtcggcggagcagttcactagccaatgatgagagcagaaaggcctagacctgcagccagaagtgaaggcrgctcagttctccgggatgcttctctacctcctgagcaccaattcctggattccagtcactggctcacctttagaatgtctgttgctattcactgctcccctcgctcctcttaacagcttggggaggtgaccagtggttcaggagggactagacaattacctgtccagtgtggtatggtaggaagagtgtaggtgttggcacgtgaccaaaattcacatccctcctcatggcagtcattcagtatgtgtacttgtacaagttatttaacccattggagcctaaattccctcatctataaaatggggataatattatctacctcacaagcttatgaaaactaaacatgatgaatcaaaagcacttggcatgtgagggctattaaaatagcctgattttttttttctccccctctccccaatgtatttgctctggcccttgctttttaccctccagagctaagaggtagcagagtctctkgggatgagtgattcaccctcttacttggcgaccactgatgagatcaacaacaggtgaactataaacctattatttattgcagaactaataaaaaatccaaagcctkgtatttgtacatctttattatttctaaagcactttcctcaacctaatttcagtttttacaattggtactcaagaaaatagagacagaaatcatttgattttgcccagaaaccatctgcttatatttataaggccacctaatttgaaatcacatatagaccaggcgcggtggctcacgcctgtaattccaacactttggaaggccaaggcaggtggatcacaaggtcaagagattgagaccatcttggccaacatggtgaaaccccgtctctactaaaaacacaaaaatcagctgggcgtcgtggcatgcacctgtagtcccagctactcgggaggctgaggcaggagaattgcttgaacccaggaggtggaggttgcagtgagccgaaattgcgccactgcactccagcctgatgacagagcaagactgtctcaaaaaaaaaaaaaaaaataccacatatactttatctccmaaacctaatctgattataaattctaagctaggaaacaaaaacttttgggacaagtacttttttttttgacggggtctcctttgtcacccaggctggagtgtcacccaggctgcagtgaactgtgacacaaccacaattaattgcatcctcgaattccagggctcaatagatcctcccacctcagccttatgagtagctgggattgcaggaacgtgccaccacgcccagctaatttttgtattttatgtagagacagtgtttcaccatgttgcccaagttggtctcgaactcctgggctcatgcaatctgccctgcctcagcctctcaaagtgctgggattacaggcatgagccactgcatcgggccaggacaagcatttgataagccataaaaagtaacctcattccagttaggtacagtcttttgcttctaattgcaccaagctccactgtagacagtattagctcctgagtccattttctccaggataacccacctaagagcaaagacaacttggcaacataagatttctgttttccttgtctggagtctcctccttcgaaaccaccttctatatcattcattatagacagctcagaaatacaaacctgactgtatgatttaaaacgccttaatgacttaatacctacaggatgaagtcaaaattatttggcaagagtcacagaatcctccataatctggctcactctaaattcactttgcactaggacaggggcaggcaaaccttttctgaaagggctacatattaattaggctttgcaggccataggtctctatcacaactactcaattctgctcttgcagcatggcagtcgccataaacaacatgtaaacaaatgagcatggctgtgttccaatgagactttattggcagtgggccagatttgggtagtctgctaactctaaactagaattcaacctcatcttaaaatctttcagatgggtgaatggaaactgaccattctctgatgatgaactatttttcttacaacaataaagagtcagagtactcatggtacgtattttaattacaaggtgtcaacatacagattagcataagcttcaactgtcataagaaacatgttccatcaaattcagaaacagcaggtatcagtgaaactggagcaagcattttgaagacttcaacgtattggatggaatttttcaaaaatttcaccatatgttttcttatctataaaaggaaagatcataaaagatttattttaaaaatatgttttaaaaattgtatttcctaaacgaaaattaacactcactaatcttacgattgaaatcctgctgtggtctgaatgttcatgtccccccaaagttcataaattgaaatgtaacccccaagataatgatattaagaggttaggactttgggaggtgattaggtcacaaaggctctgtcctcatgagggggatcggcttaggggaccttgtttgcctcttctaccatgtgaggacacagcaagatggcatcatctatgaagcagagtgggccctcagcagacaccaactgtgctggtaccctgatcttggacttcccagcctccagaattgcaagcaataaatttctattacttatatattacccagtctattctgcaattatacaggtggtaagaaaaacaaagttaaaaaattttttttaattacccagtttaaggcattttgttatagtaggccaaacggactaagacaaacccctaagaatttccttattttcttgtccttgactatggcttggtaatcactgaaggattttctttcattgactgaagaataactttggaggaatctgtgatgacaaccaaatgactgccaagagggacaaggtgctgccaggagtatcctgactgaagaggtgaaggaagaaataaacacagaggggcacaggtcagctaggagaggccaacagccaatgtggtcaagctctccgggctcccactgtctgtgcatgaggctcttggcacaactgccactaatctgcagctcagaaagagaatgagccctgaagctatacacactcctgcagacacagggaactcatggaactatgtctaggcaaagagccagaggtctgagactgaagactcctcaagccactgggcctcactcctagtaatcaatatatccaagatgacttccagctctaacatttaacggttctgggtattatgcattcccgatacatccactattcatggctttgtgctagtctttatgctcttctttggcaaaaaaagaaactgtatctttctgatccaccataaatatcatatatgtgactgaaggctgtgggaatattaaagagtaataaaattttagagctaaataagaccttagagatcattcagtgtaatgaaatttaaatgttttatatcacgcatttacattaacagaagaatttttttttttttttttttttgagacagggtctcgctctgtcacctaggctggaatgcagtggtgtgatcacggctcacggcaccttgtcctcccaggctcaagtaatcctcctgcctcagcctcccaagtcactgggtctataggcatgtgccacctcacccagctaattttttaattttctgtagagatgaggtctcactatgttgccgagactggggaaaatctatttatgtttacaagttcaaattttttctatactcattcatttacacatttaataaggctatgtgtgccaaacccctggggaaaccaaaaaaaactgtcgtagtagttaaactcccagcctacagatactcatatatgtgcacatctgtgttgtgtatatgtgtgtaaaacacaggtgagaaaagttatattacaactattaatagattcatagcagactagagatagagcaccctgagggaatgcctgactgtagctgggtgaaagcttcactgagataataaaagcagaaatttgctaggtggatggggtggaaacaggggcaagaggaagaataacatagcaggaagaaggtacaacatgtataaagtaatatagggcaggttcgggacaaagcatttcaccaggcaaatgatgagtgatgaggaatgaggaagtattccatacggttcatatccactattatgcataagtaagtgcctgctatgtgtaggctctatacaagaggctggggaaacaaagacgaagctacaatccatgaagaacacacacatgtgtatatcatatggtagataagaatgtgggtaaagtgtttctaccagaggacaggcaattagctaacctggagtaaatgagccatcctaaggagtctggattttatccactaggcaatggatggcttatttattttattttaattttattttattttttgagacacagtcttgctgtgacacccaggctggagtgcaatggcgcgatctcagctcactgcaacctccgactcccaggttcaagcgattctcctgcctcagcctcccaagtagctgggcttacaggcacccgccatcatgcccggctaatttttgtatttctaatagagacagggtttcaccatgttggccaggctggtctcaaactcctgacctcagatgatctgccccgctcggccccccaaagtgctgggattacaggcgtgagccactgcgaccagccggatgactattttaaacagatgtgatcagatttgctgtcattggaaataagaccaaagcaagtggtgagttaagaggcaagtgcaacagtccaagcaagagattaacaaggcctgaaccagggtagtggtagtgggagaggagagttcaaagttaagaaatatttaggaagtagaactgataagacctgatgactaatgggaagtgaaagagaaagacttgatgattctcaggcttctggcttgagtgtccaggtggacagtagtgccattctctgaagcaggacacagaggagcaggaggtttgggaaggcagaggggatatgagttttgtttgctgtccaaaggacacggaggtagtcagaaactggatatattaattcaagagaattttggtctatagactaagatgtgggagtcaacagaatttagaaggtatctaaagccatacacatggataagattaaccagggaaaataataatacagtaaacacagattatctaaaattaacttgaaataccttcttcaggaaaatcctctggatgtaatttcatatatccaaacatttcacggtccctcacagcatacaggtagtcttcacgttttacaagataatatccagcaaaaaaaaaggccgtaatatatagaagctggcgatgcaaacctgaaattcaaatgacaaatcccaaagaaagcaaaaattagtccatgtgtattaagagttacatttttggctggacgcagtggctcacacctgtaatcccagcactttgggaggccaagacaggtggatcacctgaggtcaggagttcgagaccagcctggccaacatggtgaaaccctgtctctactaaaaatacaaaatttggctgggggtggtggcgggtgcctgtagtctcagctacttgggaggctgaggcaggcgaatcattggaacctgggaggcagaggttgcagtaagctgatattgcgccattgcactccagcctgggtgacaaagcgcctggcctgttatggcatttcttaaaaaaataaaaataaaaaaagcactgggctcagtggctcacgcctgtaataccagcactttgggaggctgaggcaggtggatcacctgaggtcaggagtacaagaccagttcacatggtgaaaccctgtctctactaaaaatacaaaaatcagccagatgtggtggtgggcacctgtaatcccaactacttgggtggctgaggcaggagaattgttagaacccgggaggcagaggttgcagtgagccgagatcgcgccgttgcactccagcctgggggacggagtgaggctctgtctcaaaaaaaaaaaaaaaaaaaaaaagctattctgaacaaaccgccttgatccctgactttgagacaccctacatattcttttttttttttgagacagggtctagctctgtcgcccaggctggcgtgcagtggcacaatcacagctcactgcagcctcaacctcctaggctcaagcaatcctctcacctcagcttcccaagtagctgggaccaaaagcgtgcaccaccatgccttttttctttctttctttctttcttttttttttaagaggggtcttgctatgtttcccagactggtcttgaactcctgggctcaagcgatccccctgcctcagcctcccaaagtgttaggattacaggaatgagccaccacactcggcccacattatcacttctttaaaggttaacaaatctaaaatattacatgcaatgtatattttagcatatagcacttaatatttatttaataaatgaatgaacagccttgggcaattcaatttactacctctaaaacatagacaagacctatcctggctgggcgtggtggctcacaactgtaatcccagcactttgggaggccgaggtgggtggatcacctgaggtcaggagttcaagaccagcctggccaacatggtgaaactccgtctctactaaaaatacaaaaattagccgggcgtggtagcacgcacctgtagtcccagctactcaggaggctgaggctggagaatcgcttgaagccaggaggtggagattgcagtgagccaagatcacaccactgaactctagcctgggcgacagaatgagactctgtctcaaaaaaaaaaacaaaaaaagacctatcctatctttctcacagtagtagcatataaaacaagacatatgcatataaaagtatttccgaaaatgtataaaacaataaaaatgaaaaatattcctatgttctagaactggacagagcactctctcttaccccaaacagccactgctttccataatgggctacccgccatatagcaaaccaaagagtgcatgttctcccatgtgccactggactgcagagacacacagaaccagactctctctacgctgacccatgttcctcacagaaagactccataagcgttcgagatgatgatgtcagcatcctagccctaaaggcatggcttggcctcttgccaaggccccattttcctaacctctctcctcattctctcttagtggtcgacctctcactacctgcacaccccatctacaatcattttcccattgtttactcagtgagtctaaccccggcagctattgtgctctttgaagaacatcataaattactgataaactagagatcaataaatatttaattttgtgggctatacttagcataccaactaactctaaatttcgggcacattaagtggtaaccagcaagaaggttaagtttt

SEQ ID NO: 93371 - DNA, 104643 bp, Homo sapiens
  misc_feature (1)...(104643): n = A,T,C or G
ctttatttacaaaagcaagtggtgagttggatttggcctgtgggtcatgctttgacgacccttgccttaactaatgaaatctagaaatagagttctaatgtaaatatagaaaggctttcaatctagggattaaaaatcgaactgtcaagatgtcattgtcttcttggtctgaaagagtacacatcaagtgttcaaaatagtgaattgcccaatgaattaagaaactttccagtataaaagtcaaatgacaatggagaatctgatactgttttttactctttatttctgctacttaacgttgttcttaaaggcgtcgttacttctgctgggtagtactgtctactcagttggactgctgatgcagacccagtccataccaacaagttaacacaggttcaggccttctgagaaccaaaagatttttaagtacttccttcctaaatacagtaacttttaacagtaattttaacaccagaagcaagaagtaaacaaaaatctctgatgatcgaggcatctgttgtcatatattttgtgctcctaaggtcatacagcagagcctcttgtattatcttttggtctgttggcctttagtttatagtttgtaaaatggtggtcacatgtcaatgctgactagaagaaggagatgctactgtaatcaggcaggttggccttcgctgagaagtgaccattgattgctagaaaacaaagaaatgggaggcattcagcaacctggggttgttggttttaggaccagaaatgtacccccaagtctccaccaaatttctcaataatcctgaagagttttgctgtttgtgttttaatataacacagtaattggtgcttgtaatgaggactataattcatcaaaaaggtaaattgtgaattgtgcacatgcacacacactcttctaagcaaatgggactgctctattttgaacagtcttcaaattgaaataacttatttcgatatgtagaaaattaggataagcaaaaccaatgtatttactcttaagagttccagatagtagtgatttgtcagtatgcatatgaatctttagtcctggcattctgaactcaaaacctcaatagagtggtttcttgacccttaaagtgttttatttttagtaaatacatttttaattctgtgacctcaaacctccaagctacattatgatttcataattttatagtgatttatccccccattgctttaaatttaataatcccatcctctttattggtatttaattttttctgtagtctaaaggcccttttatttaaaatgttatatattctgatttcttaattttagggatttttctctagacaattgagaatatgtaatttttacactttaatgttcatttgattataacctacacttgaaaagcaatttttaaagaaatctgagagaatttaaaaatcattttaaaagcatcatgtcatttttagctcaaaatacttcagagaatttattttattttattttttttggagacagggtcttgctctgttgcccaggctggaatgcagtggtgccatcacggcttgctgcagccttgacctcccaggctaaaatgatcctcccacctcagcctcctgagtacctgggaccataggcatgtgccaccacacctagctaatttgtttgtttttttgtagagatggggtcttgagcccaggctggtctcgaactcctcagctcaagggatcctgctgcctcagcctcccaaagtgctgggattacaggtgtgagccacaacccccagcccagagtctcctttttactaacggtgtacaacataaaattcaaactctaacatggttttacatctggcccctacctaccttttgcctctccttctttgtcacatactccacctgttcccatgcactttagactcaagtaatgaaaaacagcttgtattgctaggaacaggccgcattctttcatggtctgactttatacacactctcttgtggcaacctagaacacctgtctataggctctcttacatcaggccataccctttctgtgaaatttttaatctgtaatattctactgaaactttacctctctgaagccttccctaatctcctcaggcttttccattgttcatattctgtcttgtaacagttatcacattgttaaagtcgttccccagtaaactatgagacccttaactgtggaagggaaggcatctttttaacctttgtttttgtgccatacttagcctagagcctgacattaagcaggtacttctcaaaaaaaaaaaaaaaaaacacagggtagagacagataacaagggattcctgacacctacgctgtagatagctataacatttcaataggaatcttgggaatctggggaactggaagcagctgggaaagcaccggcatctgagccactcagtactcttccaggcttgtgtgtgagccttgccaccttcaggtattagcacttgaaatataacttctttatgaagctccttatttacttgccttctcggtgaaaaaaaaaaacaacaacaaaaaccgtttccttccccatctggtgccagcactgtataattcctaataagcttgaaaagataatgttggcaatactttacaagtttattgctaatgtttaacatttattaggtgcttgctgtgtgctgatctctgtgcttacatatttttcatatatcacttcatctatcttcacaacagtccagtgaagtagatgccattattatcccaatttcacaaatgggaaaaatgagattcattgagataaattaaactacccaaggccatacaactatagactaagggggccaaaatttgaatctagtgtagattcaaattagagctcattctcttattcactactggggaatattgcctggccataactgaagtccaaataacagcatggttataatatgggctttaaaataatctagacctggattcaaaatccatttattggaggcaagtgacttcacttctgatcttcagttttctcatatgtaaaatgataatatctacctcaaaagtgttactgcccacccatgtacatggtacatactaaaaaagcaaatgttagttccatttgccacttctacactttatgtgaaccctgggggtaatggtttgtacagaataaggcctggcatgagaagacaaaaaccatctgacaaataaaaaagctgtcattctgtctaccagaatgtcaaccagtgcctgccttccaggatcaacaagtgttttattaccataatcacatttattctcttaatgaaaagggtgtgtcttgagtatttaatagttaattacccataaatatactacagtagaataaggaataaaaccagtgatctgtctactatagtaactaggtttctttcttggtaatacttagggaacatatgagggttccctgtgggttgttatttattatataaaatagttgctctggtagttccataatagagacctgtcagtgccattcagcagagaaaaatcataaacacagctgctgtttttgtgtggcttgtggttttggttttgttttcatttgaacttttttatgcaggcatgtcatcatttaaaagtagtcatttggcgttttcccttgcattcttcagattttttgtaggcttaaaaaaatttaagtcacttctataattgttcatacagattgatccatctggtctttttactagccaatgaaatttttgacatgtaggaaaaaggacaattattttaaattctataatttcagtggatctcttttataagtttgaagaaaaatagtttcaactatcaaaaaatatttttcttatattcttcattgtttcctgttaatttctgtattttcgtgggggctaaaaaggctaataatttctgctattcctactcttcacatcctttgtgtgttataactctgaagcataccataattatttgtttgcaaccaagaattggtacagcataaatgtctaatcaaattaggccctcttgctctctttaagtcacactggctatgaggtggaggtggattatagggggcaggcatcaattcagggagaccatttaggcctttgcagtggtccagacaagaaatattgatggccggcccaaggtactaagagtggtatttgaagaatgtagacagaataaagagagaattaacgaagcttgttgatgggttagatgttgattggtgtgagatggagagaggagtcagggatggcaggtttcctctcttctttcttgttgtgtttgttcaactcttgcttatcttttttttttctttgttttttgatggagtctcgctctgtcgcccagactggagtgcagtggagcgatctcggctcactgcaacctctgcctcccaggtttaagtgattctcctgcttcagcctcctgagtaggtgggattacaggtgcatgccaccacgcccagctaacttttgtatttttagtagagacggggtttcaccgtgttggtcaggctggtctcaaactcctgacctcgtgatctgcccacctcagcctcccaaaatgctaggattacaggtgtgagccaccatgcccagccacttatctttaaaggattaagtttatgtttcctactatgggaaaccatcccaccccaaacttgatgaccgcattatgtgcttttatagaacctggcacttctccaggatagcatttattctgttttgtaagtgtgaatgtaattaccctacacacagcatacacataatcttcatattctttgccttgtcttgtgaaggcaagggccatgtctatcttattcgtcattagattcccacatccaacatagtcctggggacagcaccaatgcacttttggtgcataagcaaatagtgtcatttatagctcttacctacaatatctgatagactaatcaaatatagtaggttatctgggcctttttgattcatgtctctagcttaactttcatttttttcttatttggtatctctcactttgccttttgatatactcttacagtttcgctcactgagtaaaagaaaatataaacagcaagaagtaaacttgtgttttatggattttgataacatcttctaaaagaccccccaagattgttgatgtctaaaaaaattaagggccttcaactcataataatacttaatagttcttaaaatattacaaactgattggaacattgcactaacagagagagtcatggatcttatttatgtgtagattcatttcagtcagaagtattaggactggtttatttgagaaagtaaatagatcattacaaattcatcgtcatacttcaaggaaaattcattgatgacactttctaatattgtgactatatacctaaatcatactttaagaacagaatgtctaagatatcacctagataagaatcaatacaaaaagaaaaaggaaaattacaaagattgatttaagaaagacaaaagactaagccataaaatttctcattattacaggttgagggcagggagtgaaaaaggaaaaggatttgacttctctaggcatggttttacttattttaaaataagagcagtggacccatgatctgaaagattgtttctggcctaaattctgtttttccgtaagatagaagagaatgataaaggtgatatgcaatgggaattttgggttgaattgcaacttacttttcattcttcccatagcctcatctctgtcttgatgaaaccttagagaatccactcaaatatagtgttttcttaaatgactttattaaatttaattaaatacaaatgktttttctaatctctgctgaaataaattctttgtagcctaatttagagcaacagtctagattagaatacttaagatgaattattactacttagcctaatcaagtcaaactatggaaaatgagtttttacattttagcagtgttataaatgtattcttctgtagttgtgtctcttttaacatatgttttccttctttgatttaggtttctgctttgggacaaccatacatctaattccttaaagtagttttatatgtaaaacttgcaaagaatcagaacaatgcctccamgaccatcatcaggtgaactgtggggcatccacttgatgcccccaagaatcctagtrgaatgtttactaccaaatggaatgatagtgactttagaatgcctccgtgaggctacattartaaccataaagcatgaactatttaaagaagcaagaaaataccccctccatcaacttcttcaagatgaatcttcttacattttcgtaagtgttactcaagaagcagaaagggaagaattttttgatgaaacaagacgactttgtgaccttcggctttttcaaccmtttttaaaagtaattgaaccagtaggcaaccgtgaagaaaagatcctcaatcgagaaattggtatgatacaatatcctattctaaaatgcaaataaccatraagcttaactgttgtccctttctaaaatatttctgtctaaaccaataccttcgtaatcttaaatagctttctaaataaaaatcataaatctaaagtatgttttactatcgaactatggaactatttttaacaccttgatattattccataaggttttatttaagaaatgtcatttgtgggatgacttagatttgttatatctcagtgttgttattcttttaaaaatgattgataggaatgtttgctgcctttgctctaaattgctgaatatattattttttatatattaaaaatattcaggactgtcaacttttaatatatatgcattcatcaaaaatttgttttaacctagcggtactttttttactttattgtgatcttccaaatctacagagttccctgtttgcaaaaaaaacatgttcatgctgtgtatgtaatagaatgttatattctttatgtaattttattaaaggttttgctatcggcatgccagtgtgtgaatttgatatggttaaagatccwgaagtacaggacttccgaagaaatattctkaaygtttgtaaagaagctgtggatcttagggayctcaattcacctcatagtagagcaatgtatgtctatcckccaaatgtagaatcttcaccagaattgccaaagcacatatataataaattagataaaggtaagaaaatgactaatctactctaatcattactatagtgcagtcttctacctgtgtctatatctttgtatagtctttttttttttttccagctagatagtaagcttcttgaaggcagggactgcttatactgacaagatatagttgagtgctaaatagaaattatgtacaatcaatatttattggttgaatttttgtgtgaatatgatactgatttcttggtaaattgtctataaaacggaagaagtatgagtttgaaatttactattttttaggattcagaattagagctgattatcttttcataaataaaaactataaatagaaacattttatgaaattttgggaaaactttatacattcttgttattatatatcataaatacaccagaaaaaaataagtaattttcttaagtattaaatgcagtaattctgatcatgggtgataatatatagggagatttttgatatttaatatattagtttctagaattaagggaacaagaaactaaactatattgttttcaaaatgcatgtcattgtatcagataaatatctatatttttcagggtaacagtaaaattatcaatttgagttaactctcacacactattaaatatcaaattctgttagtagaataagttaagacatcttattactattcgtatttttcaaagtagtttaatgcaacataagatctttcaaaattcttttctattctagcatatattttaatgctcttttcattttcccgaacattctttgtgaaaaattttcaacatatagacaacttgaaagaaatgtactgtgaacaaccaaacctctctaaatagtttgtcttcccgttttcttcatctttctcttttcttcttttttggactcctggcttaatcttaaaagragaaaattagacaatgcatttcctctcccctcgtaattttcttacctttcctccctcacattttctgtcattctaattgaacatctttaaacctccattggttctttctttacttcccatagttaccaaaaacttccaccttaggcactgtcaaacctttgagaccatcatgaatcactattcataggggcagtacccatgaagtatgtcatacagtttagaatggaaattagcttggtctcaggtacttgtgacccacatatcacagttttgtgtgcttgtcataaaacatgagatttgggaatgatctggcagccygctcagatataaacattttctgtttctacctgatatttacctagttttaattgggctgattaaaaagcatttctgatatggataaagtaatgatagtgaatacttgttgaaatttctcccttgaaaaatgaaagagagatggtgattgcatctaatgttttcctgttatagggcaaataatagtggtgatctgggtaatagtttctccaaataatgacaagcagaagtatactctgaaaatcaaccatgactgtgtaccagaacaagtaattgctgaagcaatcaggaaaaaaactcgaagtatgttgctatcctctgaacaactaaaactctgtgttttagaatatcagggcaagtatattttaaaagtgtgtggatgtgatgaatacttcctagaaaaatatcctctgagtcagtataaggtgagtaacaagtttcaaaatattaatttttaatttaaaaagtaatcacattgaggatgagtatctgtattttttttttttttttgagacggaatctcactctcgcccaggctggagtgcagtggcgcgatctcggctcactgcaggctctgcctcctgggttcatgccattctcctgcctcagcctcccgagcagctgggactacaggcgcccgccaccacacctggctaattttttgtatttttagtagagacaggttttgcaccatgttatctaggatagtcttgatctcctgacctcgtgatccactctccgtggcttcccaaagtgctgggattacagacgtgagccaccacgcccagccaagtatctatttttaggatatacttcttgataagtaatattagtaaatagcgtttgtaagcttattcttttaattctgtgattaattcgagaggctgaaaatgttggcagttactccagctcccaaatatagatattccatggggttgttgtttttgttgttgtttgtttgtttttcgagacagggtctcgctttgtctctcaggctggaatgcagtggtatgatcatggcttactgcagcatcagcctcccaggctcaagcagtcctctcacctcagcctcctaagtggctgggaccacatgcgtgtgccaccatgcccagctaatttttgtttgtttgtttgtttgtttagagacagagtctcatattgtccaggttggtctcgaattctgggcacaaacaatcctcctgccttggcctcccacagtgctgggattacaggcgtgagccattgcgcccagcctatttcgtgatttttatcccctccaaccagtggctgtggaatggaattgaaatagacatttcaaaaaatccatgacctactgttaagatatactattgatactttcctactctctttttctgtttattaaataaatacctataagaagcaactacgtttgtgccaagcatatgtcgagtactaatttacataaccaagtaaaacctgggcctggccttcaggttgcttattttctagtggggcttatgggtaagaaaataatgtgtatatagtaacatttatattaaaaatctcgtcttaactaccatttcaaaattcagaccagtatattttaacattttttgtaaatatccataatgttactggtctccactatttgtggttttttgttttaattttagcaaaactaatgtttctcaggaaatgtttggacaaaaaagcaagtgaacagcagcctttggatgggacatcagtatgacttaatagattgaatgacagaggcgtcctaagtgatattacttttctgttatcatatacaatgttttcataatgagtatcctgtgatccttgttttttttttttttttttttgagacggagtcttgctctgtcgcccaggctggagtgcagtggcaggatctcggctcactgcaagctccgcctcccgggttcacgccattctcctgcctcagcctcccaagtagctgggactacaggcgcccgccactacgcccggctaattttttgtatttttagtagagacggggtttcaccgttttagccaggatggtctcgatctcctgacctcgtgatccgcccgcctcggcctcccaaagtgctgggattacaggcgtgagccaccacgcctggccgtgatccttgtttttaattcctttttttgcctccagttaagggtagaactacagtttcaaaagttgaccttaatttttttctttcgtgcaatttatattcagaagtgtttgattgatcttgtgcttcaacrtaaatcctaaatgttagtattttaaatgttataggaactactagtaaatgtggtctataatgtttaattttttatcacctttgcagattaatatgtagtcataatactctgacatgttacttttaaaatgaaaaaccttacaggaaatggctcgcccccttaatctcttacagtatataagaagctgtataatgcttgggaggatgcccaatttgatgttgatggctaaagaaagcctttattctcaactgccaatggactgttttacaatgccatcttattccagacgcatttccacagctacaccatatatgaatggagaaacatctacaaaatccctttgggttataaatagwgcactcagaataaaaattctttgtgcaacctacgtgaatgtaaatattcgagacattgataaggtaaagtcaaatgctgatgcttattattttatagaaattattttagataacctttttcttgmactatacagtaatctgttgacctgtagtatgttttcagatggttaggagaacatccaaatctccgaatgtaaaaatatatcaagaattttacttgagcttccatctamcttagctattatacagctcacagtcctttgttaataattctaatattcacaattctagctcttaaaatcaaaagttttacagaattcgttyggcagaaagacctgggccaaccttaagtgagggtttttataatctttattaaccccacttagtataaaattccggtatcttattaaagaaatattaatgtctttatgaggtactgcttcaccagctaaggaagtagtatttagtaagtacgtgtaccaatttagctttctaaaatatggaaaaactctgaattacatacctcccttaaggggattgtgggcctatatttatgttttagtagtctgatgtctccattgttattagtggatgaaggcagcaactaattttggtgaagactctacatcagtattaacgtgttacatatgtgaaaaaaaggagaaccaagctatatctgaacaaaaattccgtggttttatatttgagtctatcgagtgtgtgcatatgtgtatgttgagtgtatacattagtatatacmtacttttttcttttagatctatgttcgaacaggtatctaccatggaggagaacccttatgtgacaatgtgaacactcaaagagtaccttgttccaatcccaggtaaggaagtatatagatttatatttccaaaggttatattagtgtttagcagtgtgatccataaaagtagtatatttttttagaccagcctgggcaacaaagcaagaccccatttctacaaaaagtttttcttaaaaattagctaggcactggccaggcacggtggctcatgcctgtaatcccagcgctttgggaggctgaggcgggtggatcacgaagtcggagtttgagaccagtctggccaagatggagaaaccccatctctactaaaaataaaaaaacattagccgggcgtggtggcgggcgcctgtaatcccagctacttgggagactgaggcaggagaatcgcttgaacctggaaggctgaggttgcagtgagctgagattgtgccattgcactccagcctgggcaacagagcgagactccgtctcaaaaaaaaaaaaaaaaaaaaaaaaaaaaaaaaattagctaggcacagtggcatgtgcctgtagtcccagccattagggaggctgagacaggagaataggagaattgcttgatcctggaagttccaggctgcagtcagctatgatcgtgccactgcattccagcattagtgagacctgatctcaaaawatatatatattttacatcattagctttatacaagctatatattaataaattaccagaaatgtacatatagaccagcaagactttctgtcaaatgagtatcagtcacaggattattttattgattctgtctaaagttttatcagaatagtttctgattgtctcttttcattgtatcaaagagagaacagagtatggttataattttatgctaatcattccccacattagattaaaaacctagcattttattcttttcctgtctccatcatcattcacatgaaggagaagtaagagttggcaagcaactccataaccaaactaccctgaggcagtttccttcaaatcactcccaagaatagatatttatggctttcaaataaagggtctttggtagcaaattaatttgttagtgggagagggagttatggggaacattttaaattattactgcctggatgtgatgaagaaataaaaagtagtataatccaatagctgactatcctgcatttctttgcttctctctatacagtcatttgggaataagagtacccctgaacgtaatagcagtaatatttcaagagaactcaaattgttattggactttatgataaaataacaatagagctaactagtgactcctccagaagtaaatctcataatgaatttagactgagttctaagacattcaagaaaaagttctggtcttgttgctaaagatggccacccttttagagcctaggtaaggttaaaagagatggtagccttgtctgccacagggaaggaagatagttcctcagcctacctaaacyactgtaggtcagaaaacgtatcattcaggtcagaaatgagattgtgacaacaaacaacttcaggatctttttttttttttttttttttttgagttgaagtctcaccctgtggcccaggctggagtacagtcaagtgtaagcgattctcctgcctcagcctccctagtagctgggactacaggcacatgccactgcgcccagcttattttttgtattttcagtagaggggggtttcaccatgttggccaggctggtcttgaacttctgacctcaggtgatcccacccaccttggcctcccaaagtgctgggattacaggcctgagccatcatgcccggccaggatctttttaaattcttgctaaaacaagagtttatatcccactcatactggtatgcctcacactgattagtggggtggttgtagcaggaaaagaaaaacaacatttgaggaaataatagccagaatttttccaaatttggtaaaaactataaacccgtcaatccaaggagttcaacaagccccaagcaaagaccccaaaataatactggatagaattatcctagctagctgtttcaagtaccacaagttaaactagctttataaaagtaaaaggctgggcgtggtggctcacgcctataatcccaacactttgggaagccaaggcagatggatcatttgagcccaggagtttgagaccaccctgggctatatggaaaaacacagtctctaccaaaaatacaaaaaattagcctgggatggtggtgtgtgtacctatagtcccagctactcaggagggtgaggtgggaggatcacctgagcccagggaggttgagactgcagtgagccatgatcgtactactgcagtccagtctagggggcagagtgagaccccgactcaaaaaaaaaaaaaaaagtaaaagataaacttatttaataatatatgattaaaatgttgaaatgttagtaaaatagctatttagaaaggactatatttgtctttaagcattctgtagtctaaaaggtgaagtatttatggtagtgtgaaaatttaagtaaattttttaaacttttctgtgcttacaaaaacaaaaatcagataaatgaatatgaagttattaaaaagatagaaaagtagattttaaaaattcttactaaatatttgtttcaaatctgtgcttcttttatgctaaattagatgctttatgakttcttygtaaatgttacaagtatctcccaaaatcagagtcaatttggactgtatacacacacacaaccattttctagaaataaagaacttaattgagcatgtgtatatgtgtgtgtgtctgtgtgttgtgggatggatggactttagaagaaaagagaaacatgctttattttgttagcatagggctgaacaagtagatttgtaggacatagctctcttagagtatagaacacttcttattaatttatgagcacttctaaagatttaggaataataaaaagtctggtacattaaagtaatatatcwttttcttttcttttttttttttttggaggcggagtcttgctctgtcgcccaggctggagtgcatggcacaaactcgactcactgcaacctctgcctcagcctcctgagtagctggagttacaggcgcccaccaccacgcccagctaatcttggcatttttagtagagatggggttttgccacgttggccagactggcttcgaactcctgacctcaggtgatccgtccaccttggcctcccaaagtgctgggattacaggtgtgagccaccatgcccagcctaattttttttaaatcattgcggacttaagtcccataatatttttctctatatgtttctacaattatatgtgttactgggcatggtagtatgcgcctgaaatcccagcaactcaggaggctaagggaggctgaggcaagaggatcacttgagcccaggagttcgaagctataatgcactttggtcatgcctgtgactagccactgcacttcagcctgggcacatagcaataccctatctctaaaaaataataataataataacatttgttttttcttttacctttagaattcttgccacatttccccattttaaatgtgtcttgtttctataaatagaccatatttttaaaaatctttatccatacttgagcaaaaatgctagaataaatggaacttattttactgatgaagtttattacttagttggctaattaaaaatagaattgttatactattttattgttgattaagaattattttatttataatcaagattagaccagaatgataagacatttgaaaagtttttaaaattactatctaacatatgagcttctatcatgggacaattgctattctaattcctttgcttgtgttatctcatttaattttatgagatagttatcaaccttatgagggtaggtactattattagtcccatttcatagaggaggcaaaagacaaagcaagggtcacacacttagtgaaaaaggggaaataagattctactccagtctgatttctgagcccatactctttatccattgttataatgtttttttaaaatacaaaactgtttattgtatgtggttctttacaaatatgttcaccaaagacagacataatttcacatgtagcacccagtaaattgagggaatttatcattaaaattcaaataattttttatcttgttcactttttgtagcagtgttttattcttcccttatgaatgtgaagtttcattaccttttataaaataattattcttcaattcaaatactttatgtatccatcattttatttacctactgatttatttagtggattcctttggataaaactatattatgtataaaagtaactaaatgtaatcataataggaaatcttattttacctttagttttccttttgtttgacttttatgagcaaaattatatatataaatatatagaaataataaatatatatttatattatgtatatagtatattatataatatatattataaatataaataagttttttagtgacgtatgtagcacacatgcataaaagtatacaaatcataattgtatagttcagtcacaaagtaaatacccatgtcttctgcttttaacaaatgcacacatttctgtggttttattcctacaattggagctgggtcacagggaatacatatgctcacttttattagattatgctttccaaattggttgtaacaaattataccccaatactcttagtgtatgagatttcctattactgcataaccttaccaccccttggcatcatcagtctttatagtttagccattcttatgtatagtgatatctccatgagattttaattttcattttctgtatgactaataatgactcccttttcatgtttattaactatttgaatatgaccttataaagtgccttttccaatcaatctctttcctgtttttcgtttggttgatctttgtcttcgtgatttgtaggagtcatttatatactttgatgaagacttytcttgatgtattatttttgctttaaaattttacataggtggaatgaatggctgaattatgatatatacattcctgatcttcctcgtgctgctcgactttgcctttccatttgctctgttaaaggccgaaagggtgctaaagaggtaaagtatttcagaaggaacaattatgtttacctttaaaaactcctgattataccgctgattgaattttttcacaaattggatgttattttatatttaagaaaataataataaacctatttttaaaattttaataaatgtatcatggaagaataccttgggagagcttcaggaatttatgatgaatatgttttgagttcttattgataccatttttaaaaatgcaaagtgactatataacagggattgcatgcaaatatctcatgcttgctttggttcatattttctatttataattaaaatacatgtaatttcaaatggggaaaaaggaaagaatgggcttaaaccttgaaaaatcaattttttttttttagatattcccattattatagagatgattgttgaattttccttttggggaagaaaagtgttttgaaatgtgttttataatttagactagtgaatatttttctttgttttttaaggaacactgtccattggcatggggaaatataaacttgtttgattacacagacactctagtatctggaaaaatggctttgaatctttggccagtacctcatggattagaagatttgctgaaccctattggtgttactggatcaaatccaaataaagtaaggtttttattgtcataaattagatattttttatggcagtcaaaccttctctcttatgtatatataatagcttttcttccatctcttaggaaactccatgcttagagttggagtttgactggttcagcagtgtggtaaagttcccagatatgtcagtgattgaagagcatgccaattggtctgtatcccgagaagcaggatttagctattcccacgcaggactggtaaggcaaatcactgagtttattaagtatcaattataatctgtggatttaggtagatactttctctatggaaaaggatccatatattttactggcatagatactatgaactctaggaccaatattgcaatagaattaagttctctatatgctaatatttttactgcacctctgcttttttaaagccctagcttgccttcattcatttaacaaatatttattgaatgccgactatgtgtaaagcactgggaaaggcactaggtaataaagtcatgaactaaacagaccttcattgagtatgcactctaactgtgaaaacagacattaagcagataaaagcagaaatataagattacagttgacccttgaacaacatggatatgaactacactggtctacttatatgtggatttttttcaataaatatattggaaaattttttggagatttgtgacaatttgaaaaaaacttggagataaactacattgtccagaagtatcaaaaaaattgaagttaggtatgtcatgaatccataaaatatgtatagatacaagtctattttatcatttacgaccataaaatatacacaaatctattataaaaagttaaaatttatcaaaacatacacacacaaacacagaccatacatggtaccactcatagtcaagagaaatgcaaacatatataaagatgcagtattaaattgtatctgcataaaattaactgtagtacatactgtactactgtaataatttcatagccacctcctgttgctattgtagtaagctcaagcattgcatatatccacttaaaatgctatgtaggctgggtgcagtggctcatgcctgtaatcccagcactttgggaggccgaagcgggtgaatcacctgaggtcagagttcaaaaccagcctggcaaacatggtgaaatcccgtctctactaaaaatacaaaaagccgggtgtggtggcatgtgcctgtaatcccagctactcgggaggctaagttaggagaattgcttgaacccgggaggcagaggttgcagtgagccgaggtcacgccattgcactccagcctgggcaacagagcaagactccgtctcaaaaaacaaaacaaaacaaaatgctatgtaatgctgatcatctctacatgagtacttcatcacttcagtaaattgtttattgcagtgaaaagtgatctctcacagttcttggatatttttcatcatgtttagtgcaataccgtgaaccctgaataacactatgagggctgtaaggagtgcctctagtgatgctagaggtactctcaagaagcagagaaacgtcatgacgttacaagcaaaagttgaattgcttgatgtgtaccatatattgaggtctgcagctgcagttgcccttatttcagacagacaactaatcttgtaaacagacaacataaactttgtttgtttttgtttttttgagatggcgttttgctcttgttgctcaggctagagtgcaatggcacaatcttggctcactgcaacctctgcctcccgggttcaagtgatcctcctgcctcagcctcctgagtagctgggattacaggcatgcgccaccatgcccagctaatttttgtatttttaatagagacggggnnnnnnnnnnnnnnnnnnnnagagaaatgcaaacatatataaagatgcagtattaaattgtatctgcataaaattaactgtagtacatactgtactactgtaataatttcatagccacctcctgttgctattgtagtaagctcaagcattgcatatatccacttaaaatgctatgtaggctgggtgcagtggctcatgcctgtaatcccagcactttgggaggccgaagcgggtgaatcacctgaggtcagagttcaaaaccagcctggcaaacatggtgaaatcccgtctctactaaaaataccaaaaagccgggtgtggtggcatgtgcctgtaatcccagctactcgggaggctaagttaggagaattgcttgaacccgggaggcagaggttgcagtgagccgaggtcacgccattgcactccagcctgggcaacagagcaagactccgtctcaaaaaaacaaaaacaagagagagatggggtctcactgtgttgcctgggctggtctcgaactcctgagctcaagtgatcctccctcccctacctcccaaagtgctaggattacaggtgtgagccatcatgcccggccaaaagacaraataaatgtatagtatcagtaaatacagtacagtactgtaaatgaattttctcttccttatgattttcttaataacattttattttcactgtcttactctattgtaagaatataatgtatagtacatataccaagtaagtgttaatcaactgtttatatttctgttaagacttccaatctacagtagtcatttgtagttaagtttttggggagtcaaaatttacacatggattttcagttgtacaggagatcagttgcccctatcccctatattgtccaagggtcagctgtataaatcacattaagtgccaggaaggaaaaaacaatagtgagctaagaataactaactgaggatttgtggggaaaaggcaaatatatatatattgggttcaggaaagacctctctgagatgataaccttgaagttgagactgaagtacagctatacctctgaggtattgtgagtggtctagttctagaccactgtactaaagcagaaatcacaatagagtcacaaatgttttggtttcccagtgcatataaaagttctgttcacattatactgtcatctgtaaagtgtgtaatagtctgtcatctgtaaagtgtgtgatagccttacgtctaacacaacaatgtacatactttaaaaatattgctcaaaaatgctgatratcatgcaaggcttcagcaagttgtaatctttttgctggtggagggtcttgcctcagtgttgatggctgctgacttaccaagctggtggttgctgaagtaacgttagcgtggctacagcagtttctttaagacgacagtgaagtttgccacattgattgacccttccttatgtgaaagatttctctgcagcatgtgatgctatttgatagcattttgcccacaatagaacttctttcagatttggagtcagtcctctcaaaacctgacgttacagttaaccagctgcattagcccctaacaagagagtcagcctgaagctttgaagccaggcattaacttctcttctctagctgtgaaagtcctagatggcatcttcttccattataagactgtttagtttacattgaaaatctgttgcttagtgtagccaccttcatcagttatcttggctagatcttctggataacttgcagcagcttctccatcagcacttgctgcttcacagcttcttttttaaacctcttataccaacctctgctagcttcaaacttttcctctgaagcatcttcgtctctctcaatattcatagaattgaaaagagttacggccttgctctggattaggctttgacttaaggaaaagttgtggctggtttgatcttctatctagaccactaaaactttctccatttcagcattaaggctgttttgttttcttatacttcattcactgaagtagcacttttaattttcttcaggaacttttcctttgcattcacaacttagctgtttggcaccagaggcctagccttggcctgtatggcttttgacatgcatttctcactaaacttaacatttctagcttttgatgtgaagcaagagacgtggcactcttcctgtcacttgaacacttagaggccattgtagggttattaattggcctaatttcaatattgttgtgtctcagggaatagggagtcctgagaggaggaagaaagaggagcaaaggttggtcggtgaagaagtcagaacatgcaacacttatcgaataagttcaccatcttaattggctcatggcacccccaactgcatcagagtaacatcaaagatcactgatctttgatcacagatcatcataatatataataataatgaaaagcttgaaatattataagaattaccaaaatgtgacacagagacaaaaaatgagccatgcatttggaaaaatagtgccaggagacttcctttacatagggataccaccacaaaccttcagtttgttggaaatgcaatatctgtgaggtatgataaagcaaagcacaataatacagggtacacctgcataaatatattgttagttgagcttggaagcagagaaaacagcaggtcttcaccatgttatcccaggttccccaggaaagagcgtatgtaagatggaatttaaatattgatctagttgtctaatcttggccatagcttttgaaccacagtataattatctaggttcaagaaccattaactctccctgatttctcaagggcaaagatgtcaatgccacgagaagatgtttgtgttcattggtgtttccaaatatattactttttctttggctttgttggctatagataaaccagccaatgaattttgggccaagaagtccaaaacacccctatcccattaacagtaacagcagcatcaagaggcagcctggtatattgcacttaggaaatttattgattcatagctgtgttctcagtaaggcgtttaccactacttttcggaaaacaaattatcttttctgcatatatatttttctgcatttaaaagatacgagtctcttttttgagcagttctctttgtaagaattgatatttgatgactgtattctttcttaaaagaaattttatttcaaagaaaagaaatttgcttattttatagcagaataaaacttctatttttcagttacaatttgtatctattggaaacttttgtaaatctaagatacgacatggaatcttagtttttctgtatcttaaatattttactatttcatcatcctagaaattacttcatccatattcattatttccaactatgctaaaaaagactaaaataatatgaaaatataaaagaaggatagaatagcctagaaggayaataaaatagtgaagtaaatcatgatgttacatcatccttcagttttcttattgcattgcccagtgtcttgcatcatctttccagaagtatagaagaagtctgcagacactgtctttgtaatttttttgtttggttggttggtttctttcaggctttcattggacacttgagaattcagaatttttcacttttcacccagaatgatgacagatgaaaactgaccaaggaagatatttcacaagcattagacaaatcataatatgaatgtagatagatagtagcagcctagagcagagtttcccaacctcagcactattgacattttgcgccaaataattctttgttgtaggagccatcctgtgtgtgcaatccaggatgtttagcatccctgtcctctaccctactgcaggccagtagtgccatcctgctaagttatggctatcaaaaatgtctccagacattagccaaggttcctgggtggtcaaggggacacaaaatcaccctagttgagaaccactactctaaactctaatcatggtgaagtttattatataaatgaaatgtcagatgacaacacctaaactgtctctcagttatcttaagtcttctcaaactcaggataatgatgagtaaagaatatatttctaacaacaaaaaggaaatttgatagtatttctaaagacaaaaaggaaatttgtattcacattcagttagtcattccaccagaatgacttcatcacacaatattttgtgacaagaacctgaacagcctgttttacagtattcttttcatcttttattatatgcaccaaaatttttttttaaattttcttgaacctctaaatctacgttaaaaatttacctgatacactttctaaatggacaaatgccgaaggtagctgtgtatacaaatgtgactagaaggaaaaagatgatatagaaataaaataactccttgagttgatcattctgattggcatttatagagtagaaatgttttgtaattacagaggaaaaaagatggcctttccttcaacagttatgagccgtcagaattttcaaaaatactgcattttgacaatgtagtttctagtttgacaatgatatatttatcttcaaaaccaggaaaatgtagataagaatttggttttataatatttaaattcttattaaaatgtctaataaaattgttttccccatcactttattcttctgtaagttattttatatttaaaatgtaaacaaataaaaataagtaaataaacagtagcagcttcttttcctgataaatcgaggattgagtatgtattatctctttcctggactactggaataacctctccctccttccacagagaagccataataatctttatgaaatacaaatcaaatcatggtattcattctttaaatagttatcaataaaaataaaatcccaactttataccctgttctgcaaattttaacgtggtctgaattcagcttacatttcttctttcccttgtctattgcccatcaggctcactggccttattccttcacaccaaactagttatttccggggtgggaggaaggcttgcagtgttttctccatctgcaatagtctttcccaaatcttagtgtggataaagtttccttcttgttacttgaatcacaaatactatgttcttagtcattctctgttacatcatccagagtacattatatcaattttccaatatttttatttatttgatttcccactataacagaggctctgttagtgcagggtcttttactcttttgtaatcccaacagcaagaacaaaacaaggtacatagtacatatttaataaatacctgttgaacaaatatgtgccggtaatatttcttcatgctgctgaataagttaacagcatataaacacatacaaaccaagtggcatggatgtctgctttcatttttagccatttaaaaatatatgtaacccatcctaaggggtttatatttgttttgcataatacattaatatgtactcattattcattacacagttaatatatctatatttgcagggaatatacattgcttggaattatacaaaaaaatattatttttcgttttctaatattcaggatacagtgttttaatgggggtgtttcttcattctttttttcttactggtttttactttttaaatttgaaagccttgcagtgatcataaggatctgttcaggcaaagaacatgaaagagtttaaatttttatcattttagtgtttcttattctctatatcaaaaacattcacaggtaagttaacaagatcctcatcaggaggaaaagtaaattgttcactaccatcctctagtatcctaatctggtcttgttgttggctaacttcagcagttactattctgtgattggtgtaatattaaccaaataaattactggatttgttccacaaatattatatcttagattggttctttcctgtctctgaaaataaagtcttgcaatgagaataaattattttacaacagttaattagcaatgtaaagtttattgaaaatgtatttgctttttttgtaaatcatctgtgaatccagaggggaaaaatatgacaaagaaagctatataagatattattttattttacagagtaacagactagctagagacaatgaattaagggaaaatgacaaagaacagctcaaagcaatttctacacgagatcctctctctgaaatcactgcgcaggagaaagattttctatggaccacaggtaagtgctaaaatggagattctctgtttctttttctttattacagaaaaaataactgactttggctgatctcagcatgtttttaccatacctattagaataaatgaagcagaatttacatgatttttaaactataaacattgcctttttaaaaacaatggctgtaaattgatatttgtagaaaatcatactacatttgtagttggcacattaaatgctttttcttactctgaattcctgatatgactttctttaggattgtttaaaatattctagtagttttaggtcaatttagatgtgatttagttgctctagatattataatttttaggggttccctttcatttttttcttacgtttcttcaaatagtataatgccttattttcatttatgaagaaattaccctgctgttggtgatacgggtatatttaaataaaccagttgcagtgcatttctgcagaaagtccattaagacataaattttgtccagtaaccacagtagaagtggtgactctatgattcattcatgttgcataagtaggtgaaaaatatgagctatattctgtctgttaaatggaattctagagatgaagtagcccaggtaaatgtatgtttgagattactagataactgttgtacaaattggtatgtcacttaaattgttttctctcagaaagtccacataaataaatgaaatagactaataatagtaatatggtgtagaaaaaactcccttaacattatttccatagataaaactaattagaactgtaaattctaaggagattatttatctaaactaattttaaannnnnnnnnnnnnnnnnnnntatgtactcattattcattacacagttaatatatctatatttgcagggaatatacattgcttggaattatacaaaaaaatattatttttcgttttctaatattcaggatacagtgttttaatgggggtgtttcttcattctttttttcttactggtttttactttttaaatttgaaagctttgcagggatcataaggatctgttcaggcaaagaacatgaaagggtttacatttttatcattttagtgtttcttattctctatatcaaaaacattcacagataagttaacaagatcctcatcaggaggaaaagtaaattgttcactaccatcctctagtatcctaatctggtcttgttgttggctaacttcagcagttactattctgtgactggtgtaatattaaccaaataaattactggatttgttcyacaaatattatgtcttagattggttctttcctgtctctgaaaataaagtcttgcaatgaaaataaattattttacaacagttaattagcaatgtaaaatttattgaaaatgtatttgctttttctgtaaatcatctgtgaatcyagaggggaaaaatatgacaaagaaagctatataagatattattttattttacagagtaacagactagctagagacaatgaattaagggaaaatgacaaagaacagctcaaagcaatttctacacgagatcctctctctgaaatcactgagcaggagaaagattttctatggagtcacaggtaagtgctaaaatggagattctctgtttctttttctttattacagaaaaaataactgaatttggctgatctcagcatgtttttaccatacctattggaataaakaaagcagaatttacatgatttttaaactataaacattgcctttttaaaaacaatggttgtaaattgatatttgtggaaaatcatactacattggtagttggcacattaaatgctttttcttactctgaattcctgatatgactttctttaggattgtttaaaatattctagtagttttaggtcaatttagatgtgatttagttggtctagatattataatttttaggggttccctttcatttttcttttttcttacrtttcttcaaatagtataatgccttattttcatttatgaagaaattaccctgctgttggtgatacgggtatatttaaataaaccagttgcagtgcatttctgcagaaagtccattaagacataaattttgtccagtaactacagtagaagtggtgactctatgattcattcatgttgcataagtaggtgaaaaatatgagctatatgaagagtggtataacatatattcataatttttcttaactgttaactaaatgtaagtacttataatccatttgcattttccttttgtgttctttgccattataactgtgcctaagtatatatgtaaatatatttccaactatagtgttaaacactgatgtcttttgaattttaaaaaagctagtaatgtaagaagtttgggacttmttaagaagattcatatggagaagttagacatgtcaaccttttgaacagcatgcaagaatgtttatgtttattttgtttctcccacacagacactattgtgtaactatccccgaaattctacccaaattgcttctgtctgttaaatggaattctagagatgaagtagcccaggtaaatgtatgtttgagattactagataactgttgtacaaattggtatgtcacttaaattgttttctctcagaaagtccacataaataaatgaaatagactaatagtaatatrgtgtagaaaaaaacacccttaacattatttccatagataaaactaattagaactgtaaattctaaggagattatttatctaaactaattttaaaatcagaagttaaggcagtgttttagatggctcattcacaactatctttcccctttaaatatgatttattgtctttctcatacacagatgtattgcttggtaaaagattggcctccaatcaaacctgaacaggctatggaacttctggactgtaattacccagatcctatggttcgargttttgctgttcrgtgcttggaaaaatatttaacagatracaaactttctcagtatttaattcagctagtacaggtaaaataatgtaaaatagtaaataatgtttaattacaataataatttattctagatccatacaacttccttttaaaaaacctactgcactaactagttttatgcttaaaaaaaaaaattattaccagtaatatccactttctttctgaaaaaattttctttagatcggccatgcagaaactgaccctgatttgtttttttggaatcacctaggtcctaaaatatgaacaatatttggataacttgcttgtgagatttttactgaagaaagcattgactaatcaaaggattgggcactttttcttttggcatttaaagtaagtctaattattttcccattaaattcttaaggtrcatattacttgctttcttaatagatttataaatatgtattacttatatacttttgtttatgtttggctggaagagttttccatactaaaagtattttgtaccagtgatgagcttctcaacttttgctctttgaaatttaaaaagcagtaaattcaaaactaaattttagtcatgaatgagagcttaaatatttttaaagatttttgttctacttaagtcaaattttctaggtccagatgaatattgctgtaggtttcactgtgtgtatggattacaatatccccaaacaaagaaaaaaatgttttaccttgaaattcagaacaatgtcaaactcccgtggttcttactgaaaaacaagctaattaagaataaaaaatgttttgtagaatgtgatatatgtagtactcaaaagttacaggtcataaaccatataacttttcataaatttagaagcagatttatatctaatatgatattttaagtgttaaaatttaataatggaacccagaagttaagttgaaaacaagaagcataggcgtgtgtcagaagagtcaaacagcattcactgagcgctttgttccctccctcttcatttgattatttttgtgctcaatttccttttttcatgtttttatatcttgtactgagattagtcaatgaaaactagttgaaataaacctaaaaactagatgtttatttaatcacatattcaggaactacctgaaactcatggtggttttgtttctaaattacaggttttgaataattttattattagtatgattgtaacatttattggatttcaaaaatgagtgtttaaattgtttagcaaagattatttgtatactgatttaagactatatatatatatttttaattttgcacgattcttttagatctgagatgcacaataaaacagttagccagaggtttggcctgcttttggagtcctattgtcgtgcatgtgggatgtatttgaagcacctgaataggcaagtcgaggcaatggaaaagctcattaacttaactgacattctcaaacaggagaagaaggatgaaacacaaaaggtgtgtgactctagtttgtgtttgagactcttttcactgcagtggggcagagttgtttagaagcccagtgtatatacagatcatggtccttggaatcaagcagattaggatttggaaccaagttccactgcctctcagctgtgtagtgttagacacgtcatgcaggctctcaggactcattttctttgtctgtaaaatggaaataatacctgcttcataaggccattgtgagaattaaattacacgagatatgcaaagaacctatcacaatccttggaacatagaaggtggccaataaatgttagatccctttactttcccttcctttctcttattcaggtccctaagtatttacagtgattatttccttattctgtcatttattgtctctcagtaatgaccctgaaaatgagtggaaagaagttagtttttacatttccaagtttaaaatggatttcgagtcactcagtaaatatatcacactctagtcatctgctgtctagcttagtataactaagagtaggaaatacaatgtaaactttttttttttttttttttttttttttttgagacagggtctggctcttttgcctggcctggaatgcagtggtgcaatttcggctcactgcagccttgacctcctgggttcaagccatcctcccacctcagcctcctgagtagctaggactataggagcatgccaccacttccagctaatttttgtatttttagtagagacagtgtttcgctttgttgcccaggctggtctccaattcctgggctcaagcagtctgcccacctcggcctcccaaagkgctggaattacaggcatgagccactgtgcctagcccaatgtaaacttttttatgaccttttcctacaccctattctttattcaatccaatccaccacatcctaaattcaccacctcttacaattaaaaggaagctcattcctcacctctagtaaaaggaaaaaaaaaagaaaaatcgtatattagtgagtccccaaaggacagagaatgtaagttagcagtactgaatgaatttttccagcatcttcattactagtacttgaaggaaaaaaaaaaattaaaacaaagttattgtattaatgtaaatgtcatacagtgtgagttgattttattgaagtgtgatatataaattcaaatataggatggtagaaaataattgtactctttctgatactggaatttatgagcaagaagggtctagattgccctggaagaacaaaatttattgtatttatatattgtaactgagctgagaaaaaagaaactaaattttagatacatttgtaaatacagatgttcctcaacttataacagggttatatcctgataaacacatcataagttgaaaatatcgtacaggcaaaaatgggcattttgtagatgtgatgggatgcgaaaacacaaaacacagtatccaaaaaatgctggccacacagtacgctgtagactattggtcgtttaccctcatgactgcatggctgactgggagctgcggctcgctgctgctacccagcatctcaagaaaatactgtgttgcatatcactagcccaggaagagataaaagtttaaaatttgatgtatagtttctactgaatgcatgtaggaagagataaaagttcaaaatttgacatataatttctgaatgcatgttgctttcacaccatcacaaagttgaaaaatagtaagtcaaaaccattgtaagttggagaccatctgtgtaggcatttcttctaagctggagtttttatatcacaaattggctatgatacagtggattaattaggaacatgaaattcattactcagatcattattggcttaaatgagattttgatagggaactaagattgcagtcatagaaacaagagcagttactttgagtggctttgtgttttgttgtaacaatgagtgataaaatataagaagcattgtgctaacattagagttgtcagtgatagaaatgcctttacatgaacaagagctatctagtcagtgatgattagattttctaactattcatttgtatataacaagaagaaaaaaacttatttaaattccagcatgaaaattaatttattataattcctagctcctaaccactttttcccccactcacattttatattttcaataggtgaaagtttcctaaaataaaatcccagctattgcgtgataactcagcagtctgggctctgatttgaattgattaaaaagggatattgttttgtagccacatactaaaacctgaatatagtatgagactccatgtaacaaatgtttttacaagtccttttcccaacaatttcttttagcctcactagaccactttcacccagcaaagagagtatgaatgctgtgttttcttaaaagcctaaaagtaaggttattaagctaatgtaacatggtctccttagtttttcctctagaacacagatcagcaagttttcttaaagggccagatagtaactgttttagactttgcaggcccatgtggtctctgtcttaactattcaactctgctattctcgtaaaagcagccaatatgtaatgaatgggtgtagctatattctaatacaactcaatttacaaaaactggcagctgacctgccggttgactagccctgctctacagccaaaagcattgccactatcaccaagcagatttcatcttcttacaggaaggggtacacagtgctgccagtcttgcttctgtctctgagtgttgctgctctgtgttgtagaaaccctcttaattagaaagcagcagtctaggatgtagattcagagactgtacagtactgaggttctcatgtgagaaagagattagcagttagttttatcttttattaagtcagtttcttactgtgactatcctttttttttaatcaggtacagatgaagtttttagttgagcaaatgaggcgaccagatttcatggatgctctacagggctttctgtctcctctaaaccctgctcatcaactaggaaacctcaggtactttcttgggggtttcattgatatatttaaataaataccttttctggataaaatcttgagaaaagtaaaaatgtctgttataattagaatgttcaataatttatgcttctctctctcattctcctaccctcaaaataagagtagtatatcttaagttcagtactgcctttattcagaatgagtttttactacttaaataatacagtttaaaaccttctatggccagaatttctgttaccataggataagaaatggaaatgtaatatctgtaaaactaatgatatatctctatatatttgttggaaattcatatgcaattatataacttttaaaacttttagttttttttatactctttaggaatggattcctaaataaaaattgaggtgaaagttgtaaatctttgtaacacttcaaaaagctatattgtatttatattttaaaataaatttsagggtaaaataataataaagcaaaggtacctagtaaagtttttaactattttaaaggcttgaagagtgtcgaattatgtcctctgcaaaaaggccactgtggttgaattgggagaacccagacatcatgtcagagttactgtttcagaacaatgagatcatctttaaaaatggggatggtaaggaagagtattaatgagcttatgatgcatgaatttagctatctttttatacacaggatatttatgaaccatgaaaactactgaaagccatttaaggaatatacacatgtgataaaatatgtaatatttatcagatgtcttgacctttgaaatatgcatgtataatcaatgaaaagaaaagaagtactaggtttagatcagaagtcctgaaatcagttttttgttttttctttttcctgttccctgcctccaacccccctcccgtggacctgtgtagagaagtattttttgttgttgttttggttttttttttaatcagtttctaattatcatttgcttagctgtgtgagtatccattcattccataaatattctatgtgctaggccctggggttttagcagtgaagaaaacagaatccctgccctcttggagcttacagcctaacagagaaaagagggacattaaatgaataattacaaaaataaaattgcaagcatgttgcaaaggaaragtgtagtctgctcaggaaccatataaaagaaggtacttatatggaggaaaaggctatggggggagtgaaggaggatcatggatgggttttcaataggaaatgacatttcagcagtgaattctgttgatcccaatattttaatataaacatgtgttcaaatttaaggattcagaaaaataattactataaatgctttaattaaaaatttttgtgagatgcatgctcacttatcctacattgttattcaaatatgtttatgcaaagactttaaaagtggatttaagaatcagaatattaagagccatttgtagtggtgcatgcttgtgatcccagttgctctggaggattacttgagcccaggagttttagaccagcctgggcaacttagcaagaccccatctcaaaaaattataaatacattaataaagctatgtaaaggctttgagtggacatatacactcatttataaattttttgaaaagaaatcagaatattgctttcctgaagtttcttttgaagagtaaatatagctgtatttgtttttcatttgaaaaccatgtgatggcgtgatccccaaatttgcatctgtggcattaaatggtgatacatattatttgaatttcagatttacggcaagatatgctaacacttcaaattattcgtattatggaaaatatctggcaaaatcaaggtcttgatcttcggtaggtaaccagtaaggcaacctgtatgttgaaagttatcctgaaaaagtgaactattaataattatagaagsatatagaggcatatgtctaaaaagaaatgtatgcagtaattatcagtagttgattacactatagtactttkacatatcctcctcttacttgacttagaatagctaaattatattcagctaagtaaaaagagctaataagctaataaacactctgctactgcctctggagtgtcaccattaggaacaagacaaaggagacacaaaagacccctgttttcattcagaaattaagagtttaaaagaaagtttcataatgggaattttctaattctaaaactgtataaatcctcaaatattggaatcagttttgcagcaaaattatgcaaccagctatcttagagtttttaccagtctgttggtttctacccaactttccacaatatcagtattatcaccaagttttctgtcatgcttcatcttctcctagtcattgttgcttctaaaatgttcttccttacctgacttgtctttttgcaaatccatagtcattcaggcaaagcccactctgtccaaagtattttggcctataagtggacatagagtcaagtctagctgtaacaacagggtacatttagtaggaattgcaggtaacaccagacaagggcttatttgtatgcctcttataaattttaagagtagctagtatacaaaaatgtgtcagtgacaaatagttgtacccttttattgcaaagaagaaagtggacatttcaggtgacctgctaaggcacaaaattgtcatcaacttcaaatttgtaactcctgatacgtagcttaacccctgctgctttccaaaaatggttaatgttatatgaatcaaatttcattttttggtataatttcctgtgtcatgagagatccacatgccactactaccatgtcccccaaaggaatagactgtaaaaaagattatagagctaagaaagagtaaaggagataaccgtgtaacgctggttaattacattgtttaattataaagtaatgactttgcaaaaaagcatctgaagttaagatgattagaaatattaatggttttttagtcttgtattttctgaatattttttaacttaagtaaatataagtaaaaattttatttcaagtttaactttagattaaaattatttaagtaaaatcataacagcatttttatttatacttggcaaaactataattcagaatcgggtttattttaaccctgcttcttttttttaataacaagacttagaagacaattaaattctgtaaactgtgagcatgttcaacagtgataaaaacataaaataagaaagaatgagcaggagtacaaccttaagatatttccctatttacgagggcaggtagaagaaaaggttgtgtaagagaagtcatcaaaggaagttggagtactagaggaagtgattgacaatttgtagggccagggcttcaagggggttaaaagaataaggcctgtgaaaaagcacttggatttagtgactcatcattagttttaagagtttactcactagagtggtaggtgtagaagctaggctacaaggaattaagtaagaaaatgaaaataagtattgaccgtattaggaatttaagaaataaaggaaaggtggaaaatatggagagtagcttacgagaagaacagagcaaggaaaaccaaactttggatacttacgtgtcaatctgaatgttaggtgctttttttcattgtctctttaaatcctcacatctgcacccttgactaagtgtcctatttaattttctatgtgaataaatgagaggtaccctaaaaagcatttgtgccacatcccaagtattatggttgtatcaaagggaaacatttgtgggattatttgagttgtgagctgaactagctgctgtttttatggaacacgatttttacttaaataactagtaggcaagctatggttattcagacatggatatttggcagacattttcttgaaaatgaacaatatgtgcctgtctctttgaagaaaacaactgtgacagtatttgttgccaatgataaaattcaaacttgcaacaaaaatttcattagaaattcaaaattagaattttgaaaattctaattttcattatctgccgctgaacctaatagagtccctaaacttaacatctttctgatgagattcttggtaatattaacaattgtggttttttagtatggtataatgaaaagtatcaacatttggaacatctacaaatgaccatgcaggatactataaaatcatgtatgggtaagagatccattaaaaggcaagaaagacaaattgattttaatgtaactgagtatgaaaagtttattgatacagttttagattacattttgcaacttaagaaacttatcttgtcaggttttagaatagtaccaaagaaaaatatcacaattatctgaaaagtctattataatactccttctttttctacctacctatctttgtgaggccagattttctttttatactttaattaaaacattgcattagattgcatacaaaagcatatatgagaatccagctgggtactatgaagccagacatttaaaaatttttttaaatgtgaaagaatttcactcttctcactaaattttttaaatgcattttttgtttcatgaaatatgttacttatattaacatgtcatagtttgttgcttttaaatgaattagtaaatatttaaaatttttattttccctatttcaatttctaatatcattagatgtaattcacataactaaaagctctttggagtcctcagtaatttctacaagtgtaaaggagtcctgagaccaaaattgagaacttctgccctacagttttatttcgatgtcaattaaacatctttaaattaacacatatttttaaaatcataaatgtttgtaaaattttaattgccacaataattttyttaattcttttctgataaaaatacagtgctttctcagttgaaggttataataaatgatgacaggtaattttgaggattattccaggagtatgtttatcacaccataaaaaagaaaattaaaattggggaaaggcagtaaaggtcatgcatgacaaatttactaataaaatactcatgttttagcctgttaaaacatttgctattttaaaattccatcatttaattgtaaacgtgttactcctctttcagaatgttaccttatggttgtctgtcaatcggtgactgtgtgggacttattgaggtggtgcgaaattctcacactattatgcaaattcagtgcaaaggcggcttgaaaggtgcactgcagttcaacagccacacactacatcagtggctcaaagacaagaacaaaggagaaatgtgagttgtattattctttcttcctatgttaatctaagtttttgttagatgagtctgtcggtgtttgtgtattcctctgagttagaacagagaamacaattgtactttctatggaaaaaaatatgctcaacctttgaaatatttgatgttaatggatttaaatgattataattacttttaatttggtaaaatcttaaacattcatcttatgtattatctaaaatgtattgttattgcttattctttttaaaacaaatgaatattgcacattcaaaattttatttctaattcattgttaaaatgattagaaaaaaataattttaatgacatgctaagtattttttcacatgaagaattatgctttggtcagggaacatctggaaatttccttagaaacccatgaaaacttcacaatctcaaaatctttggacataatttccttattcgttgtcagtgattgttttcattgtttaaatggaaacttgcaccctgttttcttttctcaagttggcctgaatcactatatttccatactactcatgaggtgtttattctttgtagatatgatgcagccattgacctgtttacacgttcatgtgctggatactgtgtagctaccttcattttgggaattggagatcgtcacaatagtaacatcatggtgaaagacgatggacaagtaatggttttctctgtttaaaatgttttggtgttcttaatttattcaagacattttgtatctgcatatatcaaactataacataatttcttatttttgaaagctgtttcatatagattttggacactttttggatcacaagaagaaaaaatttggttataaacgagaacgtgtgccatttgttttgacacaggatttcttaatagtgattagtaaaggagcccaagaatgcacaaagacaagagaatttgagaggtgagctcgagcaattaaaaacacaaaataaagagttctggctgctctattagaaacaatcaatatttttcaagcaatttcaaaataataaatgttggctgggtgtggtggttcatgcctgtaatcccaactctttgggaggccgaggctggaggatcacttgagctcaggaattgaaaccagcctgggtaacatagagagaattcatgtctacaaaaaaatttaaaaagtagccaggcgtggtggcatgcactgtagtcccagctactcaggaggctgagatgggaggatcacttgagcccaggaggttgaggttgcagtgagccattatcacgccactgtactccaacctgggcaacagagtgagaccctgtatcaaaataaataaaatgaaataatagaagttcttttaccacttcagcaaaaactattttttgtttgttttttattctatcttatttcaatagcttttggggtacacgtggtttttgattacatggatgaattaaatagtggtaaagtctgagattttagcgcacctgtaacccaagtagtgtgctttgcccccagtatatacttttttatccctcactgttcttcccaccgtctcccatctgagtctctgtagtccattatatcactctgtatgcctttgtgtacctatagcttagctcccacttacaagtgagaacatactgtattttcaggttttccattcctggcctccagctccatcccagttgctgcaaaagacattatttcattcttttctgtggtggagtagtattctgtggtgtatatgtacactttctttatccactcattggtcagtgggtacttaacgttggtttcatatctttgcaattgtgaattgtgctgcagtaaacatacgatatgcatgcagatgcctttttgatataatgacttcttttcctctgggtagagggattcctggaccaaatggtagatctacttttagttctttaagaaatctccatactgttttccatagaggctgtactaatttacattcccaccaggagtgtataagcattctcatttcaccacatccatgtcaacatctgttgttttttgactttttaattatggccattcttgcaggagtaaggtggtatctcattgtggttttaatttgcatttccctgatgattaatgatgttgagcattttttcatgtttgttgaccatttatatatcttcttttgagaattgtctattcatgtccttagcccacctttttttttttttttttttttttttttttgagatggagtctcactcttgttgcccaggctggagtacaatggcatgatctcagctcaccgcaacctccacctcctgggttcaaagcaattctcctgcctcagcctcccaagtagctgggactacaggcacatgccaccacacacggctaatttttgaatttttagtagagacggggtttcaccatgttggtcaggctggtcttgaattcctgacctcaggtgatccacccgcctcagcctccctaagtgctgggattacaggcttgagccactgcatcctgctttaacccactttttgatgggattctttgtttcttgctgatttgagttccttatagattctggatattagtcctttgtcagatgcatagtttgggaatattttctcccattctacgggttgtctgttaactttgatgattctttcttttgttatgcagaggctttttagtttaattaggtcccatttattttgtttgtttttgtcgcatttgcttttggggtcttagtcatttattatttgcctaggccagtgtttaaaagagtttttcctaagttatcttctagaatttttatggtttcaggtcttagatttaagtcttcgatccatcttgagttgatttttgtataaggtgagagacagggatccagtttcattcttttacatgtggctagctagttttcccaccaccatttattaaacagaatgtcctttctccaatttatgtttttatatgtctaagatcagttcgttgtaagtttttggctttatttctaggttctccattctgttccattggtctgtgtgtctgcttttgtgtgtatctgctgttttggtaattatagtttyctggtataatttgaagtccagtaatgtgatgcctccagatttgttctttttgcttagtcttgctttggctattcagactctttttggtcggttttatatgaattttaggatttttttttctaattctgtgaaaaatgatggtgacagtgttttgtagttttccttgaaaagatctttcacccccttggttaagtacattcctaggtatttttttgaagctaaaagggcttgtgttcttaatttgattctcagcttggttgttgttggtgtatagcaatgctgctgatttgtgtacactgattttgtaacctgagactttactgaattcatttatcaaatctaggagtctttttttttatcttttttaagacagagtcttgctctgtcccccaggctagagcgtagtggtgcgatctcagctcactgcaacctccacctcctgggtttaagcaattctcctgcctcagctttccaagtagctgggattacaggcatgcaccaccatgctcagctaatttttatattttttagtagagatggggtttcactttgttggccaggctggtcttgaactcccaatctcgggtgatcctcctgcctcggcttcccaaagtgctgggattatagaaatgagccaccacacctggctgaaatctaggaattttttggagaactcttgggttttctaggtatatgattatgtcattggtaaacagctatagtttgacttcctcttttccaatttggatgccaatgtgggcttccttgtcttgttctagttctcagggggagtgctttcagcttttccccattcagtatgatattggccgtgggtttgtcacatgacttttattattttgaggtaagtcccttctatgcctagtttgttgagtgaaaaactattttaattttttttttttgtatttatttgtgtgatgctgtgaaggaaaatggaaagggaatacaatttaatttgttgagctaattaaggcctaaaaagaaagtaatccttaaacttcataacacattaaaggtttttatttactgagctttaaatagttggactccacctctatattgacaaataatgtatagtgcttaatacgacattttttggtcatacactttgaggaaagtcagtcaaccataatcaccttgtttattcataacttttttaccaccttatggtatctcattagactatatcagactttaaagtactttttacaatcttctataaaattctgctttgtctacaacacagtcctgactctagcttaagcacaaaaggatttagtatgaaccaattcatacatttaatacttattaaactcctgacatgccaggcattgttgtaggtgctggtaataaagcagtttttaaaaagtccttattctcttgaagtttacattctagtggggtaaagggaatcaaaagatgttggtaagagaagtgagagaggaatgctatttttttatagctttgtctacgaaagcctctctaattttgtgacatttgagcaaagacctgaaggtattaacatcatttgctccaaactgaccaaactgttcttattacttataggtttcaggagatgtgttacaaggcttatctagctattcgacagcatgccaatctcttcataaatcttttctcaatgatgcttggctctggaatgccagaactacaatcttttgatgacattgcatacattcgaaagaccctagccttagataaaactgagcaagaggctttggagtatttcatgaaacaaatgaatgatgcacatcatggtggctggacaacaaaaatggattggatcttccacacaattaaacagcatgcattgaactgaaaagataactgagaaaatgaaagctcactctggattccacactgcactgttaataactctcagcaggcaaagaccgattgcataggaattgcacaatccatgaacagcattagaatttacagcaagaacagaaataaaatactatataatttaaataatgtaaacgcaaacagggtttgatagcacttaaactagttcatttcaaaattaagctttagaataatgcgcaatttcatgttatgccttaagtccaaaaaggtaaactttgaagattgtttgtatctttttttaaaaaacaaaacaaaacaaaaatccccaaaatatatagaaatgatggagaaggaaaaagtgatgkttttttttgtcttgcaaatgttctatgttttgaaatgtggacacaacaaaggctgttattgcattaggtgtaagtaaactggagtttatgttaaattacattgattggaaaagaatgaaaatttcttatttttccattgctgttcaatttatagtttgaagtgggtttttgactgcttgtttaatgaaraaaaatgcttggggtggaagggactcttgagatttcaccagagactttttctttttaataaatcaaaccttttgatgatttgaggttttatctgcagttttggaagcagtcacaaatgagacctgttataaggtggtatttttttttttcttctggacagtatttaaaggatcttattcttatttcccagggaaattctgggctcccacaaagtaaaaaaaaaaaaaaatcatagaaaaagaatgagcaggaatagttcttattccagaattgtacagtattcaccttaagttgattttttttctccttctgcaattgaactgaatacatttttcatgcatgttttccagaaaatagaagtattaatgttattaaaaagattattttttttattaaaggctatttatattatagaaactatcattaatatatattctttatttacatgatctgtcccatagtcatgcattgttttgcaccccaaattttttattgttcatagcagcatggtcagctttcttcttgatctatagatgaggctcaggcactatcccatttataccaataaccagtgtataactacttaaggaaaacataaaaacttcatcttctttccttttatttcttatgtgaatctcccgtcttccattctcttttataattgagaatgtctcaatcatatgaaattagttaccagaattaacacaatttagactatcttcctgattccttaaacccctttactgaagtatactcatgaataatactttaaaatatgggggaatagaaaccatgaactttttacctttttaaactatttatccatatctccaaagtagaacattaaaccattttaagatatgtctcattcccaagtagtcagagctcactctccaactttattaaatactatttgagcacaggacacattcttaaacattttgaaaaacattaacccaagatgtagaggctactgctagtcgtcattctagaatctgatattttactctgtatttgaaatgaatgattaatgtcctaggaaattagctttagcagatgtccaggtgccacatcaaaaaagtgcaataattattgacagttttttagattaggcatattattggaaaacaactttataaagagtgaacattgtatactctagtaaaacagcatcactttaaaaatattcatttatgaaatctgttacctatagttgaagtcttgagtagtgaacaagggactctaataccaatactcttaatatctggctattttagatcccttaaagggcataattattggaaatttargtatttcactaaagcatgtatataatattgccaacaagaaaagtaaatttgaagattaagggaacttacttctgcaaactgtcttgcgatagttaagcagaatttaaactctgttttaagcaggaaaccagaaagattattttgcagttgtagaagatttcataacttattaaaacttattaacattttgtgttgtttagatataggcagttgatacatactaacatcccagccttttcaatatcagggttaaattataggaaaactcagtaaaatggtacaaatctgaaagtttgatggtagaaactgaagatttaacagagaactgtgttttacccgagtgccaaaaatgctgtgagcctccttgcacaaaatttataccacttttgcatttttatctatcagtccagatagttgtctcccctccttctcccaggacctctccaccattaaaatgcacaaaccacatggccgatttcaccatttacatttattttcaaaagttactacaaccaaattaattctattagaagaaatgtagacaaattctataaagactatagattgtgacctaagaaagaaatgaggcaaagaaccaaacattgaattaaatgctacatgggtgactaagatctgtttcaagtcagtgataatatagccacttctgggtacttcagtatcagagatcagttctcgtggtttagacagttcctatctatagctgactatccttgtccttgaatatggtgtaactgactattggctctacagttttaytgggccacttaagaaatatttccttgaataattattttgagaaaaagtctaaaagtaataaaaataattttaaacacactgtagtaagaaatgactgttggaaaattatgctttcactttctaccatattctcagctatacaaaaccatttattttgaagatttttagactactgttaatttgaaatctgttactcttattgtggaatttgtttttttaaaaaagatgtttctaattggatttttaaaagaagaatggaatttggttgctattttacaatagaacctaagctttttgtggttcttagtgtcctatgtaaaacttagtgtcaaagtaatcaactttgagattttcccttctattctgctttatattaaaagcccattagaaaatgggaacctggtgaatatataatgaattgtaaaatattttaatgtgtaactttttcaactgtgaaactgacttgattttttgatgaaaacagctgctgataaagtattttgtgtaaagtgtagttcttattaatcaggaaaatgatgacttgattagactgtatatgccctcttggattttattttaaatggattggtgactttcacataggtaaaacacagtccatctgtattcttttttccatcaaaaatcgagtgatttggaattataaaaaaattgtgagcagcctatttgaaaggcatcatggaaatttcacagcacaataacacggatttgttttttcttaatgatgtaaatccgtttaattcatactttgatcaatagcccatgcttgccaactctgaagaaatttaatttccagcagtattttaaagctagcctgttaactttttctgaatatttaaagttcctcttttttctatgtctgcacaaactgcagacctgggctggacccacatactcaagagtccaccttaagaaattattttgatgtccaagacatcactaaaatatttaagtttaaagataatatgtggtgttaatagaytgtggtgcttttactatttaaagacaactttcatacttcagatgtttttgagaagaggggaatgtgaggggagggggcagaacagggaggagttgtttgaatgaattacattctttatatccatcctgctcatttggggcatgtctttaagagaaggctgaaagttgtgagagtatattgtataccgtaagagaatcaactcttcatcatggatgggattgtgaaggctgaactataaaattcagcattgacagcatcctcaattaataattcttggtgacagaataatacagctgggctgttttttaaaatataaacaataccatttttaattattacattaaaaattgtaaatatatctatgtgccatggcctgggaagcctgctttcttttttcataaaaattatttttactgtatgaaaagatyatggggtttagctcaaaatatctgtggtcctgataaaattggattggtaactctacctcagaaggaaaatgggaaaaaaaaatagatgagtcacaattcaatacttcaagctcagaaactgtgcagatcactgaattttagatttataaagtcagagttggcatgcsttgtttttaatgatatggaagaccttaagaaaaaaacttggctgaagtttaatcgttggtccagccatttgaaaaaggcaatagttygaggaggttyccgaattcggcatttgaaattcattttgttctctcttcttcattattagtgcatttggtgtgtgtatacttgcacacaattctgtttgtgtacacactgcttgctwagccctagtcaagaggcatcttttataaaaggtgtaaagaaatatcaaggttctaaaattcggaagagtttagaatttattaggagtttcccaagttgggatgttagtctttaaataaacttcatgcacctattccacttaaggttttgcacctcctttttattagtgcagtgccatttcttctgcttgattttaggtatgttaatattccagccttgctagttagcataaagtgacaggtgtgagccatgaggaaattttctgacttaatttgtacacaactacatataagagttttagtggaggaaaaaaattagtcccttgtgcgtatacagtagttaggtaaatgatttttctaccaacagtatactccattcctcatgtaggtaagtacagaaaaggtttttaaatgtatttttttagccagttaaagtctatgaatctatctgcaaccttatttaatctgtcactataataattttgtggttatgctaagaaccatgtatacttttaggtattcttatttttgtcaatttttctaggttggcaaggaggcagaaaaccttcattgtttcatattaaaatataattagactaaacttaattctagtatgaatttccaaaatcattatctatttatttcatttttatttaattttgtttttatttcatttttaaaagtcccttgttcaatttaacttatgttcctaagagaggttggagaacttggccttcatctgatttcaaaaatgttttgagtttcaaatgaagttaatggtttcagtgtgattcagtcctcagacctaattgggttgaataaaatctaaaagaatatacccttttggagcataacattttaataccttggggaatgtggcactaccaaaagaagactactaacacgtcagatgttcacctggaagctttatcaagaaattcgaaccacccttttggccccattaattgtagcaagtttatttctctatattttgtcattcagtgaattgaagtcctgtggtatactgcattcattagaagaaaaacgtttttaatgtccttttaatgatggcccagaaagcatttgacacagcaagatgcatgtgttaytatattgagaatatagaataataacagtatcactaaatttaagacctcttcccagtcttgctgttcctagcaagaagtttggcctgtgactgcayttactgtttatgctcatcagaaactgtcaatgtctgcttttctttaactctgcagtctgtaacatcaygctgtttattaaaaaaaaaaagaaaaattactttttgtgtccaaacaatccttagtgtactacataagcaaaaaactgtgataattctcttttgccattccttttgaaaagcaagccrgtgttgctaataatcaaaatttagctgaatttgagttcttttcagtaatgactaagaatacttgattgaaaatctgaaactattataccttaaaagccaatttttctaccccagtaaagtgatgaatattaaaggaatgtatgtttaaatatttrcttcctttaagcataaagaattatatgcttgtattttaagaaatatatgtatatacatatatgtatgaatgtatgtatgtatatgcaataggtaagtagacttttttccaagtcgtttgaagatcagaacctagaaatgaagttaggctagaagcaaactggttttgctttcagttctcataaacattgcaaaaggtaagtgtgggcttttctttgaccattaatgcacataggcattaacaacttagtatttctgagcaattaagcaaataattacttaaattttatttatttgccaaatggtttaaataattttgaattgactttgttctccagggataatctctctctttgctggaatgaatcaggtagctcctatctaaatggaaaactgtggtaattgaaacacacrctttatattttaaattagcagttttgaatttgttrgggaaaaaaaaatcccagcaactgcatattgttaggtagaagtcaaatttacaaaaacggaatagagatgtgcccttgagaaaagtgtagaatctcaatgtgcagatgatttaaaatgtgcgtgcacatcaaatgttcatgtgtacttacatactttattacagagaagtctttggtatacaaaatagtttaccacaaccttttaaacagcaggttctgggccttaaatgcgtatcacatttagccaagagaactcaggtaggggcatggaaaatgaactgcagctccctatccctagcctctataccagctgtccagtgaaaagtaccaaggctcactgaatgttataacctagcagatttttaaataaatgatctaacatttttgagcactgctactagatgctagaagctaagctaaagtttcacctgccctactttgcttattccataaaataacaactgcgtgaaagaacgggttatccccattttatagatgagaaaagaaaggtttacacaggttagcttatttgcccaaagttgtaattatggcctacaaagtcaaataaatcctactctgagacacatgttctttccaccattgcacactagaaaggaaaacaccaagattattcattactcatcaagtcaatattgctgtattcagctaatttagtaatatgtgtcgaaattaattgctaaaagggattaaactgacttagaatcagttttttgtttgattacatctacatacaaaagtagcttcaaatgtctcattccactgtccrtaatttaagatttttgagtataataaaattttaaagatactttgaggcactttggaaaatcagaccaaaatctcttttccactcatagattcggcttaatcaacctggaaagcatttgttgagagccttatgacatcatttaataaccatggttgattcattaattaaagtacagacaattgttgactatccatgtgggacttcttttctattaggttgatgcaaaaataattgcggtttttcgccattaaaagttaacagcaaaaactggaattacttttgcaccagcctaatacgatgtggatcatctgagatgaatgttaaaatccagtatagcttcttcatatttctggcccatttttcccaccagaaagtgcacaaagtgaaatgagcttatgaaaagcttaattaactagaaaaatgttactgaaagaaaaattacatggtacatgacaaggctaaatactagtaactctaaacttagtgaattttctaggcagcagctttcctctgctgtctagactggtaaagaacaaactaaagccaagcgcagtggctcatgcctgtattcccagcactttgggaggccaaggcgggcaaatcacctgaggtcaggagctcaagaccagcctgaccaacatggtgaaaccctgtctacactaaaaatacaaaaattagctgggcgtggtggtgcacacctgtaatcccagctacttaggaagctgaagcaagagaattgcttgaacccaggaggcagaggtcacagtgagccaagactgtgccactgtgctccagcctgggcgacgagcaaaactccatctcaaaaaggaaaaaaaaaaaaactataataaatatgttagctccatgttttcttaagttttctaccagatttttgtcttygtatagtgaacaaactgttaagaacttttttatgagaaatattttagtatgactatattgcatagagttaggctgatggttcagtgttcagtagattagataccctcattgtttatttccatattgactggttctagctagagctgaaattaggcaaagaatatcttgaactcattttgctatacaggaaaaaaaacagtgcttccttagctcatttggaaagagattgggattagaaaagatggtgaatttgtatgtatttatagaaataaatagaatacaaaatgaggcttttaaattttttcccacatgaaaatatgatactttaattattaccttttacattrttagtttgcagacaggcataattaggtcctcagttgcagaaatcacagacatctgaaggccagcactttaatttggccaccgtcttaagatttctctgctcttcctttgctcctcctcatamtgcacagtttgaactgatgctgttctatataaggtacttttccacctacctcatctctgactacagtgctatatttttcacacagtaaggacaggtgttgtgttaatctcaccatgccaacaatcagggcaccacctagcagagtcagtgaaggccaaaataaacagtggaagatagccatttggtcatacttttttataagaatgacatcttcagattggctggctggactgtagaagcatgaaaagggggttccatttttgtgatcgaagaattcttttatgtccagagcactgttgagcaaatcatttctatcttggtggcacttaggtgtgtaaaagcactaggaatatggaagagggaaaaagataaaggcactgtcaccaataccaaatacttaacagtttytaattatgaaatagcttcaggctgaagttattagtgggcagtttcaatcttagaaggtggtaaaatattacatagctcatgggaaagggttgattggagggccacagtgaaatggccatttccagtcattaagcaaggatgtggaagagaattcttagttatatgacattgcaggagagtcagtgaccaahttcataaggaatatgwctcctccctacatgcaggttcttggactcttggacagtatgaatccgtttgtccattgaacaaaaatgtattgggcctyactatgagctttcaacgcttagtaatgcctctgttgtctctgtcttgatctcctgtagcaaaatatcaccctgaagaaaagcacgttgaggcttttgctctagactcacagagagggagccccacctggactttggttcctgggagacagaaccagtggagaagggagctctgtcagctggtgacttttttcaaaaaagcttgaggtttattaccatatccattaggtacttgaggtactgtgctaaaggccwaaaactgtttgaaatcttaaaaatcattgcatcccaaacagaaaacaaaagtcatcggattgaaattgatgcttaaagacaataaaatgtaacatgtcaactaatctaacacaactcaacttttatagttaggtataaatataaattttaaatcatatgaaagactatttcagggatcatttctataattcgttaaatcatatgaacccattgtgtaacttactaaaataaaaataatctttacatttatttgataagaaaaattacttgattcaagggagactgtgagtacactgtagcatatgtcatatggcgcggagtggaatctccaaaagaaagactccccacaaatgactactcattggctcagcctataaattccagacaccaagttgtgaaattggaataatttctctcctttctatataccccatttctccaccaagaagaaagcttcatttatcctgatttgatcactataaaaatgttcactccaaaaaaatagatttatccctaaagacagccctgggttatttatgtaccctgctagggacagtctggcagggaagggttgctgtcataagaactctttaaactttacaataccttgggatttatctggacagcctcttcattataatgtaggagagctttctgacctggatggctgaggttcacaaacacctgaagacacgggtacttcccctgaccgtggcagtgcacaccacaggtgaaggcacagtccagccagtcgtccatgatatctgtgtggatggcagtgcaggtcgattcttctctctgaatgcttcaatttgaaaaaaaaaaaatgttcttcacttaytagaaaatttcrttctacattttggtgtggttatgagcttatgtacacaatgcccaaggcatttgtgtacaaggcatttgtgtattttgaggtggtgcaggatccttacagcaggcacataataaacagggagcatggaagacacagagttggggtaaagagccacaaagtgccaagttccacctcacttctgatgaccctactggcatatttctcactacaccagtggttttcaaacttcagaatcatctgtgagtttgttagaatgaagaatttgttaaactgtggattccagggcttcattccagaaattctgatttggtaggtctgacttgaggcccaggaatctttaatagtatttaagatgcaggtatttggaraaccacagtgtaaacagtgttagcattaccataatgctgtaaccaccaagattcaccctcactcaggaatctcatcacctctcatgctcatcatctcaagatgcactggcttgtcctgatgaaaatgtgcctttggaaggagtctaactacagggccgttggtcaacatagcctacacamtttctggcaacaaggtacaattccacatacccactacttccaaagaggcaagtgcaaatcatacatggaatctctcagtagaatacttaccatatttttgctatcaattaagttcctagaggtcaagagctatatccaattcatccgtatgttcctcaaagcatgaaacagaatgcttctcactgagtagatgtttaataagtgctgtactgaattaattttttttggggggggatggagtttcgctcttgttgcccaggctggagtggtgcaatctcggctcactgcaacctccgccttctggtttcaagcgattcgcctgcctcagcctcctgagtagctgggattacaggtgcgcaccatcacgcccagctaattttttgtatttttagtagagatggggtttcaccgcattggcctggctggccttgaactcctgacctcgtcatcctcccaccttggcctcccaaagtgctgggattacaggcgtgagccacggctcctggtctgaattaaattttacttggaaaatttcttgagaattttcacatgtaatacatatgcaaaacatcccagaagggacagacaaaattcctgccatgaagaccttgtggtgatgttgaagagaaaggacatgtgtatatgtatgaaataatttgaaaacaagtccaagacaaagtaaacgaggggaagaggaaacgctttgattgaatatatgagaccagctcttcatataccctcacactcacatataggtggactcctgtgtttacttaccggttccttaaacataataagttagattagcaagctctaaagtcagaatgtttgaaaagcagggccaggcgcagtggctcatgcctataatcccagcactttgggaggccgaggcgggcagatcacttgaggccaggagtttgagaccagcctggccaacatggcgaaaccacgtcttcactgaaaatacaaaaattagctgggcatggtggccggcacctgtaatcccagctatataggaggctgaggcaggagaattgcttaaacccgggaggcagaagttgcagtgagccaagattgtgccactgcactccagccagggcaacagaggccgactctgtcccaaaaaaaaaaaagtaagaatgttcgaaaagcaatatttagctaggttcataatgcactctcactaatctctttgaccaaaataatcattttcccttattaatataacaaacttgagacacactgtgcagtttaacatggcctcaaggtctggggtataaaaatcactagatatggccaaagaaaaaatactgggcaagtgaaaatacaaaagcggaaaataagattatttcatagacttagcactggcctgctttttcactaaattaatttatatgtttattttaactaggcatcttgaaataataatttagagttacttttttatctgttagaacttaagctctctaaatcttgaccgagtactgaactgagtatgatttgaattttccttaaagattttagaaagcttcaaaatagagtgggacattctgtcccatgcacaaggccccggtcagagcctttcaggtggaaccagggatgtatttagggctaaaaaataagcatgttccttcaatagcatcgggtgtgtatttggctacagctgtgacaaaatccatcatctgattgagggatgagaggttgagggagtggggataggtatgaactacgcagggcttcttaactaccaccctttatggagcaaaactactcgctgagatggcacaagatgtaaggcaagagagagatgagaactcaccactcttaggcattcacttaattaatttaaccaaataatttccaggaatgcttagaaaagtaaaacttaattatgagcaacagtttggtaccagcttgcagaaggtaccctcaagccatctcccaaatatgtcacatttttaaaaatgatctgcctgtgcacacacacggacatttactcaacattcccatacattcaaacattcaatcaaattacatagacatgtaatgcatatatatatatatawgatgagaggaaaaggagtaaatgaaaaagaggaaaaaaagacagaatgaagtcagaagtgaggtatagccaagacaagagaatcgcttkagcctaggagtttgagactagcctggacaacatagtgagatcccacttcttaaaaaaaaaagtttaaaaaaaagtgaggtacaaacatgtaatctgcagaccataagatcccttgtagttatgagaaccgagctacaaagttgcctctgggtttcctagcagccaaagcaatgaaggaaacacaaccagatacaagactcctggcgtccattaaatgaaagtaagctggttgatcaggagcagcacagcttctcctggtgctaataccagagagaagcttcttctggaattcttccaacagtggcactgtgtgctatagtaaatggtgacttctacatctttcccctaacaatggtaacctaggaatggcaggagatgaatcataaataacagaagtaggccactctcttccttttttatgacccctttccctcactgaactcctaggccttcctcttccactccccctgggcctcctgttgctctttggctgtccaaaaaaaaaagggctgtccaaaaataaagcaatgtccaaaaagcaccccttgccttccttttaccctgaactgacctggccccagagtaccacatgttgtgtgggccatcctacaaaattaaatagcccctccccttccctaatcagaacccccattcccctcatttcagcaaacatcatttaggtattaagaagcaagtcttacgtcagaatgacaggcatattatttaccggctatgtgaacttgggcaagttacttggcctttctgagcctcagctttctcatttataaaatgaaaactaaaataacacttccatcatgggctgctgtaggtttaagtaggataaaatatagtatgtattgagcatacagcatatacttaataagtagcaactaaagttgacccttgaacaattcaggggttagggatgccaacaccacacccccaaacctgcagtcgaaaatttgcatataacttttgactcctcaaaaatttaactactggtcaggcatggtggctcatgcctgtaatcccagcactttgggagaccaaggtagaaggatgacttgagcttaggagttcacgaccagcctgggcaacatagggggatcccatctctaccaacaatttaaaaattagccaagtatggtggcacacacctgtggtcccagctacttgggaggctgaggcaggaggatcgcctgagcccaggaggtcgaagctgcagtgagccatgattgaaccactgcacttcagcctgggtgacagagtgacaccctgcttcaaaaaaaaaaaaaaaaaacttaactactaatagcctactgttgactggaagccttaccaataaacagttgattaagacatattttgtatgtttatatgtattatatactgaattcttacaataaaataagctagaatagccaggcacagtagcttatgcctgtaatcccactgactcaggaagctgaggtgggaggactgcttgagcccaggagttcaagactgcaatgagctgtgatcacaccactgcactccagtgtcacagagcaagaccccgtctctttttttttttttttttttttttgagacagagtctcgctcagtcacccagggtggtaggcagtggggcaaggggcgggggggggggaggtcgagcacggggggggggcggcgttggcatgtgggggcgggggaggggaggggggaagagaagggggggagccgcggagtgaggagcgggtgtgtcgttggagcgcccgccggggaatggaggggacaagggtgtggcacaggtgaggggagggaaggtggggagaggtgggaatgggaagggggtgtgaaggggagaatgggggggatttggatggtggttgtgaaggtaagggggggggacaaggcagggcaggggggggaaggggggaaggaggatgggggagggggggggcgggagggaagacggggggggggaggggatgcacgggggcgctgggcggaagggggggagtgagggggcggcgggggagaagtgggagggtggtgaccacccggacgggcgatttggacaacgggccctacggcgcggggatgcgccccagcaccgtgggagcgggtatgcgccgcggccccgaccgcagacagacggtggtggcggcgcggtttagcgcacgggataagagtgagcgcggctgatggacgcggtgcgagggcnnnnnnnnnnnnnnnnnnnncagctactcaggaggctgaggcaggagaactgcttgaattcgggaggcagaggttgcagtgagccaagatcgtgccactgcactccagcctggcgacagagcaagactccgtctcagaaaaaagaaaaggaaagaaaatcataaggaagaacaagatcatgtcatttgcggggacatagatgaaatgaagctggaagccattatcctcagcaaactaatgcagaaacagagaaccaaacactgaatgttctcacttaaaagtgggagctgaatgatgagaacacatggacacctagaggggagcaacacacactggggcctctcagtggagtagggggagggagagcatcaggaagaatagctaatgcatgctgggcttaatacccaggtgatgggttgatctgtgctgcaaaccaccatggcacacgtttacctttgtaacaaacctgcacattctgtacatgtaccccggaacttaaaacaaaaattgaagaaaaaaaatcataaggaagagaaaacatgtttactatttactaaatggaagtggatcatcataaaggtcctctccctgtcctcttcatgttgagtaggctgaggaggaggagaaagaggagggattgatcttactgtctcaggggtggcaggcacagaagaaaatccatttataagtggattcccgaagttcaaacccatgttgttcaaaggtcaactgtatcactacatatattgaataaagaacctaattaaaaggaaggaaactaatatgtattgagcaactactatgtgccaggtagacactgtcaaactcaaaaaattcagactcaaaaaacttttattgtgctcacatacaaggtttaactctctcttggaataccaacattttaaggggaggatttatgacctaaatgaagaaactataatttgtggattacgtgtttggaggtatatatagattatgagatgggaggaggcagtgcagggaaatatctttgaccttctcgccacctcttcctccacacccagctgcccccagcactgacagcggaagaggaattgtatttttctttttctagaccatggcagagagtcacagattgagaaaccaaagccagcctctcctcctttaccgctgtgcctggatcttatctgaattggaaactctagatttccttcctctgtttcttacctgagcataaaakgctttagaatggttgttccgagcamgaagaacattaggactgagaagcccatcatggcaaaccccagcatcacggctcggtcctctccagyactggatggcagcctcttgtgcacayctagtgggtctccatcactgtagtctgtctctctcttcttccctgaggcaggaaaggctgtcctttggggaaagggagaaggagatactgcagtgagctcataaagaagggggaacatttccaatccatggggactggagggataatctcatttgctgcctacctgtgtctcgtgagcaggatgaatgcaacaaaatgaaatcccagttcagagcttggtgaaaagtccatctaaataagctaaagtgatgtgtaatcaagtatttttaaagatattgtagcaaacaagcctaagaaatgttgcctcatgcaagtctgtagagatctgtttaatcaataactagagaatgttgtatgtaaataagtgttamgaactttgttatctttcagggatattgcacgtccctcctgaaaatttgtttacattctcctttgaattccacatgraaagaatgactcaaaaagttcacatttggaattaacagcgtcctgaacagggtttgacttattctttcatattcacctgttggaaaggcagcatatccaccaccagaatttctggccactgcccagtccactcagaattatgaagttgtcatggcttctttgctcctctcaccctccttctcctcctctctggccactcatggttctgcataagtgtcccttcatttcttctctcctctctccactgtgcctgcaaacctgctccagcaaaggatgagatacattctcgcagggcagggtgtctggtgaacagaagagtccaacacaaaggtcgcaaaccggtgggcatggcggcatccagcccacagatgtgttttgtttggccttctctgtcgttttttgtttttgtgttttttggttttttttgagacggarcctcgcactgttgcccaggctgggtacgatctcagttcactgcaacctcctccgcctcccaggttcaagcgattctcctgcctcagcctccctagtagctgggattacaggcgccggccaccatgcccagctaatttttgtattttaagtagagacagtgtttcaccaygttggccataatggtctcgaacgcctgacctcatgatccacccacctcagcctcccaaaatgttgggattacaggcgtgagccactgcacccggcctggtttattattatttttttaatgtgggataacttgttaagaccttaaaaatcatgacatttctcataaaaatgctgagttctgactttggaaataatcccaagatgcacgtccctgcagatgaacagcgggcccagcagagcagtggctgcccctgtggaaggtgtgttctctagtttgccaaaatccctccacttcctacrgtgtcactgatttgccattccctgctcagtagccatttgagttccagaagtatctccattttaagaagcttaatgaaatcttaagccaaacaaatgcagcactaatggtagaaacacaggctccatcaagcttcctaaaagcttactgcattttaaagtcaagcaaaaaccccatcaaggaaattactggttgtttttttcccacaagcatagtttatgccttatcccacatccttccccttccctctccctagctcccttttcccccagcaacatctttaggttctaaagcgagtaaaaggaatgtcagacaatccagaatgttccaagagcctgtgccaggaagcaccaacctcagaaggtggggcactccatggttaacacttctttgggacccgaggatctagtttaggaatttttagttgtctttgatattttactcatcccctatcatcctaccaccagagaaggggcatggaaaaaaaatttaatgaaatttgaacctgtacttttttttttttttttttgagatggagtctccctctgtcacccaggctggagtgcagtggggcaatctcggctcactgcaacctccgtctcccgggttcaagccattctcctgcctccgcctcctgagtagctgggactacaggcgcccaccaccacgcccggctaatttttgtatttttagtagagacggggtttcactgtgttagccagaatggtctccatctcctgacctcgtgatccacccacctcggcctcccaaactgctaggattacaggtgtgagccactgcacccagccacattttctaatttatcaataaatatgacagattgattaaaagaaagttttagccctaaagtagagtttgatggtttttgtagtttccaggacccaatatcctgcattttcccttgtgctctaaagctggactttagttgctctgtagcgtaaggtatcccagaggtttattgtaagatatccttggaatccatgggtgaagaggcttataatgaggtcgctcttctaatgcatctctaatacattctttaacatacccaattataatggtatgttataaaaaaccggcataacccgattctgatctaatttaggaataagacagacctgtactgtcctagacaagactttttatttataatttttctgcccactttgttccaaggctttatgaaaagttgacaacttcataagtcacttggaaagaagttatttcatgtgtggggaagggataatataaaataatcataaaaaactaaaacatagataggtttggccaggtgcagtggctcatgcttgtaatcccagcactttgggaggccaaggtgggcagatcacctgagctcaggagtttgagaccagcctgaccaacatggtgaaaccctgtctctcctaaaaatacaaaatttagccaggcacggtggcatgcgcctgtaatcacagcttctcaggaggctgaggcaggaaaatcgcttgaacccgggtggcagaggttgcagtgagccaagatcatgccactgcactccagcctgggcgacagagtgagactccatctcaaaaaaaaaagtaaataaataaatttaaaaatttttttaaaaagcccacatagatatgtttttattattgtaaaagtaacaggcttctgtttcagtggtatggtacactagacacccactctaactacagacaactaaaacttctggccaaagcttaaaaagaattggaaatactcaaaagacaaaaactatgtgaaagtaggaacccagaaaggaaggtggacagaagtcaagttttaacttgagggcatttgcggaacttggtgaacttgagcttttgtttcacagtttatagggtcacagggacaggagacaatgtccagggtctatccgaggtatgtagtttaatataccatccaactagagctgggaccccaaaggacttaaaagtcagtgtcaggttgaactggaaatagcccctctcccttcacccacaccgtaccactccataggaaatggcaaggaaaatgcctttctcaaaccttaacactgactaaaagaggaaaactacaatctcccctgaaattttagataatcctcaaggggatcctcaagggagtttacagcctgaattcatactacctgggtaatacaaaaatctcaagctaagaatttcgtgtaatgttgtttaagtaggtagtgccctctgcaacctggcaaatttaaatacgtatgttctctgtaggcacacacatttaacttaggccttaaaagaattctataggccaggcgcaatggctcacgcctgtaatcccagcacttttggaggtcgaggtgggcgaatcatgaagtcaggagatcgagaccatcctggcctacatggtgagaaaccctatctctactaaaaacacaaaaaattagctgggcgtggtggcacgtgcctgtaattctagctgctgcggcaggagaatcctttgaacaaggagtcggaggttgcagtgagccaagattgcgccactgcactccagcctagcgacagagcragactcgtctcaaataaaataaaataaaaaaagaagacgtatataaatgtccaaggagtatatgcactcatttagaagtcataaaacacacaacagccaggcgaggtagttcatggctataatcccagcactttcagaggctraggcaggtggatcacctgaggtcaggagtttgagacgagcccggccaacatggctaagccctgtctctattaaaaatacaaaaattagccaggtgtagtggcaggcacctgtaatcccagctactcgggaggctgaggtgggacaatcacttgaacccagaaggtggatgttgcagtgagctgagatcgtgccactgcacttcagtctgggcaacagagcaagactctakctcaaaaaaaaatgaataaataaatamataataaaaaataaaataaaagtcataaaacacacaggaaatcaaggcgtttgagtgcaaaaaaaawagaccacaaaatgagatccacgaaaaatttcagatatttgcatagaatataaaatacacatctgtaacatayttaaagaaataaaggaaggatccaaaatgtcagaaatcaaggaattctaaaatgtagagctaatatttaaaaaagaatttatagaaatcaaaaataaaataattgaaagtaaaaatttaatgaacagacataacactcaattagatacatctgagaagataattagtgaacacagagctggatctgcaaaaatagccagagtataatmcagagagatttttaaatggaaagtattaaagagaggttcagagacatgaaagatagattaaatagtgtaacataatatctattcagaattccagaagaaaagagacataagtcagaagcaatattttaaaaagatagtcaaattctagaactgattgaagacccagttcccagactccagaagcccatggaataaaataaagaggaacccacacttaaacacatcacagatatattgcacagctacaaagacaagagaaaatcttaacagtcgccaaagaaaaagacaaattaacttcaaagtaatgacaatttggctgagagcttacttctctgtaacaagactagaagccataaggcaagaatattatcaatatactgagaaaaagtaaccacagaattctatgtctacaaaaaaatcctctcaatgaataaagacatttcagacaaagacatttcaaacacaaaactgagtttgtccttgatagaccctcactgaaggaaaagggtcaagtatttactcaaggcagaacgaaaaaaatccagataacagctgatatttaaccagaaatgaagagcaaatacagaagtaaacaggtaagtaaagatattaactctaggctggacacagtggctcacgcctgtaatcccaacactttgggaggcccaggtgggcagatcacctgacgtcaggagttccagaccagactgcccaacatggcgaaaccccatctctacaaaaaatacaaaaattagctggacgtggtggcacacacctgtaatcccagctactcggaaggctgaaacaggagaatcacctaaacccaggaggcagaggttgcagtaagccaagatcacaccactgcactccagcctgggcaacagagaaagactccatctcaaagaaaaaaaaagatattaattctacaaaataataataatagtaattatcttattactattatgtcttgtggggttaaaagaaaagataaatacatgacaagagaatataatttagagggagtaacagtgataatttttccatggggaaaaataaagacattaatttcatgttgaaaagttcaaatatgcatgctaaatagaaatatcacctttctctactcttttaggtgatactccagaaattccaaactagtagagaaacaaagaatggaagggaaaaaaatcaatccaaaaaaggcaataaagaagagggaaaaactcatgaaaaagtcaggacaaatagcacaaaataacatgatagaataatgttattgcatcagtatatcagtaattacaataaaactaaatggagtaaatgatccagttaaaagatagagagtagggcwggctgtggtggctcatgcctatagtcccaacactttgggaaaccaacgtgggagaatcacttgaacccaggagttcgagaccagcctgggcaacatagcaagaccctgtctctacacaataaaaattaaaacaccatccagttgtagtggcacacctatagtcctagytactcaggaggctgagccaggaggattgcttgagcccaggtgtttgaggctgcaataagcttgattgtgccactgcactccagcctcagtgataggtgagaccctatctctaaaaaaactgtttttcaaatataaagattgtcagactagatttaaatacatatagatggtcccccaacttaagatggttccacttgcaattttttttacaactataaaatgtttttatttcaattacataataacacttatgttttcctcaaattttaatgaggatttggtctttttgcattcaattctatcttgtaacagtaatatgaatctacataatttcataaaatgtcaacattcataaggtacattcctttgtgattttatattttacaattaaatctaactttacaattatttttaaatgtttctttatatagaaaacagatattttcttcaggcagatcaaaacaagaattttccaataagaatatactgggacataacaaatgaaaacatttataacaaaataccaaaagtgattcagctctttaaaatatcctactccagtctaattygtagtttgcacaagaacaagtaacctttttttactgttcttttgaatgatgattagaaattcaaacaaagagaagtaattttaaggttcaaaaactttttcttttttttagagacagkgtctcactctgtctcccaggctagagtayagtggtgcaatcatagctcactgcagccttgaactcctggcctcaagcgatcctccaaacttggcttcccaatgtgctagggttacaggcatgaaaacattgttttgtgtgtgtgtgtgtgtgtgtgtgtgttttttagacagagtttcgctcgttgtccaggctggagtacaatggcttgatcttggctgactgcaatctccgcctcgcaggttcaagcgattctcctgcctcagcctccggagtggctgggattacaggcgcccaccaccacgcctggccaattttttgtatttttcgtagagacagggtttcaccatgttggccaggctggccttgaactyctgacctcaggtgatccacccgccttggcctcccaacgtgctgagattacaggcgtgagccaccacrcccggccaaaaacatttaaaaaatgactgtccctgctcaaatactgcagtaggaaatgtaatttgacatgtatcacttccagaaaaaatctttaaactttgtataaaatgaatttgatacatcatcagcatgaagttaaaatctcctacaaagtaaattcaagtatcatcaacaatgagatccaaaagcattggttcaaaatcaaagacttwtatgaggtgaaggcaaataaagcccctcrtgctttcagacctttacttgttatccttaaaatgattattgttctaaggtgcaaatcttttcagtgacctatttgctatttggcggtttatctcctttaaataaaataccatacaggttataatgtatattttaaaatcaaatatgaaagtacacatatatgaacaagacattaatttaaatatcaattatattcataatacagaagtctaagaatgctatttggtcatttcaattagatgctgatatatttggtcaagaatattcacattcctatcagcctaaggcaaatggtaaatgcttctatttttattaagtggactataaacagtagacattattgtttgatactactggatatatgctctcaattagaatgtacactgataacaaatatgtctttctaatctgggtgataacctcaatgattacatggaaatctacaagtaacagtctataacttaaagcagtagatcacctggtgattggcatacagtgcatctctatgaatttagaacattctacttacattggcagtggagagaaaagagcccctcacactcagacttcytgtgcaccacgcctgccgcctgcctcagcttaggacatggtacrgtcttctttgcttttgcccttctcgttccctcctctggtatcttctctgctttctggattgaagtcccccggctctcctcctggtgccaacaagtcatggttttttaggctattgctgtctaaagctttcctgatggtctgacttggatgttctgacatcccacacctctctgtactttctgcttcacaggcatcactaatgtcctgtgagggactttcatttttgggtacggtgcagtgatctgcatcttcrctctctggttcttcaggattgctttaagtggcaccakctattttagcattatcttttgcaacaccttcatctaattcttcaccaccagccctcgggcctgatgattgaactgtgacatcctcaaaatctaatgtgtctctaccagctagtacctcctcagctgctgtttttacatcattgccttcttggtcaagttttccatccaacttcattttaggattctctggacaatcaacattttcactgctttctgctgcaattttctgttttggattttcagtcacctcgttttgggcttccactgctgactttctgtcagtagactttacctgctcttcttccttaatttcacttaaatctgtgttctgataagttaactctttttaaacatctttaagggtttctatgggtactggggattttttcctcttctttttctttttcttgttctttctcttctgcaatgagtccaatgcctctccctgttggtcattcttttcttcatctggctctttcatatctgagggttcactttgagtgtctactgtacttggacctgtcgcctcctgacccttgctctcagttcctgctggagaaccaggaacttctgtcttgattggtttctcatcccttaatcctttttcttcaccctcttcttcgttgtgatccctacctgcttctgtactctgcactggaacctccttgggctcagctgcttcctggttggtgaattctttctctaaactatgccctatgcttgtctctaactgttgggggacctctaccatacatctgtcatcatgataaactgtgtcatcactatgccctaaaggacatgaggccactgtgtctgcctgctctccaacctgagtcaccgctgcctctcccacattctctgtgtggctcccaccatctaagtcactccaacagttggatggctcaaggggagttctggtcctgtcatctggtgcacccatgacctcatttgactcaacctgtgctgtgttttcagggagagaagcgctctcaagaatttggctttgaacctgttcctcataggtagcacctgctaaggttcctaggaatggggcagtgtcttcagaggatttctggtcctcggtattctcaccagcagtgaatacctctatgtccacacaatccttcactgtgtcctctgtgtgttgttctttctcagtattgtgcaagatttctcttttccccacattcgccacgatttcattcttcacctccacctcactggctttcctagggtcccatcccctgtcgacttgagggcatttaactcttctttcgtcatcttggtaggatcttggtatcaaacattactgagagtgtcggaagtctctccattggtaactatttctgaatttaggattattccatgtttctcgagcatttcctctgtttgcttcagggcctccttgacttcagcaaactgaaactgcagtatactgtgggcgtgtttttccctttcaaattatttgtttttctcttcgtactgccgcctatattcagccagctgttcttcaatctccagcaacatatctttcagggtgtcaacttggtaaatgaagtttgtgttttcattgtctaactgagcattggaaaacatagccttcttacatttctcttcaacttctgctagagagtccttgatttccctgatggacgcctcggtgtcgatggatatagaggtgtctccgctgcctctctgagaggaagtcccacccagaaaggccagcgtggctgcagacgggcccagcatgttacgagaccccttctcagtaaaatatttttctggtctctcttctacctccttctgctgccgctccagctccttcatggggatctcacgagcctccgcgcgggcctcccgttttgcggcgagccgggcctccgccagcctctgcgcttccgcgctcaaacagtagatctcccggctctgcgtggccgcggggctggtcaacctgctgggctcggcccgctccacccggcgggaaacgctcggggaccgtgccggagcccccccccgcgggccgggccagggggcgcgcgctctgtccgcggagacggagccactcgccgcgaagtgaacgctcgcgcttccggggccaagagccagcccgccggggagcggctcgcgggactgggctcgggcgcagccggcaggggcggggcgtaggtggccgcgggctgagcctggccgggggtggaatggcgcgggggaagcggggctcgggcgcctccgcccgccccatggcccgccccgccccacacttgcaatttttttacattactatggtgtgaaagcaatatgaattcagtagaaactgtacctcaaattttgaatttgcattatttcctgggctagcgatatgcagtaccctactctcttgagatgctgggcagtggcagccagccatagttcccagtctgccacacaatcatgagggtaaatagctaatactctgaagttttcaacttacagtattttccacttatgatggatttgtcaggatgtaatcccactgtaaatggagaactatctatatgcatgtttttacaaaagatacatctaaaacacagatacaaaaagggtgaaatttataggcaaaatgtaacaaaaagcaaacatgaatgttaaaaattaaaaagctttattagaaatttaaaaataagtgttttaacactgattaaaggctcaattcacacggaaaatgtaacaatgctaatttgtaggtacctgatagcattgtttcactgattaaactacaagaagaaatagacaaaatccactatcagattatgatgtatttttatacactcccccagtaatttagatagcttgacctgaacaaaccagtagggtaatagatttaagtaaagcaattaacaagttttatctaaatgataaatatagaatactcacttctacagaatatatattattctcaagcatgtatggaacatttatgaaactgtgtccggaattggtgggttcttggtctcaccgacttcaagaatgaagccgcggaccttcgcagtgagtgttatagctcttaaggcggcgcctctggagttgttcattcctcccgatgggttcgtggtctccctggcttcaggagtgaagctgcagaccttcgcagtgagtgttacagctcataaaggcagcrtggacccaaagaacgagcagtaccaagatttattgcaaagagcaaaggaacaaatcctccacagcgtggaaagggacctgagcaggttgccactgctggctggggcagcctacttttattctcttatctggccccacccacatcctgctgattggtccattttacagagagccgattggtccattttacagagagctaattggcccattttgacagggtgctgattggtgygtttacaatccctgagctagacacaaaggttctccacatccccactagattagctagatacagagtgtggacacaaacgttttccaagtccccaccagagtagctagatacagtgtcgattggtgcattcacaaaccctgagctagatacagggtgctgattggtgtgtttataaaccttgagctagatacacagtaccaattggtgtatttacaatctcttagctaaacataaacgttctccaagtccccaccagactcaggagcccagctggcttcacccagtggatcccgcaccggggccacaggtggagctgcctgccagtcctgtgcgtgtgcccgcactcctcagaccttgagtggtggatgggactgggtgccgtggagcagggggcagcgctcatcagggaggctcgggcggcacaggagcccacggaggcggggggaggctcaggtatggcgggctgcaggtcccaagccctgccccgcggggaggcacctaaggccctgtgagaaattgagcacagcagctgctggcccaggtgctaagcccctcactgtccgtggcttgtaggccggtcggccactcggagtgctggcccgctgagtccacgcccacctggaactcggactggcccgcaagctccgcgcacagcccgggttcccgcccgcgcctctccctccccacctccctgcaagctgagggagccggctctagccttggccagcccagaaaggggctcctcaggcgcggccagagtgggcgccaaggccgaggaggcgcggagagcgagcgagggctgcaagggctgccagcacgttgtcacctctcaagacctgacwacaaacttagccacaaagaattcctcaacaaatgtcaaatgattcatgaaagtaatatatttttatatgctcattgtatgaaacttgaaaaatacaaaaaaaaatgtacagaagagaacaaaaactcacccacaacacttaaaggtaatgattgtgcacttggtttgctgggttaatcccctcctgctctatattaggttttttgttttttgttttttgtttctgttttgtttttctttttcttttctttttttttttttttttttttttgagatggagtctcactctgtcatccaggctgcagtgcagtggcatgatctcagctcactacaacctctgcttcccgggttcaagcaattctcctgcctcagcctcccaagtagctgggattataggcgccggctaccacgcccagctaatttttttgtttttagtagaaacgggttttcaccatgttggccaggctagtctcgaaatcttgacctcaggtgatccacctgcctcggcctcccaaagtgctgagattataggcataatccaccgcacctggcctatattgttttaaacagaatgagatcacattagatatgatttgagatttttttgttaatcttatctttttcacttaacataataagcactttcccatgtcattaacaattctttgtaatcctattggctacataatgttccatcaattagatatgccatatttccttaaccatttccttattattgaatattattaggttgtttccagttttctcagaccataaacagccttgtaattaactttgttrtatttacaagcatctttcatccaaggacctcaaagcacttaagtatgatctagtttgctttctagtcaggaagatggataaaaagcatattgattcctttttctgccagtaatacatgtccgcttctaaccagtgtattaccttgagctgttttattcataatcaaggcaatatccaccaccttctattctcttcactgcagataggactgactttcccacccagcccaagtacgacacatggctacaggcagcttctggcttagcctgaggcaaactcaattacaaacagcctgaacacactcacctgggtgtgatccccacagaagccagcagcctctccctccagcacygaaacttttgcaagargtattccttagaaacatgctgtggctcatcaaaacttcataattcatctgacattcatttcacgggtgtatgtgaaatgaatgtctaaacatgaagtacactatattaatatttccctgtaattygttttggttacagaggagacccttggtaattatttttactcttctattttttaattacaacattatttaacaacttattttgaaacagcaaataaggttaagtcaacatagttcatcaagttcagcaagaggaaatagcaataattcagttgtgcatttcagaartgaaaatgggatacagtagkttgctttgatgacaacacaactgcctttatatctagttaattgtgtgacrtatgggacactaaaacttgtttgcttgcatgtttgtcatttgatcttttgccataaagtaattcattttaattgtctgttcacaaaaaaattggttcatktctagcgagaagaacacctttctttcctctgtagtctgtctggtccttcttccctgaacccccatcttatccaaactcctgtatctcactctcctcatgctccctctcaaatacccctgagtgcagttaagtgataatggaagtgagtaacatgatgaccattaccatctttaatgttttccaattctcagctcccaactccactagagccaataataaatcatgcatatttccagatagtgagtgaacctggttctgaaatgtacccctcccaacaggtttttctttgtttgagacagagtttggctcttgtcgcccaggctggagtgcaatggcacaatctctgctcactgcaacctcctcctcccaggttcaagcaattctccagcctcagcctcctgagtagctgggattacaggcgcgccaccaccatgcccagctaatttttgtatttttagtagagacggggtttcaccatgttggccaggctgctctcgaactcctgacctcaggtgatccactcacctcggcctcccaaagtgctgggattacaggtgtgagccaccgcgcctggcacaaaaggttttagtatcccatttgtccaacaccctcagkcatcactcttctctccattttggttcccacattgactgccccatgccccaaccctagggcaggcaaaaggggtgcaggtcactagaggctttcagcttctttgcttttcatttccctggggagaaaacgggtcctgaaaataatctctcacttccccctttaaggagaagagtagggtgggtaataacaatagctaaaaggctagagtttagggaggtgtagagcgtatacccggtataacagtatagtttagagaggatgtggtatactgtgctgagacacgcaggggctcttactatctgcatttcacagataaggagatgaggcaaacagagaagttaagtgacttgcccagtcatatggctgattaagtggtgagctgggtttgaatccaagggctgtgactccagggcttcaccaatgggacctgcccagtcatatggctgattaagtggtgagctgggtttgaatccaagggctgtgactccagggcttcaccaatgggaccaaatgctggtctaatttcttcattcctcattcaaccaacagatcattcttgagcaccaactatgsgctgggctatgatcagtgctggggagctacaggtgagtttaaaaggtctccagtctccaagaactggcaacctagaggatagagccaacaggaaaggctgcagccccgtgatgtgagtgctactggggaagcctgctgggtaccctgggaggcatggcaagtgggcatcctcagagaaaaaggaaacactcactccccaagctcgagatgtcccctcttcttgcaactgcttgttcagccagattcccactaccggcagagcttccggaagtgacttacctcccctggcgcctccggctgccctgaagtgtgatttgcacggggatgctgaagggctgcatgaggccaggggtctgagaaaatggctccctttcacctgagtcatgcccctgcgggcgcaagaaaggtgaagcttagacatccacggaagtggagtcccagcgggagcccccagcccccagcgcagctgcagccattagaagccccccgccttcctggagaggtgagaacttcaggcaggcyagccacgtggttctgcagactcctggcaaggcggagcggtcagttctagatgatcaagaaggacctgcgtggtttgctgcagccgaagctgcttctctctytttgcactgtgcttgccgccacctcatcacctgtgtttccgcctcggcagccgggagcatcgccatagagacctcaacgcttgtggaaagttctgaggcccaaggggacyctctataattggtgagggacgtactcagttcaaggtttataagaagaggaaatgttttgccctggccgcgtttccttttccacgtattgtctgttagagtgcaagctgaaataatgggttttctagttaatggcatgttccaattaagataattcgcttttaaaccatatgtgatttcccaatttttcaagatacaaagggccataaaataactcgccattaaaattatctcaaattttaagaaaagctgtatcaaatattattttatctttctctgatgacttaaaagacatttggggatctttcyacactcccaaattaggaacatcaattaccattatattatagtaccacacattgctacaggcacctgtagatgtggatgacagaatgccaaagagaccatgtttgctgtatgtttttcagtcaaggcgatattatcttaacattttccaagatggtgtgggcaagaatgtaagcgtaatctcatctataaatatccatgtacatatagctatataaactcttacttgcagtcattttaatattgcttaataaaaatatatacttaatagacttttcatttgtattatttttctatttctattttataaaatatttgtttgggtttttttgagatggagtctccctctgtcacccaggccggagtgcactggctcaatcttggctcactgcaacctccacctcccaggttcaagcgmttctcctgcctcagcctcccgagtagctgggattacaggcatgtgccaccacgactggctaatttttgtatttttagtaaagacagggtttcatcatgttgaccaggctggtctcgaatgcctgacctcaagtgatctgcccgcctagtctcccaaagtgctgggattataggtgtaagccactgcacccagtccgaagtattttagtgaacagatgcaatttggaataaaaaataatgataacaactggaatttcttctttctgcctccttcttccaacttaaccttgtatatatggatagcttttccttttcagacttatttgtgctaataaatttcccctgcaacttggtaactctcttcgaagaagtgtgtgatttgctgctgcttttatgtatttgattcaacctcagaaatatgatcattttttagtccatgaggatcttgtcacacaaaacttgcacctgcctttrccagagcctcctggtcattcttatcttatgattccggttccatttaaaagaaaatactcatggacaataagtgagaaggagcaacatagctttttgccctctgaactttttccctaacgccccttcacttgataaccaactggcctctctgtccaccaagtaccacactcactccactcttggcctgaaagccaagccccctacacacacacactccattcaggactcacagcctatctctcaagaagaacctaaagtggtcggtgtgagttgcaatcccaatgtgtgcattcaggaacacagcaaggctaagccacttagaatgcagtgataagagatgccaggcactgtacctctggtctcctggaccctccctcagcttattccttcctctgagtcactaaaggtcacttcctgctccataaaacagcaaccatgaattaactgtcaagttcacaacgtgggccccctcccaatctgacccagaggctttgacactgggttcaaattctagctttgtaactgcaaggaaccctttaaaaacttcctgccctgcttttccagagtaaaaagggagtaaataaaaactcagtgtgagttgcaggagcatggaaaaacttagtgtctacaaactgttgtgagatctatatatgaaagaggctattactgcaaagtgctagcatcgtggattccagattccagagtccacaatcatttcttttgcatttagtagatgctttacttaggggaaaaaaaagaaccctctttgcctttcaccatactggagaaactacttcctcattgtttttcacattctctcaattaaatatacaatacctattatggctaagaattattttgtagctgaaattctccatgttcatgaaaactatgtctgtgttttccaatttagagatgcacaaatcattgacaacaacctaaaatttacacaacagcctatgttctttgcgtgactatctatatttgttcgtaggagaataartaaacccctaactggacagttattccaatatggagaatttttgctgatgtgagcaagaattcaaactgtcaaaagtaaagtcacatctgatcttacattctctttgcaggaaaacaaacaacaaggaagtatgatctgtgccacaaacttctggagccttcgatgggatctttcctttcctttaccctgattattatctccagccatcttgctaatcaaatgggcacctgactgcctgaactaggctcacatcagagaaaccagcgtcacctctgtgcagatgcttttcctgctctgagtgataatactagtggctactatttatgagctagttacagttctaagtctatacaaatgttaattcactttttgggctttttcaagagcagagagctacactgacttacacaagctcacaagagccagagaacttggcctatcctggcatacaaacaactcgatggatagtgaggcagaaactaatagaaataatagctgaaattctttgacagttcaacagccctcaatactttgtcttgtttgaaatccactgtgatcaagtctttaccaggtggcacttgctacagatacatttcatattttaagttgaggtaattgttctactacatgagtggttcttgaactcaggtgtgatcctctgttaaatacagattcccaggtcccatctctagagattctgataaaacaattagggtaaaggacccaagaacttgcattttaaaaagcccttcatatgatcctaacacaggtgaccctacatttatactttgggagacatcagctcacattatacagtaaatagaccttggaggcctgggcttaggaacctaagcaccatttctagtctcaggttatgctgcctccttggaactcagcttatttctctgtgcaatgtgggagttagagcagatgatttaatgtgcttttaagatctgcctttaagccgggtgtggtggctcaccaccgtaatcccagcactttaggaggctgacgcaggtagatctcctgaagtcaggagttcgagaccagccttaccaacatggtgaaacccatctctactaaaactacaaaattagctggccatagtggcgcatgcctgtcatcccagatacttgggaggctgacgcaggagaatcacttgaacccaggaggcagagattgcagtgagccacgatcagatcgtgccattgcactccagcctgggcaacgagagcgaaactccatctcaagaaagcaaaacaaaacaaaaaaagatctgcctttgagatccaataaagtgtatgaaaccgtaagtttgcttgcaggaagcaggtatcttctctcctggagtgacaataatgcaaggattcccccatcagctgctgagaggcagcgctcacccagaaagaagagaattcaacaactgcatgcccaacccaactttccctagacacataatgataacttgggtgcccygagtaaccatgtgccagggattgtgctcagtgctatgagaacataatgtccttcagacacagaacttgaggaggtaggaactttttgcgcattcagcagatgaggacacagaagaccagagagtccgaggaacttgygcaaaaatcacaaagtaacaagggctaggtccggggctccagaacagatcacatccaaaagtccatgcttctactgacaatattcggcctcctcgctcaggaggagcttgggcttattcttttaagtgtcttmttctcaaggcttgaaggagccttagccctttgcgccaggaatgttgctggccaagttgttatacagacaggatgttcatagctttttataagtctgcatgtcttgatcacttttagataaattctattccggatctgatgaagcccccattcttggcaagtgatatctgatcatgaattttgatgcattcctaaatgttatagaataacccctattaataagaacacaaataacctgaattcttaatcaattagaagttattttattttgttttttttctgtttcactttctaaggagaaaaagacaaagaatagaaaaataaatctatatccagtgcttaattttttttgtatgtgtgacagagtctcactctgtcgcccaggctggagtgcagtggcgagatctcggctcactgcaagctccgcctcccgagttcatgtcattctcctgcctcagcctcccgagtagctgggactacaggcgccaaccaccacgcccggctaattttttgtattttgtttagtagagacagggtttcaccgtgttagccaggatggtctcgatctcctgactttgtgattcgcccgcctcggcctcccaaagtgctgggattacaggtgtgagccaccacacctggccccagtgcttaatttttaaaaataaaatcccaggccaggtacaggggctcactcctgtaatctcaacattttgggaggctgaggcaggtggatcacttgaggccaagagtctgagaccagcctggccaacatggcaaaaccctgtctctactaaaaatacaaaaattagctaggtgtggtggcacacatctgtagtcccagctacttgggaggctgaggcacgagaatcacttgaacccaggaggtggaggttgcagtgaggcaagatagcgccactgcactccagcctagatgacagagtgaagccctgtctcaaaaataaaaaataaaaataaaacaaaatcccaggaaagtccttgaggattagtagtaattcacataactctgttgtttcaggtaagacaaatacatggatagtatgttcccgaccccatggcgcacacctttgttagctcctgctgagcttgaaattttagctccatgaaggcctgaatctgtgtcttttatttataactgtatcaccagctcctggaatagtgcttggcatggatgctcagtamatagctcctggatgattgaataagctggacactactgcaaaaactattctgtattcaccactaaaggcagcaacttccaacaaattggggtaggcttgaaagattaaaccattaggctatccctgtatagctcttctatttatgtctatagtctctccacattgtgaattaaaattcaaaatgatggctgtgaggatctgcaagattcctgctcactctattctacaagcatttaatgagcctctcatagtgtagagttcaatttgactcaaatattccactttagtggaatatttagtggcgcctcaaaaggaacggtgccacctcctggtgggcatttgggaatctgtgggtgagggtgtttcttgsttgtcaccatgattggaagggcactgccaggtacttagggagtggagagctacatgtggcagatgtcctacagtttgcagggcagtcccacacaacaaagaattgcccgaagtgtgatggaaattaatttcatgtccactgcaaattaatgtagatgacagggctacttattatgatctgagttaaaacctaatgccattttacatgaagtacaaaataccttgtgttgaagtattttttgtgctttttcaatatccactgaatttccccaaaatgcatctactatgtaaatcgagagaaatttgtactttgttttattcagacatttccaaagttcttcaccattttaggaaaccacaacaccatcagcaaagctgttcatggtacttgagtttccaaggcaataacacacccaatacaacctgttcccagctgtcacatccacactgtccatatacatgtcagcagctgaccacttcattctattactgatgtagccatgctcaaggattcacatgaagaattaaatatttaatgagaaattactggctgggcgtggtgactcacacctgtaatcccagcatcttgggaggccaaagtgggcagatcacttgaggtcaggagttcaagaccagcctggctaacatggcaaaaccccatctctactaaaaatacacaaaaaattagccaggcatcatggcgcatgctgtaaccccagctacttgggaggctgaggcagaagaatcgcttgaacacaagaagtggaggttgcagtgagctgagatcacaccatttcactccagcctgggtgacagagtgagactccatctcaaaaataaaataaaataataataataaactacttaactttaatttctcctgtatcccatagttaggccattatattattttttaatgcatgcaggtaagctatactatctatgcacttgatttcagaatagtaaagtgtttgctttaaaaggggcattgggggctgggcgcagtggctcacacctgtaatcccagcactttgggaggcccaggcaggcagatcacgaggtcaggagatggagaccatcctggctaacacggtgaaactccatctctactaaaaatacaaaaaattagctgggcatggtggcaggcgcctgtagtcccagctactcaggaggctgaggcagaagaatggggtgaacccgggaggcggagcttgcagtgagccgagatcacgccactgcactccagcctgggtgacagagcgagaccccattaaaaaaaaaaaaaagttggcagggagggtgcattggggcattggggctaaaggaattgaacactactgttctccttgctaagaaagcggacaattatggtttaggattttttttctaagcttgactgaacatattgtattcctttcctgacccaaatgggacatgtctactcaagtggatctatactcccatctcagttggttcatttgggggaggtttcaacatgcttgtgcagagaaacgcaaacaattcctgccttgaaaacatccagccttctttatatgtctaagtttatatataagaatatgtaagctgtccttttcttcctcatcaccccaccatcctgtaccatttttaggaaagatcattgacagagagagagagagaaagatttttctagtactatatgttttttatttcttctaaaaaaaaaaaacaaacaggatacatgtacagaacatgcaggtttgttacataggtatacgtgtgccatggtggtttgctgcacctactgacccatcctctaagttcccacccctcacccctcatcccccaccccgcaacaggccctggtgtgtgttgttccactctctgtgtccatgtgttctcattgttcaactcccacttataagtgagaacatgcggtatttggttttctgttcctgtgttagtttgctgaggatgatggcttccagcttcatccatgtccctgcaaaggacatgatctcattcttttttatggctgcatagtattccatggtgtatatgtgccacatttttttatccagtctatcattgatgggcatttgggttggttccatgtctttgctattgtaaatagtgctgcaataaatatatgtacacatgtgtctttatagtggagtgatttataatcctttgggtatataaccagtaatgagattgcttggtcaaatggtatttctggttctagatccttgaagaatcacagggcatataatattatactatgttacaatgaggaatctgggggactgagaaactttcccaagtcccacagctcatgagtggagtcgtcagggtttagacagcctgccttgcagctgccaatcaacagacagcttacagtctttggcctctgctcaccccctttcctgactccttaaccattgtgatctaacttctccatctcatcactggaaagttgctttctttaaggttattaacccctcaagcatcaaatctattctagcacctattatctttaatagaaaattttaattacttgtttcacattattttgtttttaattcactaattaactatacctgtggttctcaatcttggctgtatctagatcatctatggagactcttaaatttacacgtttattttaaataggtaatatttaaccatggttcaccactttacagtgaagagtcctcctcccatccctgttgctcagctacccaataaccctccacagagacaacggtattaccagtttttcatatatctggaccttgtaaaaaatacagactattctccaagagacttaaagttatttaataggccagtattggccgggcacggtggctcacgcctgtaatcccagcactttaggaggctaaggcaggtagatcacctgaggtcaggagttcgagaccagcctgaccaacatggtgaaacccccatctctactaaaaacacaaaaattaactgtgtgtcctggtgggtgcctgtaatcccagctactcaggaggctgaggcaggagaatcacttgaacccgggagatggaggttacagtgaaccgaaatcacaccattgcactaaagagcttctgcacagcaaaagaaactatcaggaccaggcatggtagcacattgcactttgggaggctgaggcagatgcatcccttgaggccaggagttccagatcagcctggccaatctccttctctactaaaagtacaaaaattagctaggcgtggtgttgtgcacctgtaatcccagctactcgggaggctgaggcaggagaatcgcttgaacctgggaggtggagattgcagtgagccgagaccacgccactgcactccagcctgggcaasagagtgagactttgtctttaaaaaaaaaaaaaaaaaaaggctgaaacaataaactcaaacttttattagaggctctcaatatgttctaactggccttcttatactttccctcctatccttgccagctttcttctgacaccagccttccttccttccctctccattcttgtcctacatctctatctgcaggatgaagcatatgactcaggcgtagcctatcagagcagcacatccccttaccctcatttgtgattcaaggcggggcatgtgaatgaatatagagccaatgagccattaaggaacgttttttggggttgttggaagagagacaagctttctttttccacaggactagaaactgagattaaagctctgaatacctgggaccttctcatggtagcaaagaatgaaaccaacatgatagaaggtagattcaaaagctgaacagaaatgaaattctgaccatattgcttgagatcctagatgaaactgtacctaaatcaggctaatcaaactacttgatactattttatttacgggagctagaaattccggggttttttggtttttttttgttttgttttgttttgtttttggtttgttttttttttttttttttttttttttgctataaagacgtctttttggtgacttttaacaaatgggttctaattgattcagctgaaataccagcagagctggagtgaggtgagggaggacattacagtatgtaatctgaagcatgtgccctaaaaattcttattatatttgtttccctgcaatctcacatagtaagtacccttggtactcccaatttctcttctctctcttccctactgacctcgacaaaatagttcagccttccatctctgaatggctcctctccagttgaccaatgccttttcttgtgtaattctgtttaaatcccctgcttcttccaaaccttatgtttatctgttaaaccagtcagcacgataaggtgtgctaggcttagcactgcaaagacgggatcttccttagatagcattggttggtaaaaggctagaaacatggagattttcttatttgtatccccaccacatgcagtttcagtaaattctaattggaactacattgtatgagcatcagaaaagtttttgccagaccagagagtacacaggcagcaggcctctggattatcctcgacacattcagcacataagcctcgcagactggccactgctccaggcccactaggtcattcagagagtacaagatccatgccccacagtcgctgactatctttcataaacattaagtcaaatcataaatattattaaatacccactctatgcagggtagtgggcaatgcctccttttatacaatatcattttatttttattaactttgtcatttttgtagtcggctgcatcatcaaatcatttataaaatttaaaatatttttattcggccgagcgaggtggcccatgcctgtaatcccagcactttgggaggccgaggtgggtagatcacttgaggtcaggagttggagaccagcctggccaacatggtaaaacctcgtctctactaaaaatacaaaattagccgggtgtgatagcgcatgcctgtaatcccagctactcgggaggctgaggcaggagaatcgcttgaacccaggaggtggaggttgcagtgagctgagatcacgccattgcctgggcaacaagagcaaaaccccgtctcaaaataaaataaaataaaattttttttattaattcaaaagaatacagagcagcatgtattattttaattggtggcatggcccatgagtgccagaagacagtgaaggagagacaggacagaaataagcttcctgaagctggagagacccagacagttccagaagaaaaggcagtatctggtagaatgagaggaaggcagatattttgaaagaccatttgcaagactgtggtaactacaacttttgtctgctcatcccgcttcccaccccttttcttctgattcctttggagaaactactccttgcccacatgtgtccttagggatctctcaattgtggtatccggccaccctcccacagggatgagtatttcacccagatcatccagttcacatataccatgttcccagtgagggactacttccagaatgaacacacgatccaagcggagcaaatgagttttctctgagagtagtgtaaggatgctggaagacaaaacttctattttcaccagggctgttcagctagagaattttattcagagatattgtcacccatcttacctaccacatagagggaacttgtctgtaggacagacaaggagagggaaaaaggtagagagagaaaagttgcccaaatgagaatgtttgaacttctagatccagctgtgcctgaagccagtccactcctggatacacttccctgttacatgagtcagtaaattcactttctgctgaagccagactgacttgggtttctttcatttgtctctgaaagagtgaatttctgccatctaggtaaaagaaagaagtttcaccaaaatacgaaagtaattattcttattttctgccttcttttgcagaaaaactgacccattcgcatactcataaagatggtcatgagtgaagtacccatcaacttacccactttaaatgatctaggaaagggcaaataggctagaaaatcaaatttgctctatgtgccagctattaatcatgaattaaagcctaccttctaactgaatatgaactgttaatcataatgaattataattatcaatcaatcataaattgaagcaaactatcaatattggcaaagttaagtgaccacattcccattaacattctggcagcaaggaatcagttctctctgtaaggacatgctacaccacgactacttccagagcacatgactacttgcctcgctttgcagccaggtgggcaaaaacaatcaacaacttcatgggttaccccatctgattcgtccaagctgaaatatttatgccttgtttccctgacaagtaaaaaaagggaaacagcaaaagaaatcctacaaatcttaagcctggactagattgcaaagtgccaaatgcaaagaaatattcaccctgaaatatgttaatggcatttccttttttgcatctctaactgtgtggtcttttctctagtcagcccgagacacagagctctctggggcagctaagccagaagtggggataggatttttgcaataaggatgtcaacattcaatctctgacattcaaatgtataattttggtgactgcagcaacagtagaatttgaaagccaggctttgtcaaaagaaaaggattttctacatggctttatgttcctctttaacacttgagaagcagatcaggcgaacccaagtctggggagctcaattttttcagaaccataaggatgatgtaacttctaattttctcccagaacacaagtcccacaggcttaggtgaaaagatcagaaggaagtggaaatcgcaaaggtcaccctgagcctgacacatagtgcgtgctcaaaaactacttgtccacttgaactggaaaaattcagaggtgagggcctaggtagggggctttcccattctggcacattaacagttagcaaaatttcccttcactaaagtataaattcaggaaataggaagaacccaggacagataatccacccacaacttcacccctcaggctctatattccaaattaggaaaatgggttgaatttattcccacttggttgcatactgtgtatctgtttctggctgagttggctgcagctatgacccaaactcattgatgctatgttctgaagatataaacttaaatctcttctccagagccacatctgtgagataaaaaaatgacaccacatcactgagttatttcccagcatcatcataggtcaagaatggaccaaaccaccactctaggaccagccacctctgctggaaagaccgcagcagcaccaagcagcctgaatactcacagctccctctgcatgaggggctgatatgaactcctctttccagaggttttgctgaatgtgcaaaaaaacaccaataacaaaaatctattaaaactgaaacaccttcctgggtggaagggtaggacaattaactagttgaaaagatccactgattaagctgggtcaaattaactcaaaataaatgggaagaccaatgtcattcatttaaaaatatttcttgagtgcctaccacatactcaatgccagaataaaagatgtatgaggccaattctgctaaccactcattttgccccatccacagttggacttactgcagagggctgctcaggctgtgcattgcaatggtacctccaagaagtaccattcacacaagctagtaactgcaggatggaccctgggagtttgcaacatggtggccctgccatgacatttatattcctgctggtgaaagagctataaagggataattatgtgggacaggtgcaggaataaaggtatgtgcaaaaagttatggaaacctggtcaagtaacaaaatagctctattctgcttgacatccatagcttccctcaaattaarggagcagcaggcccagggttcatgtgtctacaggcattcctgcaaacagcattcttgtgcaacaggaagcgcctttagaaagtagttaataccaggctgggcaatgtggctcacgccwgtaatcccagcacttcaggaggccaaggtgggaggatcaccggaggtcagaagttcgaggccagcctgcccaacatgatgaaactccatctctactaaaaataaaaaaaattagctcggggtggtggcaggagcctttaatcccagctactcgggaggctgaggcaggagaatcgcttgaacccaggaggcagaggttgcagtgagctgagatcgtgccactgcactccagcctgggtgacaagagcgagactccgtctcaaaaaaaaaaaaaaagaaacaaagtagttaataccaggtgaaagtgagagttcttagcttccaggctagctcccaaagcacaaaccctgagcaatagtgaggtagccggtgtggtgctgaccacagacgctgcacagcccacaaagcaggtgactcaggaatccacaagggatcattattccttttgctttttgtcccaggaacctgcagttgactggctggtgttaaagagtaaaaccatgagcttcaagtcaatgactagtaaaaaagaaaaagaaaaaaaaaagtgaacccaaaaggtggctaaatatttagtttgctttaaaaaaaaaaccatttggtgatttctccctgtcttctggaagaaaaatcttagtgccaagttcatcagtcttttgagcacctctgtgcttgccaagggggctgaggacatcaaatgacttcagttgccttagtgcactcttatgggacacacagaagagtctcacttcaatgacccataggggcagcataattgaaactaataccctcttagataaggtcatatttagagttgcaagttacatgtgaggatatctccttcactgagttgtaattctttgctttaaacatcaaagtaaataaattacacagataacaaataaacaaataaccctaacagaaataatgcaaggccaggcacagtggctcacgcctgtaaccgcagcactttggaaagctgtggcggaaggattgctcgagcccaggagtttgaggacagcctgggtaacacagggagacctggtctccgttttttaatattataatatgtttttaaatttgtttcaaaaaagaaatcagagaagagataaaaagatgctacaaaaaaggataatttttgttgattattacataataataattgaataataattctaaataaataaatgtaacaataataactaccatttgttagctattttgaaataagttctcatgttgttgcccaagctggagcgcagtagcacaatcatggctcactgcaccctcaaccttccaggctcaagtgatcctcccatctcagcctcctgagtagctgggactacagtcatgtgaccacaatagtgggctaatttttttctttctttctttctttctttggagagacagggtgtgactatattgcccaggctggtgttaaactcctgggctcaagcgatcctcccaccatagcctcccaaaatgttggaattataggcatgagccaccgtgcctggcctgagtaattatttcctaattaccatatctcatcatgccccaggcactgtgcattgtctcatttaatccttaaaacagtcctgtaagatagatcctaacagacaccaactatcagatgaggaaattgaggctcagaaagtaacttgtccaagaatacacagtaaactgaaaataagggatggaaaaaaatattccatgcaaatggaaaccaaaaaaagagcaggagtcagataaataaattggataaatcagacaaatagatttcaagacaaaaactataagaagagaacaagaaggtcactatataatgataaaggggtcaattcagcaagaggatataacaatttgataaatatatatgcaccaaacactggagcacccagatatataaagcaaatattattagagaatygcttgagcctgggaggcgaggcagaggctatggtaagccaagatcacaccactgtactccagcctgggtgacagagtgacaccgtgtctcaaacaaataaacaaataaataaaaaaaaactataccaatcctactcaaactattcaaaaacacaaagaaaggagggaatacttccwaactcattctatgaggccagtattatcttgatactaaaactagacaaagacacatcaaaaaaataaaactatacaccaatatttctgatgaatattgatgcaaaaattctcaaatactaccaaatcaaactcaatattcgataactcatcaatattcactaactcaatcactcatcattcattatgacgaagtgagatttagcctagggatgcaaagatagttcaacatatgcaaatcaattaatgtaatacatcatatcaacagaatgaaagacaaaactatatgatcatttcaattgatgctgaaaaagcacttgataaaattcaacagcccttcataacaaaaacctcacaaaactggttacagaaggaacatacctcaacataataaaaagcatatacaacagatccagagttagtatcatactgaatggggaaaaattgaaagccttttctctaagatctggaaaacaacaaggatgcccacttacaccactgttattcaacataatactgaaagtcctagcttgagcaatcatacaagagaaagaaataaagggcatccaaattggataggaagaagtcaaattattctagttttcagatatgatcttatatttgggaaatactaaagataccatcaagaaaactataagaactgataaacaaactcagtaaagttgcaggatacaaattcaacatacaaacatcagtagcatttctatatgctaacagtgaacaatctgaaaaagaaattttaaaagatcccatttacaatagctacaaataaaattaaatacctaggaattaactaacgaagtgaatgatatctaaaatgaaaactataaaacattaatgcaagaaattgaagaagccacaaaaaaggaaagacattacatgttcatggattggaaatatcaataatgttaaaatgtccatattactcaaagcgatctacagatttaatgcaatgcctatcaaaataccaatgacattcttcacagaaatagaaaaaaatttctaaaattcatttggaaccacgaaagacccagaagagccaaagctaccctgagcaaaaagaacaaaatgggagaaatcactttatctgacttaaacttatactataaaactatagtaaccaaaacagcaaggtactggcataaaaacagacacatacatcagtggaacagaatagagaacccagaggtaaatgcatacatctgcagtgaattcatttttgacaaagstaccaagagcataaattggggaaacgacagtctcttcaataaatgatgctgggaaaactggatatccatatgcaaaagagtgaaactagacctgttatctctagccttatacaaaaatcaaatcaaaatggattaaagactgaaatttaagacctcgaactatgaaactagtaaaagaaaacagtaagtcccagagtaggcaaagattccttgagtaaaacctcataagcacaggcaaccaaagcaaatgtgaacacataggatcatatcaaattaaaaactttctgcatagcaaaagaaagaatcaacaaagtgaagagacaaaccacagagtggtagaaaataattgcaaactacccatctgacaaggggttaataatcagaatataaaaggagctcaaacaactctataggaaaaaatataataatccagttttttaaatgggcaaaagatctgcatagacatttctcaaaggaagacatacaagtgggaaacaagcatacaaaaaggcattgtcattgatcatcagagaaatgcaaatcaaaactacaatgacatatcatctcaccccagttaaaatggcttttatccaaaagtcaagcaataacaaatgctagcaagaatagggagaaaagggaacccttgtacactgttagtgggaatgtaaattagtacaatcactatggagaacagtttggaggtgcctcaaaaaactgaaaatagaggtaggtatatactcaaaagaaaaaaaatcaggctgggcgaggtggctcacgcctgtaatcccagcactttgggaggccgagatgggtggatcatctgaggtcaggagtttgagaccagcctggccaacatggtgaaaccccgtctctactaaaaatacaaaaattatctgggcatggtggtgagtgcctgtaatccaagctactcaggaggctgaagcaggagaattgtttgaacccgggaggcagaggttgcagtgagccaagatcgcgccactacactccagcctgggcaacagagcgagactctgtctcaaaaagaaaagaaaagattaaaagatatcccaaagatatctacactcccaaagatatccaaatcttagctattgcagcactattcgcaatagccaagatttgaaagcaatccatcaactaacaaattgattttttttaatgtggtacatatacacaatggagtactattcagccattaagaaaatgaggtccagtcatttgcaataacatggatggaactggaggtcattatgttaagtgaaatttaagccaggtacagaaagacaaacttcacatattctcacttatttgtggaagttaaaaattaaaacaattcgactcatggagatagtagaaggacggttaccagaggcttggaagagtatggggcgggttgttggggggtgtagggcggggagtgggatggttagtgggtacaaaaaacaaaaagaatgaataagactagtatttgatagcacaatagagtgactatagacaaaaataattttttgtactttttatttcttttcaatatttataatttattttgcaaatgtaggtttcattagtgattcctttatttgattttatgctattttattttactttacattacgggatacatgtgcagaacgtgcaggtttgttacataggtatacatgtgccatggtggtttgctgcacctgtcaacccatcacataggttttaagccccgcatgcattaggtatttgtcctaatgctctccctccacttgccctccactccccgcatttttaaacaactaagagtataattggattgtttgtgacacaaggataaatacttgagatgatggacaccccatttaccctgatgtgattatygcatgcctgtatcaaaatatctcacgtaacccataaatacataaaactactatgtacccacgaaaattaaaataaaaaataaaaataataaaaaataaaatttgccatgaataaacattgattaaatgaaacagcatgaaataaatctgttatcttaatacttggagttgtcccaatacctgaaacaaatgttctatctcttgcccttttgatttttcatccttctgccagggatatcagttgaaggttgaagtggcagagaggaattagggagcctgtataaagtaaaacaagcttggtgcctgctacaaaagctggctttttcatgctgtctttgaaatacagtctgtattttacacttctaraatatctcagtaaggacagtaaattttcagtggttagaaccatgtatcgtagaaacctccgtggttcacagtgaaacccaggaaggagggaggaacttgtcttctttcccaaacagtctgaattacatctttcagcaattctacatcttgagaccagcaagctataaaggcctagaatataactaacagaaagactgtcagcgcaaaaagggaatagtaaagggaggaagagacatgagctgcaggattagaaagtgggcatctggattaagtcaaggatcaaatctgaacatggctgatccatgtcgacaaagccatgcatttcctttgacctcgtaaacctctttacactctggctcttttttttttttttttttttagacggagtttcgcttttgttgcccaggctggagtgcaatggtgcaatctccgctcactgcaacctctgcctcccaggttcaagcaattctcctgcctcagcctcccaagtagctgggattacaggctcccgccaccacacaggaactcgtgcttcctaaaaccctcctacctttgtttcctcttttggtcctcatgggtatttctcaatcagagaaatgagaaagttgggggagaacttatttcaacatggtcacaggcactttgattggtgccttacacatgctatttcatttaatccttacaacaaccttatgaagaagatgtgtttctactcctcagatgagaaaactgaggcccagtgaggtcaagaagtttgcgcaaaatcacatagctggcaaggggggatataatttatactctctactttgaaagtccatgctcaaagccacccggagctgaagcttcccattagctacctagaacaataggctttattgttggaagatgcaattgagatcgcctagtctatcactatccaatatggatacaatgtggaccatataaataatttaaatttttccagtagccacatttttaaaacattaaaaagaaacaggtgaaattaattgtaatagtattattttatttaatccaacatatctaaaatattatcacataaacatagagtcaatacaaaaatgtattaatgagatagtttatagtgkctttcacactgttctttaaagaygattttacacttctaacccatctcagtaaggatactaaattttcaacggctaaagtaaaatgtagtgctgtcaaagttactacgttttgtttaaaagagaaatgttttatgccgttcccatttttaaatttaaatttgacagtgcggcagcttacacctgtaatcccagcattttgggaggccaaggcaggtggatcgcttgggcccagaagtttgagaccagcttgggcaacatgacaaaacctcatctctacaaaacagtacgaagaagtagccagctgtggtggtgcacacctacagtcctgggtactcaggaggctaagcagagagaatcacctgagcctaggaagtcaaggctgcagtgagctgagatcatgccactgcactccagcctgggtgacaagggataccctgcctctaagtaagtaaataagtaaataaataaataaataagaatttgaattcattaaagttaaatacaatttaaaattcagtttctccccagccgcactagccacacayatttcaggtgatcaatagccatatgtggctggcggccactgtattggaaagtgtcaaactagctgaaatacctcaacttacagatgaagaaactgtagcacagagaggttaaatgacttgctcagagttattgtcagttcgtagctgagttggaactaacccaagcttcctaacactgacctttctatcacaccacgtgtagtgaggcactgttaaactgatgggttgctgaggttgattttcaggcattttgggggccatccctcaaactgacyacattccccttctggccctctcgctctttggacaagctctccttggggactcmtacatcgtcaccataattccacctgtaaagctcacccggrgcgtgcccccaagccaggtcccatatggccctgttcataagaaagaagtatgaatgaatatatatatttttaaaatattttgacaaaatgacttaaatctagtcatttttacactatttccaaggacaatttaataatrtatgccaacaatttttaagcataccttcatcctccagcagaaagaatgtagcaaatttctcttgttaacattattttatgggtagaaccatgagatgctaagaaattggacaatttacctaagattgcatgaagcttcaggagctgacaagttgagaacgctttctattcctgttcctggcctctttctaagtcatagcacttctcttcgattacctgcattttctaaatagaagatgaggtctgaatttaaagtagaaaagattagtatgtaaaagcccaatagttgagatttttgtcatccaaacaaaagtcaaggtaaaactaatatttttaattcaagataaactcatattaatagcaaggtaatgtccaaattaataccaagggcaacagatacatcactgtttgtagagactaatttttcacgttgatttgtggggagtccttagcaacactcattaggagcaatgctgtggaggtttaggtggccctgaaattgatttatgtcttaccatgtcttaggtctcatttttatagacaaaggtagagctatacagtactcttaactgatggtagccatggaattctaagccttgaaatgtagtgtatgtaatgacccagagaggatcatcattcctcaggaagcagatctgctgatagagagctggagcttttctgctgagtcagggaactcataaggtaaaccttggaagaaaacaagggaatgaataagasggggaagcgaggtgccccataaaaatgccttgcaaaaaataacccagaaaaggaatgcaacttttttctcttctgggttttcgttttaagatcaaactgttcctcggctgatatgtaatgaataaaaatctgcctactggaagtgtccacatagcgtcctcactctgctctttgtctgccacaggttaggccctcaaatccccaaagacagcaatctcctcttctctccaaagacttatctttctgcaggttaatcatactcagcttcttcaactcttcttcataggacagattaattcattcaatcaacaagatcacaccctattacgttccaggccatgtgcagtgcactcagaacacagagatcaatgggatgcagtcccacccacacacttcccatgtcagggctgatttccaacaggcaaaaaatgctacaygagatgtgttgatttgcaatgaattaaattataacttcaggtaaatgatgttcatcctctggatatatgatgttcatcctctggatattttttgagaatcttttatgtacagagcgtattttaagcctttctaaccaggagaatccttaagaagtgggggtgaagcagtttttgccctcaacaactaagactttaagcttattgcctgtgtctgtggctataaaactgyttgcattctcattagttatttgcgcactaagagcagaattgtgcatcttttccactggaaagtcacaaacatggttaaatttaagtagactctgtgtgcttgcatgtgttcacgtaataacaagtataatccttagaaaaacactttattgaagtacgatggcaggaaaaagattgttcatatttaatgtgcacaccttgatgagtttggggataagaatacacctgtgtaaccatcaccaccattaaggccacagacatacacatcaccttccaaagtttccttccaccctattttattattattattattattttcatgttaaaaaacctttaagatctatccttttagcaaattttaaatatatagtacagtattgttagctataggcactatgctgtatagtaaatctccagaacttatttatcttacataactaaaaattgttcagttatctttgaccatcatcttttttttttttaatttatttttttattgataattcttgggtgtttctcacagagggggatttggcagggtcatgggacaatagtggagggaaggtcagcagataaacaagtgaacaaaggtctccggttttcctaggcagaggaccctgcggccttccgcagtgtttgtgtccctgattacttgagattagggagtggtgatgactcttaacgagcatgctgccttcaagcacctgtttaacaaagcacatcttgcaccgcccttaatccatttaaccctgagtggacacagcacatgtttcagagagcacagggttgggggtaaggtcacagatcaacaggatcccaaggcagaagaatttttcttagtacagaacaaaatgaaaagtctcccatgtctacttctttctgcacagacacggcaaccatccgatttctcaatcttttccccacctttcccgcctttctattccacaaagccgccattgtcatcctggccctttctcaatgagctgttgggcacacctcccagacggggtggtggccgggcagaggggctcctcacttcccagtaggggcggccgggcagaggcgcccctcacctcccggacggggcggctggccgggcggggggctgaccccccacctccctcccggacggggcggctgccgggcggagaggctcctcacttctcagacggggcggcctggcagagacgctcctcacctcccagacggggtcgcggctgggcagaggcgctcctcacatcccagatgggacggcggggcagaggcgctccccacatctcagacgatgggcggccgggcagagacgctcctcacttcctagatgtgatggcggccgggaagaggcgctcctcacttcctagatgggatggcggccgggcggagacgctcctcactttccagactgggcagccaggcagaggggctcctcacatcccagacgatgggcggccaggcagagacactcctcacttcccagacggggtggcggctgggcagaggctgcaatctcggcattttgggaggccaaggcaggcagctgggaggtgtaggttgtagcgagccgagatcacgccactgcactccagcctgggcaccattgagcactgagtgaacgagactccgtctgcaatcccggcacctcgggaggccgaggctggcggatcactcgcagctaggagctggagaccagcccggccaacacagcgaaaccccgtctccaccaaaaccagtcaggcgtggcggcgcgtgcctgcaatcgcaggcactcggcaggctgaggcaggagaatcaggcagagaggttgcagtgaactgagatggcagcagtacagtccagcttcggctccgcatgagagggagaccgtggaaagagagggagaccgtggggagaggggagaggggacaggggagaggggagagggaccatcatctttacttccttctgttattaagctattaccattcattatccatcaatgtcaaaaacatcatttgctcattcatttattcatgagtatttgaatccctatcatgtaccaggcactgctcaaggctcaggaaaaacaatggtgcatgtaaaagacccaaatgtcagcctttgtggagcttattaagagttatgattcctggccgtgcacagtgaatcatgcctgtaatcccagcactttgggaggccgaggcgggtggatcacttgaggtcaggagctcaagaccagcctggccagcttggagaaaccctgtctctactaaaagaatacaaaaattagccaggtgtcgtggcgggtccctgtaatcccagctacttgggaggctgagggtaggagaatcacttgaacctgggaggcagaggttgcagtgagtcaagatcgtgccattgcactccagcctaggtgacagagcaagactctgtctcaaaaaaaatacagttataattcctgtcttgtttgagaaataatgctttgcaaaattccaaccacctcaagcattgtttaaaaaaaaaaaacaaaaaaaactcttcagattaatcctctgtgcagaaaaaatgtttaaaagatcaattatcaatcattgaattacagttagcccatcagctcttcctaaatagtacttgcttaaagacccacaaaggtgctccagcagagtgtttatcagaaactacagttaactttcttctactttcctctctgtcctccactttctctttactttatttaagggaaagcaagatgtgttcctccaggggattgtttcagaaaatccctttctcatttggctcatttccatgtaaacagtggtttccagatgaggtaatgggtctaatgggaatttgaattatcttcaaagcattagttaaaggggagtcaccagtttagggggctgatcagccagcgaatgctctgctctctgtttctaggtaataattaacagaaggtcttccgcaagcaataaatatcctttgatgtcccccattaaattgtctcctgatatcagctttctgtattctcccttggtggcacttactcaaatcttacagagtcatttacccaggctcaagagcagaaaactcatgaactgcctggaggtagcatctgaaaaggagaagccgttacacacaattcttttcctcaccccactcccaaaaacttacactgggccaggcatggggctcacacctgtaatcccagcactgggcggggagctcatgcctgtaatcccagcgatttgggaggctgaggaggccggatcacctgatgtcgggaattcgaggccagcctggccaacatggcaaaaacccgtctctactcaaaatacaaaaattagctaggtgtggtggcgagtgcctgtaaccccagctactcaggaggctgaggcaggagaatctcttggacctgggaggcagaggatgcagtgagctgaggtcatgccactgcactccagcctgggctacagagcgagactccatctcaaaaacaaaaacaaaaatttacactgcagctaacagttttctagaaaggtaggctattaccacagaacttcactatcaatgcccacctttataactcaaagacagaccaaatttactgagaaaaagccatgcaatccaacagaaaaataagtaaaacttgaacagatacttcacaaaacaagaaatccaaattgtcaatgaaaaggtgtaaacctcattagttatcacgcaaattgcaaccacactgatacacactatcctggcactgtaatagccacaaataaggcgggggacaaaaagaatgccaagtgtgggtaaagattcagagtaactggaactctaatgttggtgaggttgtaaagtggtataaccattttggaaaacaatttggtagtatctagtaaagttaaagatatacatacacatgaaaaaaattatagtatattcaagcaggaatatcatttaacaacaaaactgatcaacttcagctacatgcggcgatatgagtaactcttacagcataatgttgagggcaaaaagacacaaaagaatttatacaggctgggcacagtggctcatgcctttaatcccagcacgtttgaaggctgagacaggcagatcacttgagctcaggagttcgagatcagcctagccaacatggcaaaacccccttttgtacaaaaaatacaaaaattagctgggcgtggtggtgcacgcctgtagttccagctactcaggaggctgaggcataagaatcgcttaaacccgggaggcagaggttgcagtgagccaatattgcacactgcactccagcctgagtgacagagtgagactgtctcaaaagaaatataaaagaatatatagactatgatttatacaaagcttgaaaacacacaaaaactatgcaatattgtttaaggatgtacgcagacgtggttaaactataaagaaaagaaagaaagtgattaacataaagaaaacagtttctcctggaaagagggcagggattataatcagaaattgataggtggattactctgaagtgctcacaatgtttaattttttaatctgaatgccagttacatggatgtttcccttataaatattgttaaactgtgtgaattaattgatgcatatttctaaacaaatgcgcaatattttccgaaaaaaatgttttaaaaggtagagctgggacaagctaggtaacaccattgctcatctcccttggcctctcaccttatcagttattttgatgtttcttatttttaacattatttcttatctgggaaatgttttctttgagaaaggaataagaaatgtaggggttatttttatctcatagattccccacacataaatagaaaagcagaagaaaagaggaatcagcagaataaaataaagaattgcttctgtcactgtgaaggctaaacattcgaatgctaattttactgcaaagtctgtgacatataaatccctgtattttctgagtctcattccctcagcagaaagagaaaatagtaattgccttcttcactagggtggggagggaatacttgcctgtgaagcagcgttatctcgtcagctctttgaagcttccttcaaatcttgcaatatgaaaacaaacaagcagcacaacgtcagaagaaaagaaaccacataagaaaataaaaagatacaaagcaaaatctcagtgttgaaaaatttatatattactcgtttattaataaatcagaaactacaagaagctatcacccattcattcacttattcattcaacaaacattgactgatcctttactactcttaaacattgtgggagctgaataagacatggttcctgttctgaaaaagcttacaattgagtcaagaaaaaaacgtctgtacatacttcttccctggagcccaggagttcaagaccagcctgggcagcacggtgaaaccccagattctacaaaaaatacaaacattttttgggaatgacagcatgcctgtagtcccaggtactcagcaggctgaggtgggagaatcacttaaacccaggtcaaggctgcattgagccacaattacaccactgcctttcagcctaggcaacaaaaaatttggggaaaaaaaatacctcacaatttaataagtatgagtccctgctttaaattacccataaatcataattttctctcttgtagcagataagtgcttacgttttggatacaatccttatttcataaacttgcagatgacaatccccatacgttcccagttgttgcatctctcgtcactctaagtgattctcaaactggggaacctagtcatggaaattcatttgatgagacaactaagttaaatt

SEQ ID NO: 93372 - DNA, 12993 bp, Homo sapiens
ttcatagagacagggtttcaccatgttggccaggctggtctcaaattctgggctcaagtgatcctcccaccttggcctcccaaagagaatgatttcttctatgcccacagcaatgtctgtgtacttctcttaattgcagtgatgattatttgttggtctgtatctttgctaaaactgtgaactctcttcccctagacaaaatatgtatccacagtaactagaaaacataccttacacattgaaatgtactaaactccttttagggtaccttcctagcttacaatttcctagtcagttgtaccctcttcccccaattctacaggaccagactccagggttttgaaaaatcactctacttccttcaccacagttaaccaagagtgggtgttttaatccaattagtctcttccagggaaattttagaattggracaaagaccattagtaaaatcaaaatacaaataataaacaagaaaaaatgcaattcacatcggagacaaagggctgatttctctaatatacaaacatgtagaaatcaataaggaaaagactaacgacccaatagtaaaaaatggacacattataaaaaagactgctcacagaaaaagaaatacaaattactcttaagcatatttttaaattacatatgtgcagcattgtttgtaatatagcaaaagatgggggaaaaacctaaatgcccacctacagggaactggttaaatgcagtatgttagatgaaaagagcagaatgccacaatataaaaggatgatgtcactctaaatgttcatactgcaccatctccaagatatattgctcactgtgtgtatggtatgctgccattagtgtaaaaaaaatggagaggaggaaaagatagataaatatagataggtaggtaggtagaaagatatgatgatggatgggatggatgggatggatggatggatggatggatggatggatggatggatggcttttatcacatatacatagaatatctcaagaagaagatagaacaaactgctccattaattgcttttgagaaagcaaatggtggctagaggaaagaggatgaagagacttttcactgaaccaattttatatatttatttatttttcatgacaggatcttgctctattgcccaaactagagtgcagtggcacgatgtcagctcattacagcctaacttctagggctcaagctatcctcctgcctcagcctcccaagtagccaggactacaaacacaaaccaccatgccaggctaatgtaccaattttttttttttttttttttgaggcagtatcactgtgtcgctcaggctggagagcagtggcgcaatctcggctcactgcaacctccacctcctgggttcaagggattttcctgtctcagcctcccgagtagctgggattacagatgtgcaccatcacgcccagctaatttttgtatttttagtagagacagggtttcaatatgttggccaggctagtctcgaactcctgacctcaggtgacccacctgcctcggcctcccaaattgctgggattacaggcgtgatccactgcacccgccctttttttttttttttgagacggagtctcgctgcgtgattctcctgcctcagcctcccgagtagttaggattacaggcacacgccactacaccaagctgattttttttttttttaacagagtcacgctctgtcacccaggctggagtgcaatggcacgtctcggctcactgcaacctctacctcctaggttcaagcgattctccctgcctcagcctccagagtagctgggattacaggtgcctgccaccatgccaggctaatttttgttttgctttgttttgttttgttttttgagacagagttttgctcttgttgcccaggctggagtgcaatggcacgatcttgcctcattgcaacctccacctcccatgctcaagcgattctcctgcctcccaagtagctgggattacagacatgcgccaccacgcctgactaattttgtatttttagtagagacagggtttctccatgttggccaggctggtctcgaactcctgacctcaggtgatccgcccacctcagcctcccaaagtgctgggattacagtcatgagccactgcgcccggccctaatttttgtatttttagtatagaacagggtttcaccatgttgcccaggctggtcttaaactcctgacctcaagtgatctgcccaccttggcctcccaaagtgctgagattataggcgtgagccaccacgccaagccccaattttttttttttttttttttaatttgtgacagagtctcactttgttgcccaggctggagtgcagtagtgcaatctaatctcaccttgcaacctccacctcccaggttcaacccctcctgggttcaagtgattctcctgcctcagcctcctgagtagctcgaattacaggcacgcaccaccacacccagctaattttggtatttttagtagagatgaggtctcaccatattgaccaggctggtctcgaacccatgacctcaagtgatcagcctgccacggcctcccacaagtgctgggattacaagcatgagccactgtgcctggtcttaaaaaaaaaagaaaagaaagaagaaaattttaattagctgggcacggtggtgtgtgcctgtagttccagctgctttggaggctgaggtgagaggatggcttgagcatccagcctgggcaacagagcaagaccccatctcttaaaaaaaaaatctatttgctgtgtaaaaataaatagcatttaagtaaaaatataaaagatttgcgattctcagtttctttgtgctgctgagcttgtataggattaactcaggagttggaggcagctatattctacgtcaggccagggtagcagaggaagctgctcgagagagaagaaacaagcagagaagagatattggagagatggagagaagataatgtctgggctctcaacaacttgtttttggcctttcctggggccagctacatctctctccttggtttcttcgaaacatccctatattcttataataaatctctccttttttggcctaagctaacttgagttgtttcttgatagttgcatccaaagaaatctcactgtcatagcaggttttcttttttgtttttgtttgtttgtttgtgacagggtctcgctctgtcaccggsgctggaatgcagtggcgtgatctcggctcactgcaacctcccactcctaggtcaagcgattttcttgcctcagcctcccaagtagttgggattacaggcatgcaccatcaggctcggctaatttttgtatttttagtagagatgggtttttgacatgttggctaggctggtcttgaactcctgacctcaactgatccacgtgccttggcctcccaaagtgttaggattacaggcgtgagccactgcgcctgacctcatagtaatttttctgtaaatgcttgttaaaaggaaatgtaaagttctttgtaatgaaattatttaggttctcaaaatttgattgtactttaaaaaaaaaaatctcctaaattgagggaggccagctccagaggtgtcgttaaagacattcaccctaagctaaggtggtgtttgttcatggaaaatatgagctgggcctggggccaagtaacacattccacccactagactttcctctcagtccctgcctaagaagttagacttttcaatgtttggtgatgacctgcctgaaagataaatgctgaatgttgctaaatagaatggagtttgaggagtgtgagacatttttgtttggtttggtctggtttctgttttgaaaggaaaggcgttagggccagggcaagagcaccaatcccagggtaaagagtccttgtgataattattttagtacattcaaatatgggtttccattctagctaattctgcaagactcaaaaaaaaaagaaaaaagaaaaaggaaaaaagatatatgtttccgagttctaggactacttaaacctttgaggctaatacctttctgaaggcaaagtccatttctctgtcagtgttttcaacgctatagatagtactatcctcttactatttattttatattattattcccagtactgaacagacggaaagtacttaggaaaatcctcaaagtcccagaatggtattcataaggcaactcctagagttcaatagcctgcaaatgaagttaaatatattaaatatattttatataagcatgatatcataatgctccaaaaatatcatacactccaaaaaatgacagaatggcagcaaaaaaagctgcatatatgtttatgcttttttttttttttttttttgagacagtctcactctgtctcctggactggagactggcatgatcacagcttattgcagcctcaaactccctgggctcaggtgatcctcccacctcagcctcctaataggtgggaccacaggcatgtgccaccatactcagctaataattatattttttgtagacacagggttttgccgtgctccctaggctggtctcaaactcctgagctcaagcaatctgcctgccacagcctcccaaattgctgagattacaggcgtgagccactgtgttcggcctgttcacacattttttatgtaagatgaatttaaactggatgataaaattgtctctcatgtgaaataagtcagaataattgcattataaatactaaggttaaaaaagcgtaatttatttctatcattgaaataccattgaaaaattgaataacattatttaaataccaggaaccaaccataccattcaagcaatatttcttgaaaattcattagggatatcataaaagtataagacatggcccctgtccttaaggagctttgttataatttatgtgaggtaagacagatacaaagcatcatcattgttatttttactaacagaagtagtatggtgaagtggaaaataatacaggcttttaaatcttaggtgtagatccatatttttagttctgccatcccattaatgtatgatctctgcaaagatacttaactgctcctaggctcaatttctttaattctacagtggggataaggatgctaatttttttgtttgttttttgttttagaaagggtctcactcttttgcccaggctggggtgcactggcactatctcggctcactgcaacctctgcctctggaactcgaaggatcatcccacctcagcctcccaggtatcagggactacaggcacatgccaccatgcccggctaacttttgtatttttggtagagacggggttttgccatgttgcccaggctggtctcaaactcctgagctcaagtgatccacctgcctcggcctcccaaaatactgggattacaggtgtgagccaccgcacccagccaggatgctaaatttaaaggactggtttttagccaggcttggtgtcaagagcctgtaatcccagctactcgggaaactgagacaggataattgcttgaacttgggaggtggaagttgcagtgagccaagatcgcgccactgtactccagcctgggtgacagagtgacagcctgtctaaaaaaaagaaaaaagaaaaaaaaagaacatgttttgttttgtttagttttctttagagatggggatctcactatgttgcccaggctggtctatgaactcctgggcccaagcgatcttccctcatcagcctcccaaaatggtgggattacaggcctgagacactgtgcccggccaggacagttgcaagaattaaattgcaatatagatgcaaatacctaagtaaacgctcgatatgtgtcaggtgttcgaaaaatactagtttattctccatctgaattgaagggattgaatattttctaactcgtttctacttattgataaataatagttttattattggtgaattttaaaattgaagttagctaaaactgcaatcattttaacaaccaaaactttaattttctcaacactaaaactcaattccgcgccaggcctgccagacacctgcgccctcctgcagccaccgccacagctgccagcatgtctggcccagacatcaagacgccgamcgccatccagatctgccggattatgcggacgctaatgtggcccgcaatgtctaggcgggaccatcctgaagatgatcaaagaggcgggcgccatcatcagcacccggcattgcaatccgcagaacggggatcgctgtgtggccgctctggctcgggtcgagtgcacccacttcctgtggcccatgtgcatcggtgaggtggcccacgtcagcgcggagatcacctacacctccaagcactctgtggaggtgcaggtcaacatgatgtccgaaaacatcctcacaggtgccaaaaagctgaccaataaggccaccctctggtatgcgcccctgtcgctgacgaacgtggacaaggtcctcgaagagcctcctgttgtgtatttccggcaggagcaggaggaggagggccagaagcggtacaaaacccagaagctggagcgcatggagaccaactggaggaacggggacatcgtccagccagtcctcaacccagagccgaacactgtcagctacagccagtccagcttgatccacctggtggggccttcagactgtaccctgcacagcttcgtgcatgaaggggtgaccatgaaggtcatggacgaggtcgccgggatcttggctgcacgccactgcaagaccaacctcgtcacagcctccatggaggccattaattttgacaacaagatcagaaaaggctgcatcaagaccatctccggacgcatgaccttcacgagcaataagtccgtagagatcgaggtcttggtggatgccgactgtgttgtggacagctctcagaagcgctacagggccgccagtgtcttcacctaagtgtcgctgagccaggaaggcaggtcgctgcccatgccccagctcgtgccggagacccaggacgagaagggctttgaggcctggctcggtggctcacgcctataatcccagcactttaggatgctgaggcaggcggatcacttgacgtcaggagttcaagaccagcctagccaacatggcaaaaccccatctctactaaaaatacaaaacttaactgggcgtggtggcgggcgcctataatcccagctactcaggaggctgaggcaggacaatctcttgaacctgggaggcagaggttgcagtgagccaagatcatgccactgctctccagcctgggcaacaagagcaaaactccgtctcaaaaaaaaaaaaaaaaaaaaaaactagaactcaaatatccaggatttttaatcaggtaactaatgtagataagggggaaaaaactaagaatatactgatttatgccaggcgcgatggctcacgcctgtaatcccagctctcagggaagcagaggtgggaggatagcttgaacccaggagttcaagacctgactgggcgatatagtgagaccccgttctccacaaaaaggaagaaaaaaaaagacaaaaaaaaaaaataagcgtaagaatatactgatttacctggaaaaatgttatttgtaatcccaacttgctctctgaatgtaataatatcacgtaacatcagtgacttttgttttgttttgttttttgaggcagactttcggtcttgttgcccaggctggagtgcagtggcatgatctcaactcactgcaacctccgcctctcaggttcaagcaattctcctgcctcagactccccagtagctgggattacaggcttctaccaccatgcctgactaattttttgtatttttagtagagatggggtttcatcacgttggtcagggtggtctcaaactcctgacctcaggtattccacctgcctcagtctgccaaagtgctgggattacaggcgtgagccatcacacctggccagcgactttttaatatataaaaccatgccttgggctgggctcggtggctcaccctgtaatcccagcactttgggaggctgaggcgggtggatcacctgaggtcaggagttcgagaccagtctgaccaacatggtgaaaaccctgtctctactacaaatacaaaaattagccatgcatggtggtgtgcgcctgtagtctcagctactcaagagactgaggcaggagaatcccttgaacccgggaggcagaggttgcagtgagccgagattgagccactgcactccagcctcagcaacagagctagactccgtctcaaaacaacaacaacaaaaacttgttccaaatcagaaatcaatcataatttatagcataatgtcattgggttttctcatttttcttttggctaagtacaaaatataggaggatttgggcccggcgcagtggctcacacctgtaatcccagcactttgggagtccgaggtgggcagatcacttgacgtcaggagtttgggaccagcctggccaacacggtgaaaccctgtctctactagaaatacaaaaattagctgggcatggtagagtgtacatgtaacctcagctatttaggaggctgaagcaggagaatcgcttgaacccgggaggcggaggttgcagtgagcagagatcgcaccattaggaggctggagtgtagtgccaatatctcagctcactccagtttaagcctcctgggctcaaggattctcccacctcagccttccgagtaactgggatcaaaggcacatagcaccacaccaagccagtttttaaattttttgtagacaaggatatggggtctcactatattgccttggctggtctccaactcctgggctcaaaggatcctacagcagcagcctcccaaagtgctgggattacaggcttgagccaccgcacccagcctcaatttttttcttctgattttaaaggaaattgaaacattttcatggaccctaggcactatgggtataattgaccctaggcactgcctgctgtgcctaatgaagaagttggccctggacaacactgaacacactggaccaagtaatgcttaaatcccaaaggaagtgtgtactcttgagggaaatgagaggaaatgaggcaagcatacctaagttgttcttcctgatttaccaatcagatgagttactctctgccttggattacaatggataaagggaaagcaaggagtgcatcactccagctcaactcacatgaaagaaaatcgcggtagagaaaaagcaaccctctctgagcaattctattcttaaggctgaaatgattgcattcggttatcgtaattagataacactggtcttttatgattaccgagctaattcttcttgctccagattcctgtttaccagaaaatctgaggataactaggcttcccatgtagattatcctgcaaggaaagaatatctcaagcaggccaggtgtggtgtctcacgcctgtaatcccagcactttgggaggcccaggcgggtggttcacttgagaccaggagttcgagaccagcctgggcagcatggcaaaatctcatctttaccaaaaatacaaaacattagctgggtatggtggcttgcgcctgtagacccagctactcaggagtctgaggtgggaggatggcttgagcccaggaggtagaggttgcagtgagctgagatcgtattgcactccagcctgagtgacagagtgagaccctgtctcaaaaacaaaacaaaaaatctcaagcggctgataaatatacaatctgaatatacaatctgctgtctggttacatttcttattatgaggtagcaaattaacattctggtttatatattctcacaaaagactggttggcatgagaatccatggattcatttaactcattcatataactgacttgaccatgttattaaactggaaatgttgaggttcaaattctaaaccataaaggcttaatccaaggtactataacctagccagcaagtttgtattagctgcaattcaattttcccattttctaactacaacacactccccagtcctcacacctttcttataatcctatgtcctcaaattagctgagtgggggaatccgagggcacaaaaaaggaggaaacattccagcaaaatgtttctgattttttctttctttttttttttttttttgagatagagtctagctctgtcacccaggctggagtacagtcgcacgatctcgactcactgcaacctccgcctcctgggttcaagcaattcttctgcctcagcctcccaagtagctgggactacaggcacgcaccaccatgcccagctaaattttgtatttttcgtacagatgaggtttcaccatattggccaggctggtctcgaactcctgaccctgtgatccgccctccttggcctcccaaagtgctgggattacaggcatgagccaccatgcctggccgtctaatttttcctgttttcttttctctctctctctctccttttttttttttttgatggagacagggtcactgcagcctagacctccaggactcccactccctccaggattctctcacctcagcctcccgattagttcatgccaccatgcccagctaattttttttttttttttagatgaagtttcactcttgttgcccaggctggagtgcaatggcacaacctcagctcactacaacgtccgcctcctgggttcaagtgatgctcctgtctcagcctcccaagtagctgggattacaggtgcccgccaccacacccagcttatttttgtattcttagtagagacagggtttcaccatgttggccagactggtcttgaactcttgacctcaggtgatccaccggcctcagcctcccaaagtgctaggattacaggcgtgagccaccatgcccggccgtgaattattattttcttccgggtctatcgaatgtcaaggaatttttaatgcatgactgttctccatggctcataattaaagaagggttagtcattagcagctggttctgtgtaaagcaagtcatatcctttatgacaaattatctcttggaaattttcatttagtcttaaccacctccatggccagacaagatgtcatcttggatcaagatacggaagaactggtgacacaacaaagtttgtaatggagcatgtcaatagttatactctttcatcaaacatgtgttcagagccagtgaagtgctggtcagcctaacagaattggaggcaggaaagtatgatttagctgtgtgcccagaaagaaaatgaaacagatttggctgaatacttattaatctctgcctcaacaactaggattatattcccatttcataggaaatggaggcactgagagaatgagtaacaagcctaaggccacataggtagaaaaaatgatataatcataatgtagttgtgtttcaaactcagtcctgttcagttcaataaacatttgtccagtcctcattctatgatatgtcctgtgaattggcattgagaatgcagccatgaaccccattgaagaactttatcagcttccagccaccaagacagaaaacccatctacaggaccactcatgccttctgccagccttcttggtaccatgggagaggtatagctcctcctaactaaggctactctttcccctgtgttttatttatttattttatttttattttattttattttactgagacagggtcttgctttgtctcccaggctggagtgcagtgatgtgatctcggctcactgcaacctccgcctcccgggttcaagtgattctcgtgcttcagcctcccgagtagctgggattacaggcacacagcaccatgcccagctaatttttgtggttttagtagagatagggtttcaccacgttggccaggctggtgtcaaactcctgacctcaagtgatctgcccacctcagcctcccaaagtgctgggattacaggtgtgagccacctcacccagcctcccctgtgttttagatcccaccctcataccctttattctccttgaaaaaaaaaaacaaaaaactttttattttgaaataattttacacttacaaaaaagttacaaaaatagtacagaattcacatatacccttcacccagcttcctctaatgttaaaaacatgcacaggcatagtacaatgatcaaaactatgaagttaacattactaaatcactaatcactataaactatataccttatttggattttgccagttttccccctaawgtccttttttttttttgagatggagtctcgctctgtcgcccaggctggagtgcagtggcgtgatctcggctcactgcaagctccgcytcccggttcacgccattctcctgcctcagcctccaaagtagctgggactacaggcacccaccaccacgcgtggctaattttttgtatttttagtagagacagggtttcgccatgttagtcaggatggtctggatctcctgacctcgtgatctgctcgccttggcctcccaaagttctgggattagaggggtgagccactgcaccctgccctttttctatttatttatttatttatttatttatttatttagagacagggtggtattgctctgttgcccaggctggagggcagtggcatgatcttggcttactgcaacctccacctcccaggttcaagtgattctcttgccttagcctcctgagtagtgggattacaggcctgcaccaccatgcctggctaacttttcgtatttttagtagagatgagttttcactatgttggtaatgtccttttcctgttccatgatccaatccagaatcccatattgcatttagttgttgtgtttccttagtcttctccaatctatgacaattcctcagtctttccttgtctttcataactttgacacttttttttggtaagacagagtctcgctctgtcacccaggctatagtgcagtatgtgatctcggctcactgcaacctccatttccccaggtcaagcaatccttccacctcatcctcccaaataactgaga

SEQ ID NO: 93373 - DNA, 12768 bp, Homo sapiens
accaagaacccaaaagaaaatgcatcaaaaacaaagataaatagacgagacaatttaaaaagcttatgcacagcaaaagaaataatcagcagagtaaacagacaacccacagactgggagaaaatcttcacaatctatccaaaaccccatctgtacgtcaccatcatcaaagaccaaaggtagataaaaccatgaagatggggaaaaaacagcacagaaaaactgaaaattctgaaaatcagagtgcctctcctccaaaggaacgcagctcctcaccagcaatggaacaaagctagacggagaatgactttgacaagttgagagaagaagtcttcagatgatcaaacttctctgagctaaaggaggaagttcgaacccatcacaaagaagctaaaaaccttgaaaacagattagatgaatggctaactggaataaccaatgtagagaagtacttaaatggcctaatggagctgaaaaccatggcatgagaactatatgatgaatgcacaagcttcagtagctgattcgatcaactggaagaaagggtatcagtgatggaagatcaaatgaatgaattgaagcgagaagagaagtttagagaaaaaagaataaaaagacacgaacaaagcctccaagaaatatgggactatgtgaaaagaccaaatctacgtctgataggtgtacctgaaagtgacggggagaatggaaccaagctggaaaacactcttcaggatattatccaggagaacttccccaacctagcaaggcaggccaatattcaaattcaggaaatacagagaatgccacaaagatactcctcgagaagagcaactccacaacacatcattgtcagattcaccaaagttgaaatgaaggaaaaaatattaagggcagccagacagaaaggtcgggttacccacaaagggaagcccatcagactaacagtggatctctcagcagaaactctacaagccaggagagagtggaggccaatattcaacattcttaaagaagagaatttccaacccagaatcacatatccagccaaactaagcttcataagtgaaggagaaataaatacyttacagacaagcaaatgctgagagattttgtcaccaccaggcctgccctaaaagagctcctgaaggaagcactaaacatggaaaggaacaaccggtaccagctgctgcaaaaacttgccaaattgtaaagaccgtcaaggctaggaagaaactgcatcaactaacgagcaaaatcaccagctaacatcataatgacaggatcaaattcacacataacagtattaaccttaaatgtaaatgggctaaatgctccaattaaaagacacagactggcaaattggatagagtcaaggcccatcagtgtgctgtattcaggagacccatctcacgtgcagagacacacataggctcaaaataaagggatggaggaagatctaccaagaaaatggaaaacaaaaacaggcagggattgcaatcctagtctcggataaaacagactttaaaccaacaaagatcaaaagagacaaagaaggacattacataatggtaaagggatcaattcaacaagaagagctatctatcctaaatatataggcacccaatacaggagcacccagattcataaagcaagtccttagagacctacaaagagacttagactcccacacaataataatgggagactttaacactccactgtcaacattagacagatcaacgagacagaaagttaacaaggatacccaggaattgaactcagctctgcaccaagtggacctaatagacatctacagaactctccaccccaaatcaacagaatatacattcttctcagcaccacatcgcacttattccaaaattgaccacatagttggaagtaaagcactcctcagcaaatgtaaaagaacacaaattataacaaactgtctctcagaccacagtgcaatcaaactagaactcaggattaagaaactcactcaaaactgctcaactacatggaaactgaacaacctgctcctgaatgactactgggtacataactaaatgaaggcagaaataaagatgttctttgaaaccaacaagaacaaagacacaacataccagaatctctgggacacatttaaagcagtgtgtagagagaaatttatagcactaaatgcccgcaagagaaagcaggatagatctaaaattcacaatctgtaaatatgacaaatgactaatatccagaatctacaaggaactcaaacaaatcagcaagaaaaaaaaacaatcccatcaaaaagtgggctaaggacatgaatagacaattctcaaaagaagatatacaaatggccaacaaacatatgaaaaaatgctctacatcactagttatcagggaaatgtaaatcaaaaccacaatgcaataccacctcactcctgcaaaatggccataatcaaaaaatcaaaaaaaaatagatgttggtgtggatgtggtgaaaagggaacacttttacactgttgatgggaatttaagatagtacaaccactatggaaaacgtgtggggattccttaaagaactaaaagtagatctaccatttgatgcagcaacctgggtatctactcagaggaaaagaagtcattctatgaaaaagatactcgcacacaccctcaaagcagcacaatttgcaattgcaaaaatatgaaaccagcccaaatactactcagtcataaaaaggaacaaaataatggcatttgcagcaagctgggtggaattggagaccattattataagtgaagtaactcagaaatgcaaaaccaaacatcgtatgttctcactcacaagtgggagctaaggtatgaggagtcaaaggcataagaatgatacaatgggccggatgcggtggctcacccatgtactcccagcactttgggaggccaaggcgggcagatcacacccaagaccagcctggccaatatggtgaaaacccgtctttactaaaaaacacaaaaattggccgggcgtggtggtgtgtgcctgtagtcccaactactcgggaggctgaggcaggagaatcactggaacccgggaggtgcaggttgcagtgagccaagattgtgccactgcactccagcctggcaacagggcgagactccatctcaaaaaaaaaaaaaaaagaatgaaagaatgatacaatggatcacccctgtaatcctaacactatgggaagccacggaaggcagatcgcttgaggtcaggagttcaagaccagcttggccatcatggtgaaaccctgtctctaattaaagaatacaaaaattaaccaggcatggtggcacatgactgtaattctagctactcgagaggctgaggtgggagaatcactttaacctcggaggtggaggttgcaatgaaccgagactgcactactgcatccagcctggatgacacagtgagaccctgtctcaaaaaaaaacagtaaaaacaaaaacatagtgcttgctgtcaaggagctctcagactactatggggaattagccaagtatatagatgaccaccatacagaattgtacaccaattgtatggaaacacagaggagtggatctaagccaaacttgggaggtcagggttgcctatgtgaagttaagtgatgcatagattcaatctaaaaaaatatgtagttattatgggcaaaagacagccataaaaatcacaaaagaaagtaccaaataactaataaacatatgaaaagatgctcaaatgagctagtttttagaaaatgcaaattaaaaccatgtggcctcgggaggcaggactacaaatccccttcaaaaaacaactttgaaactgaacaaaattgttaaaaacaaccatttcagggaactgggaatcaaccaaaggcaaataacatattaagaagcacttattcatgaaaaactgttgaaattcaggcaagaacagtgggagtctgtggcattcctccctgaggttgctcccatccctcccagagggtcagtatggtggttctaccaggaccacaggctgtgaaaccagcagccttactgccagagaggctcaactgatctgaagctgaaaatgaaaatatgccatccagcagcatcatcagtaaaagtagcaatctctgtagcaagcctgaggtagtagtcatcccagttggcacaagcaaccaaccaaccagcaccataataggaatagtaatagggagattctggaaatgaaggattacagagaagcttgagaaactacacacaaccctggcagccttccactcacatgtgtaggggaagctaaggggacccaagctgtccacacatcctggctgatgaggaggctttgtgtagacgcagaggacatggttgaaactaaaagacagggcagacttgaacactgcctaaacttcgaatgtgctccccaacccacacagaaccatcaggaagtggagaagcctactggctccaggtgtttgagcataacctctgaccaatcatcagcaattaagctatgcacaaatgtaacgttgagagaacaaagccaggctcaaaagaataatcttttttaagcaagagttttgcgtgcttagctaaggagactgaactatatcctgaataatgaagaatcactaaaggattttaaccagagagtaatggagtggaattgcattttataagatcaccttggcaggcttagaggcaggttggcagagggcaagattagagacaaagagcagaaataatgatagcctgaacaaaaagaatggtgatgggcaaggagggcagaggtaagccaacttgagagatttttaaagatggaataaattgatgtaatgatccattcagtatatgtattgaggcagaggaatgtaaaaccttcagggtcatggcctgagtcggaggttggtggagccatctagaaaaaaaaagaattcagaaggagcagtggatattgagggcaaaaaatgatcagctcagttttaatcatgttgagtttgagatttatagaactttaatccatgagactgcttacataattaaactttgtataaaatttattacttagaaaacgataagtagcatacagaaatatgggaacgcagtggtccaaagacctgggtttctatttcagttttagctccaagttggacaagtcaattgttaccttggtgctaagtttatttatttacttaaactatctttatgtaaaataaagaaaataagactgtcctatacactcacaggaacactgtgtgcataaaaagaatgctgtaaaactagaacacaagcaattgctgctatagtgcacaacttgttctggaagctttaatacaatatgaccaaaatgaagccataaatattggaaaagaaaccatattttcattatatcagatgacatggaaagcaccaaagaattactttttatactattagacctagtgttagttcagtaaggtaaccagttacaaaatatacctagtaaaatcaatatcttacctgcatatcagcaataaccttagaccttaaaatggggaaaacccagtctctctaaataaagctaaatctatcgctattttatcctatcatggatcgacttaaagaaattagttaattaattaattaaagccccattcaaaccgtgaatttcaaacttcactgaagactttaaaaagtgaacacctagcatgttcctaaaagggaagacaacattatagatacataatttcactccaaatttataaatttaaaaggacagccatcaaaatcccaattggaaaacatagcaacacttatttatctaattaagagtacaggtaccaaaacgaaattccccacatatgaggggaattagccaaaataatcacaattgtattaaggaagtgaaataattggttatttttcccctccatttttacagatattcataatcagaattttgtctgtacttggaaacattctccaagaccttgaggacaagaaatataagaaagcggctttgcagatgacgccgccgaggaaaactgtgtrctattagccatggtcaaccccaccgtgttcttcgacattgccgtcgatggcgagcccttgggccgcgtctcctttgagctgttagctgacaaggtcccaaagacagcagaaaattttcatgctctgagcactggagagaaaggatttggttataagggttcctgctttcacagaattattccagggtttatgtgtcagggtggtgacttcacacgccataatggcactagtggcaagtccatctatggggagaaatttgaagatgagaacttcatcctaaagcatacaggtcctggcatcttgtccatggcaaatgctggacccaacacaaatggctcccagtttttcatctgcactgccaagactgagtggttggatggcatgcatgtgatctgtggcaaagtgaaagaaggcatgaatattgtggaggtcatggagtgctttgggtccaggaatggcaagaccagcaagaagatcaccattgctgactgtggacaactcgaataagtttgacttgtgttttatcttaaccaccagaccattccttctgtagctcaggagagcacccctccatcccatttgctcgcagtatcctagaatctttgtgctctcgctgcagttccctttgggttccatgttttccttgttccctcccatgcctagctggattgcagagttaagtttatgattatgaaataaaaactaaataacaaaaaatatatatatataagaaaactctttctgagttaaagatgaaattaactcatcatagatcagaggatataggcaaattaccttaacgagaaaaaaaatggttccctagcctgcaagatttaactggaactcaatggcaaccaaaagagcaattaatcagtaattaatactttaaaaaattagatcagtgaaacaaacatcagcagtgtccactacactgttcaggagaaagagtcttttaaccgtacaccctttaaacaatttggcctcaatggtaagactacccatactgtggagcaagatgtactaatgccacgtttagattatgccattaaatattccatttatgcaactatgagaaaaaatttgaactcattctaggttcatacgattatggttttgttcacctacaaaacaaaaatgagctatcatgctgagatggtgatttcagttcatttgacaattctacttattataaattaatacatttgattctgatatacatccaatcatatataaatgtaataaacaaataaaatatatatgtctagtatatataagtcagattagatatagacataatctgtcctttgacactgtttaatgtgagtctgtttttgggagacagctccattccattccatctgaacccaaaaagctgagggtcagatcctgggcttgataaactcaccagtgtaaagataacttcctacaaggctttttgaaatacagctgaactaaaacatcactgttaaccaggcatgtgctcttatttgttaaacttgcacaattactatcattttaaaatttttcatttataaatttgtgaagtattatagctttccttctcagatagttttgataatctttaaaaatagtattcaaaggtatttaattcacaagtgatacaacctgttcttcttgaaattattgcttaagatttgcatatgcttaagtgacaaatcataacactcaataaattatgaatggaaaaatctagtataactgactaggatttagtgtttattacaaaaacacagcctactgctccaagtgcatttttctcctaatctcctaaggtaaagaaaaaaaaatctactctagcttcatcaagagattatatgaatgcaatatatttaatctttatctagtgacatctggagctagaaatgatatttcattaactcacagcagatgacttaaacaaatacagtattacactaaaaccacagcagtaacatgctcatgacccccctaaaaaggattaataaggagatatggaaagatctataaggtaaactggaagaataaatgttagtcaaaaagtatttcacaacaacaaatgtatttatttgtcactcaaataaagcaatattattcttaaaaaacctgtgagaaatatctatttcttttagtgaaccttaaaattgtaactaaattttaggaaagaatctatataagcatattgtctttataaagattaaaattttaagtggatacttaatatttcacctttgaagtaaaaataaataattatttccaacaaatatatatatgtgtgtgcatatatatatatgacacaaaagtaaatgggtaggcaaagtaaagtaattgtatttaaaaatatgaattccagcctgtcacagtggttcatggctgtaatcgttaacactttgggaggcccaggcaggaggatcacttgagcccaggagtttgataccagcatgggcaatacagtgagacctcatctctacaaaaaaattacaaaattagccaactgtggtggtatacacctatagtcccagctacacaggcggctgaggtgggaagatcacttgagcccagtaggcggagactgcagtgaaccgaaattgcactgttgcactccagcctgggtgacagagcaaggccctgtctcaaataaaataaaatatgaattctattacttactctctaatttgattatattctgatagaaatattcagttgggtttatattagcaaatgtgagacatggtgaaaactactcttgtcaaatacacatggaaagcatttttaatactgtttaataatgtatttcagaaataaaaatgtaatctcctaatagaacgaggctatgtaattcaagaagtcatcatctaatagaaattcactccaaattctctctttagctgtttccttcataaaattgtaaatcaaaatttgtagaaataatgaatgaaccttgaggacattatgctaaatgaaataagccagtcattaaaagacaaatactgtgggaggctgaggtgggcagatcacgaggtcaagagatcaagaccaccttggccaacatggtaaaaccccatctctactaaaaatacaaaaattagctgggcatggtggcacgcacctgtagccccagctactcgggaggctgaggcaggagaatcacttgaacctaggaggcagaggttgcagtgagccgagatcatgccaccgcattccagcctggtgacagagcgagactctgtctcaaaaaataaaataaaataaatacaaatactgtatgattctacttacctgagataactagagtaatcaaattcataaagatagaaagtagaaggggagttgccaggggctgtggggattctggagtttggttgcacaacaatatgaatgcacttaacactaccgtactgtatacttaaagtggttaagatggtaaatttacattatgtgcattttaccacaatttttaaaactatataaaaatttatagaaacaatatttcatggctttagagtcttttcttgaattcattcattaattttaatatataattataaacgtacagagcacacatgaacagcctataatttgaatacatatggggaaaataaagaaagctaagttaattaggttgaaatatattacatcacttcatatatgccacagatgctttgaaacaccatctctggctgtgagtcgataattgtggaagctaggtgatgggtatgcgggaattcattatactattctctttacttttgtatgcttgaaatgtttcataataagacatttaaaaataaagatctgctgtgcaaataaacaaagtaagaaattcagcaggacaacaaaaatgatgggaaggtccatggtgggctttgtactcagagatgaaatacagtaaaatatggagatttttagaatccattttaaaaatatgaatttaatgtattagcataatggcaaagggttttaaggaaagtaatatgaaagagaaaagctactgaaaagaagaaatcataaaaatcagtttaaatttatactcagaataaaatgaaatttaaaatttttactatatataaattagcaaacaagccctttcaataagcggttcctaaactgtaatggagataaaatatttctggtatgttgccacgtatacttcaaattataatcaagtatgtttagaagagacaagggattaacagagagaagaggctctttaattcttctgaaagactaacacacaaaatgatctagtattaattgtataaaatataatctcaagaaagtaggatattttgttttcaatctgaacgttctctcttcctgtttctgctatacaaaagtgagagaaggaagctgaaaatctataggaaattattttatcaatcacttatgaaaggtggaatcacagaactgaaaactgagatcctaaactgaaacacaaaaatcaaacaaaacaaaatttctagaaagcaaggtagagtttcaatgttgcacaaatcccaaaaagaataattataaatgtgcggtggctcacgcctgtaatcccagcactttgggaggcacaggcaggcggatcacccgaggtcaggagttcaagactagcctggccaacatggtgaaaccccgtctctattaaaaatataaaaactagctgggcgtggtggtggatgcctgtaatcccagctactcgggaggctgaggcaggagaattgcctgaacctaggagacagaggttgcagtgagccgacacagtgccactgcactccagcctcggcgaaagagtgagactctatctcaaaaaacaaaacaaaagaaaacaagaataattataaattaagtttagaaaacatgagtaaattgttgtgagacaaaaggaagcatatatgtaacatacaaaaaaagtaaagagaatagtaccaaaatcaaacccataaacacatcatccatattcaacacatttgaagattttgccacatttgcttcatctatccctatttatttggttgtttttgttttatttagctatactccttggtatcattttatacatgagtccataatcaaatatcactaatcaactcaaaaaaagtccttttacagttgatttgtttgagtcagggtccagataagttcaaatattacattagggtatatctcttgaatttcttttaatctagggtagtgctactcaagtgtgatttttcaattggtgccattttgagaattaattgttaccagtccaaaaactgtttactggtcctcaactctttgttacgggtcaacaagataaatacagaaaaggaaagtgagcacttagaaacgttcatagcaagttgacactgtcaagacatccaagtgcatgatgagtggactcatctcactgaaccagctggcagtcgtcagactcaccgtgagtcacacgtgacctgaactgcatactcgtcatgcaccctaggaccacttactggttgctgcctggataggatattaaaaaacaaacaaacaacaaaaacaaaaaacccagtgtttaatcctagaaatttgagacacagtccttctcctcacttctttatcctaacattgactttttgaagaaatagggtcaggtgtcctttagattcatggattgttgtgtttgcttcccatagtgtcaattaccttggttctccatctcctgatttcctataactgattctattcagattcaacttcggggacgcaaatacttcatacagggtactctgtgattcatgttataaaacttcagaaagtgtatcatatctggttcccccatttttagtaatgcaaagactgatcactaggctcaggtagtaatagctcaatctctcctttgtaaattccccctcaacctttcatctaactgtttcatccaccaattattgttgcctaattcatttcattaggggcttaaagtgataattttttaattttaccatacttttttttttgagacggagtcttgttctgggcgacagagcaggctggaatgcagtagcacaatctcggctcactgcaacctccacctcccggcttcaagtgattctcctgtctcagtagctgggattacaggtgcccccactacaatgaccagctactttttgtattttgagtagagatgggatttcaccatattggtcaggctagtctcaaactcctgacctcaagtgatccgcctgccttggcctcccaaagtgctgcgattacaggcatgagccaccattcccagcctctactatccttttatatttattagataaaattgtgggagaaggactttccctcatcaaatcaggctatttggttaccatgaaataggtcatgtaagaaaaaggtaatacttatttctttccatttgattaccaatgttcataccaaggagttgatgtcctataaacttccaatgatgttcaatgggttggattggaaggctattctgctctttttctctctaacattatgaatacatggttttttaagatacatgtgtttcaaacaattacatccattgttatttatggtactcaaattgtcttatctttgaccaatggaagcctcttaatgttaattcttaggtccttttaacaagaccacactagctaacttgtctttgatttctttgcattctggttagtcaataagaaaacccaggctcagtttgtacacttcttccctcagacctggagtttgtacacttcttccctcagacctggagtc

SEQ ID NO: 93374 - DNA, 16251 bp, Homo sapiens
taggtatatacacaaaagaattaaaagtagggactcaaacaggtatttgtacacccatgttcatagcagcattattcactacagccaacaacccaaatgtccatcaacagatgaatggtacacaaaatgtggtgttctacatacaagggaatattattccttccttaaaaaggaaggaaattttgacaagtgctaccacatggatgaaccctaaggacataggccaagtgaaataaggcagtaacacaaagacaaatattatatgattccacttgtagtaagtacctagagtagacaaagtcttagagatagaaagtagaatgtaatagaggctacctggagctgggagaaaggagaatgaggaattagtgtttcacggttgcggttgcagtttgggatgatgaatatggtctggggacggacagtggagatggctccacagcattgtgaatgcacttaatgccagtcgatcacacactacttaaaaatggttaaaatggtaaagttcatgttacatatgttttactccctccccctcccctccaaaaaacaaaacactattggcaaaggggtagcaggtgaggggcaggctggtctggtccttgtgactgcgaacatccctgctgcccgttttttgtctgaagcccggctgggtcgctggagatccagcggagtgtgcggagggaggcgtgttggataccttttaaaaatgagaagccccaggccgggcgcggtgactcacgactgtaagtcgcggcccaaccctttgggaggccgaggcaggtggatcacttgaggtcaggagttcgagacaagcctggccaaaatggtgaactcctgtttaaaaaaaaaaaaaaaaaaaaaaattagcagggcgtggtggcaggagcctgtaatcccagctactcgggaggctgagacagaagaatcgcttgaacccgggaggcggaggttgcagtgagcccagatcgtgccaatgcactccagcctgggcgacaagagcgagactccgtctcaacaacaacaacaaaaaaaaattagaagcccctggggacggagagcattaggacaaatacctaatgcatatggggcttaaaacctagatgatgggttgataggtgcagcaaaccaccagggcacatgcatacatatgtaacaaacctgcacgttctgcacatgtatcttggaacttaaagtaacaaaataaaataaaataaaataaaaataaaaattagaagcccgagagagggaaaacagcttaggaaggggttgcccccgccactccgcaggctgcagagggaagagaaagcgcccccgtggcgcccccagggccgtgcagcccagacctagccccgcagccccacataccccagcacctccgaagctgcgtgcagagccgctcgctcccacctccggctgcacccgcgcgcccccttgcggcggattccgctctggcgcatagccccactggagcgctggcgcgttggcgatggggtcccaggtgggagagagatctgtccgctgaacctgcgcatcccggcccctgcggaggctgcagagattctgccctttctgttcggagggaagagagagggcgccagggagacataagctagatttttattaatagataactttatttgaaaattatctttaaacgaaagagcaaggggaaaaatggattctatcctttgccgcactactaaaaagtaacttccattcaacttatttcaaaagagaacgtcgatattgatatgcaatacttttaattgttttaaaatatttaattgtgtgcaataatttttttaactgctcagttccaaagctggaagttgaagtgatgtttttgacagggaagactgaagaagagaccccattgcatcttcatcggagctggaggacaaaaaaaaaattcttaggacacttaacatggagagtttgagatccggatacagcgtgggctgtaactaagggcagtggaagcaggcagccttggctaggatgccgctgctcctcatgacattttgtctcacaaacttagcaagttcttagaaagtccaaaacgccatatgtgttgcctaattttcttatatgatcacaggaaataaataggaaaaatgcagataatttgcattttatttgataatttttaaataaaagttacttgttaataaaatttcaggtaggatgctccctgagtttcttctgtacaatatcattcattgaccagatatttgaagaaaagttattctttgtttttttgagagcaggtactgtttattaactgaccagcttagaaaaataatcatggtagacaccttagttcattattctaataagctgttgatctggtcctccctgttgccagcatctccaccttctacaaaatgggtggtctttttcttctttccacctcatggagaagataatttgaaggaccacaggaagttatttgcttcttcgaagcattttccaacagtatagatctcatgaatcagatcttccgtgcagatgatgccatatttaccaagcgttcgagcaatcaaagcgttatctgtcaaagcaattcgcttcttattgattttgccataaccccgcttgtagattagtttatttactgacttcagatttgggtaccccctgcaatatatggttctacaatccccagcatgttaattgaaaccttgttaagcttcacaaagtttccactgaagatttgacgaaggcgaagaagctgcaacacctttcggacctttgggctcacaccactgatacctctgatcctgatgacaaatgccaatttgggttctgcaggtacatagaagttgccggctttgcttgccatccttgccattcaaatttaagttccgtatatctgtctatattccttgtgatagtgcttcgctttttcatagataagcttcctccttgcctttcgaagcatcttttgggcaaacttctttctcaggcatttgatcttcagctctgtgaaatttcttcgctttttcttaagggtttctggtacagcaggaaactttttcttcttctctttgacactctccatggttccagcgggaaaagaggaactattcctttattattaaaagatgaaatctgcaatatccagcaaacattactttccctactggatctttaaattattagtcccatgttcctctgataaaaattcactaagcctttatgtcctgggtgctgaataaaccctgcatttactttcaagaagaaacctacctttcttaacctggaggtagattgctgctcataagtgacagatggagtactgtaaatccccgagggtgattctagctcttgacccagtaggatatttactgtcaacgatgcctagatttagaaagaggatgtaaacgtggtgtgacaccagacagggcaaagagcaactgcttgtggaaaacacacatgcatccgtcatcactgcagatgaggaggaaaaggaggacaaggagtgaatttgaaaagcaggataacttagtgtaggtctgagtgcccaagatcaaacctgactccaccctcactgccttatgtgatcccgagaaattactcaaaatatctgtaccaacgtttcctcaggctgaaagtaggaagtagcacctttttcatagagttgttggaaagattaaaaatagtaaatgtcatctctgtcaaaaccttgatactagtgtatttctgttcactgaatggtttgtacccctttagtttccttgatatacgttgattaaaaaaaaaaaaaaatttgactgggcccggtggctcacgcctgtaatcccagcactttgggaggtagaggcaggcagatcacctgaggccaggagtttcagaccagcctggctaatgtggcgaaaccccgtctctactaaaactacaaaaattatgtgggcctggtggcacatgcctgtaatcccagctactcgggaagctgaggcagggaggcagaggttgcagtgagccgagattgcatcactacactccagcctggcctacagagcaagactctgtctcaaaaaaagaaaaaaaaaatcaacaaaattgattaaaatgtctaattggcttttattagtgactcataaaacaggcagttgctaatcaaaatagagggagcttcaatgagcctggcagaccagttggttttcctaaggtagcttgaacagaaatagggaaacaggaatacaaaaagtgaattggttaacatcagtttacttcaggttactttacttataaagggttaaagcagagaggacttccttaacatgctgacttaggctgactgggccctttctgattgcttgctgtgaatctcttgtttttacgaaaagccagtctattttgggaattttcccgtttacgtttcagtttgattacagttcgattacttagcacgagcgaccccattttggttcaatctgttgcgacctaatgcaggggctcagttcaaaaccatggcctctcatacattttatttaacaacacaaagaaaagagtttttgttctgaagccaattttcttgcggctattgataaatcgatyataacagaactaaaaaatatattcaataaacaagtacaagattaaagaattgtctaaacaatgtaatgtaataagcaaaataaatccaaatcacttgatttaggattagggtaaggtgttccttatggctccacagtttgtttttaagtattacctattaagtagatgtctcactctaatctctgccttcagtgaatattataaattttaattttattaaattcacacttaaatgatgcttttaaaattatctttgggtcgggcacagtggctcacgactataattccaacactgtgggaggctgaggcaagaggattacttgagcccaggagcatgggcaacaaagtgagactctgactctaccaaaaacattttatttaattagccaggcatggtagcacaggcctgtagtcccagctactcaggaagtgaggtgggaggatcgcttgagcctgagaggtcaaggctgcagtgagtcatgatcatgccactgcactctaacctggacaacagagcgagaccctgtctcaaaataaaaatgaaaataaaattatctttgaactaaaataaatgatgctttaggcaagtgaaattgtcgaaactctgaaaataggatgtacgtatagttgatgtatttgtttagcccagtttatcatgtaaacaacaggttagtatacccaagtttcagaaacactttgggggttcattaatttttggttacctttaagattttcttaacctcttacatgaatatttgtgtcagggccaggctctgtggctcatgcctttaattccagcactttgggaggccaaagcaggaggatcgcttgagcccaggaattcgagaccagcttgggaacgtagtgagactccttatcactacaaaaaatttaaaattatttgggcatgttggtacattcctgtagtccagctactataggggctgagagatgggaggatcacttgagctaggaggctatggctgcagtgactgtgattgcactactgcactccagcctgggtggcaaagtgagaccctgtctcaaaaagaaaaaaaggagtaggaaattagtgtgtctagggccggagctcttaggcaaactggtgaagccccttctcagaataatgcttttaacgcctaaaataaaaaatgagattgtaaatgagaaactaaaaattagcttggactttaatctgccctcgtattcattagcctggactgataaaaccagcctcaaaattaccagaaaacagtacttctctcaaaccacagtaaatcataaagtgtcataacaacctcctttcttttctacttaattttttttttttttgccaagtcctttatggaagttgttgtgcgtgtctctgttgtctttgtggaaggccagagccacacggtcctaagagctgggaaccaggaagcataggctgatctgaagaagacacttcaatcatgggtgatattaaaaattttctgtatgcctggtgaggcaaaaggaagatgactccatcctatgaaattagagcattggggaacaaaagtaggcagaaattcttgtgtgaggttcaggtggaagggtataattacagtggcataggaaattccaccaataaaaaagatgcacagagcaatgctgccagagactttgttaactatttggttcaaataaatgaagagtgaagaagttccagctttttggggttgcatctctgcccccacttactgatattcctgacactacagcaaatgctgaaggaggtttaccaacaaccatgggaggtcctcttscgccacatctggctctcaaagctgaaaataattctgaggtaggggcctctggctatggtgttcctgggaccaaggagccaacttgaaggattactactcaagaaaggaagaacaagaagtgcaagcgactctagagtcagaagaagtggatttaaatgctgggcttcatggaaactggaccttggaaaatgctaaaactcatctaaaccaatattttcagaaagaaaaaatccaaggagaatataagtacacccaagtgggtcctgatcacaacaggagctttactgcagaaataaccatttacatcaagcagctgggcagaaggatttctgcacatgaacatggatcaaataagaaattggcagcacagtcctgtgccctgtcactagtcagacaactctaccatcttggagtggttgaagcttacwtcagacttacaaagaaggaaggagagagagtggaaccttacaaagtaaacctctctcaagatttagagcatcagccacaaaacatcatttgagagctaaattttgagattatgcccccgcctgaagatccttctatgccagttgcactcaacattggcaaattggctcactttgaaccatctcrgtgacaaaaccaagtgggtatagttcctcggtcacctccacaatccagatggaatccytggactactagcgacattgctgagggacctctggcttttgcttctccagagcaaataagcttggacctcaagaatgaattggtgtaccagttggaacaggatcatgatttgccagcaatcttgcaggagcgagagttactgcctgtgaagaaatttgaaagtgagattctggaagcaatcagtcaaaattcagttgtcattattagaggggctgctggatgtggtaaaaccacgcaggttccccagttcattctagatgactttatccagaatgactgacagcagagtgtaacattgtagtaactcagcccagaagaatcagtgtagtttccatggcagagtgagttgcatttgagagaggagaagagtctgtaaaaagctgtggttacagtgttcaatttgagtctrtacttccttgtcctcatgccagtataatgctttgtactgtaggtgtgctcctaagaaaattagaagcaggcatttgaggaatcagtcatgtaattgtagatgaaatacatggaagagacattaatactgacttccttttggtagtactgcgtgaagttgtttcagcttaccctgaagttctcattgttcttatgtccacttctattgataccagcatgttgtgtgaatatttcttcaattgccccatcatttaagtgtatgggaggacttacccagttcaagaatattttctggaagactgcattcagatgacycactttgttccttcaccgaaaaccaagaagaaggacaaggatgatgatggtggtgaggatgatgatgcaaattgcaacttgatctgtggtgatgaatatggtccagaaacaaggatgagcatgtctcaattgaatgaaaaagaaactccttttgaactcgtcgaagctctctttaagtacattgaaacccttaatattcccagagctgtgttggtatttttgcctggctggaatttgatttatactatgcagaagcatttggaaatgaatccacattttggaagccatcagtatcagattctacctctgcattctcagattccttgacaggaacagcgcaaagtgtttgatccagtaccagttggagtaaccaaggttattttgtccacaaatattgctgaaacaagcattatcataaytgatgtttatgtcgttgactcctgcaagcagaaagtgaaactctttgctactcacaacaatatgaccaactatgctrcagtatggggatcaaaaacaaaccttgaacagyggaaagggcaacctggccraatacggcctggattctgctttcacctctgcagccgagctcgttttgagagacttgaaacccacatgacaccagagatgttccaaacaccattgcatgaagttgctcttagcataaaacttccatgtctagttggaattggccagtttctggccaaagcaattgaaactctccctttggatgctgtgattgaagcagaacacactcttagagagcttgatgcattagatgccaatgatgatttgactccattgggacgaatcctggctaacctcctcattgagcctcgttttggcaaaatgatgataatggtgtgtattttctatgtgggagatgctatctgtaccattcctgctgctacctgctttccagagccttttrtaaatgaaggaaagtggctgggctacaaccattgaaattttgctggaaacggattttctcatcatgtagcccttttatcagtattccaagccggagatgatactagaatgggtggagaagaagcagaaatacgtttttgtgcgcacaaaagacttcatatggctacactaagaatgacttgggaagtcaaagttcagctcaaagagattctgattaattctgggtttccagaagattgtttggtgacacaagtgtttactaacactggaccagataataatttggatgttgttatctctcttcctggcctttggtgtgtaccccaatgtatgctatcataaggaaaagacaaagattctcaccactgaagggtgtaatgcacttatccacaaatcatctgttaattgtccttttagtagccaagacatgaagtacccatctcccttctttgcatttggtgaaaagattcgaactcgagccatctctgctaaaggcatgactttagtcaccccactacagttgcttctctttgcctccaagaaagtccaatctgatgggcagattgtgcttgcagatgactggattaaactgcaaatatctcatgaagctgctgcctgcatcaccgctctccaggcagccactgaggctctggttgttgaagtaaccaaacaacctgctatcatcagccagttggaccccgtaaatgaaagtatactgaacatgatccgtcaaatctctagaccctcagctgctgatatcaaccttatgattggcagtacatggtatggagatggtccaggtcctcctaagatggcccaatatgacaatggaagcggatatagaaggggaggttctagttatggcagtgaaggctatggcagtggctatagcagtggaggctatcgtagcggaggctatggtggcagctccagctcctgtcgggcaggatatggtgcaggtgttggtggaggstatagagaagtttcctgaggtggctatagaggcaactctggaggagattacagagggcctagtagaggctacagatgatctgggggattccagcgaggaggtggtaggggggcctatggaactggctactttggacaaggaagagaaggtggcatctgttaaggcttggttatgtcagttcctgtgtgtagacagtaagaaaaaaaaagccatgctatgtgtgacatttttttccaatgtttatttcccaccaaaaagtaaatgcattttaacccattctgtggttcactgtagcttaaggaaaccaagcatatagatgcattagtgattttgtttatattatgtaaaatgtaacgatctatcttagaaataccacagtttgtatttttctttaaggagtaaagatttgtctttaaaaataacttgatattttcctggctttcatttaatacaatggaaaataaagtattacacgaaaaaaaaattttttcttagagacagtatctcattatgttacccaggctgaagtgcagtggctattcacaggcacgattatagctcactatagcctcaaagtcctgggttcaagcctcctgagtagctagaacttcaggtacatgccaccttgcctggcttcctgctttcttattcactaagaaactttgttctctaaaatcatagattagagacaacttcgtgtttgaaattacatcagtaacaataaaatatcccacctttgcttgaaggacctcagtcattccacacagagaattggcctcaatttacaacccagatgtcaagcttctgataaggggtttccagacacaaaactccatcgctattttaacttcatagtctccaaggaaataggcccttcatccactttgcagtctagacctagagcctgtgtgttgatggcagcagcaggccgtctggagcagccactaccatcattgacatacagccttgttttgctttgagtctaccaaaatactgcttatttaaatttcatctcaactccacacttccccagaatcctatcactctatctggggagatgccatgtggtccaggcagtcttaggctgaatgggcaaggatccaagggaaaccaattagattgaaattcagttctgtctgtgggccctcaagatttaaaagccatggacaagggggaagcaaccagtatcgaccagcgataatctatgagcaccttcagcttggggtgtggggtcatagacaaaaagaatggggtttaatcagtgttcccatccaaggcaaaaccagaccagaagaatgggagctaccaggaggctgagttaagaccaatactagggccaggcatggtgactacagcctgtaatcccagcacttttggaggccgaggcaggtggattacttgaggtcaggagttcgagaccagcctggccaacatggtgaaacctcgtctctaccaaaaaaaaaaaaaaaaattacaactggcacacacttgtacccagccactagggaggctgaggcaggagaattgcttgaacccgggaggcggaggttgcagtgagccgaaatcacatcactgcactccaggctgggtgacagaaggagactccgtctccaaaaaaataaaaaataaaaaccaatactaggaagtgctttcttaccatgaaagctccctgcacacagaatgaagagacagatggcagaagcaagaccagaggcctccaccactgaacaaggtcaacctgaatttgtttttgtagctctgggaagtcctgaactgaatgggaggttctactgtggccctctactaacagtagatggaacctggaaccatctactgttaattgtccttttagtagccaagacatgaagtacctatctcccttctttgtatttggtgaaaagatttgaactcgagccatctctgctaaaggcatgactttagtcaccccactgcagttgcttctctttgcctccaagaaagtccaatctgatgggcagattgtgcttgcagatgactggattaaactgcaaatatctcatgaagctgctgcctgcatcaccgctctccaggcagccacggaggctctggttgttgaggccatctactgtggccctcatacatcatactgtgtatggttccaggatttgtaaatgctctaatcaatgtttttttttttttttaaagctgttcctgctgattgctttttaagctaggctcaagtgtggggccacggaatccttcaggtgcccttcaaatcagacattacatttcagctctcagggctagaatgcttccccctcttatcttgggcaggtctttgaagaagccagtttagccttggtaattttgaatttggccatagtatacggaggagagctaggtagctatcaaaacgcttagacaaacgtatggtaaaatgcagcccagcctgaacctccgcaaaacccccaaacctggagcagcaagtgggcaaaggagtgtgtgtttggggcagggtactgagtcccatatgtaatcaagagacctggagggcccaaggaagtcagtgacacccccacaagctacatatcctccaatggattgtggtggtcatctccggctaccgaagccaccttgcttattcccataggcttacaaacattatgatgcttcacacgagttgtgggtgaagtgaaggaattggaaagtcccggtctaaggccctgcaaaactgctgtctggtaaaaacaagtgactatggcaaggccctgaatgtactacgtatagacttaagtcagtatttgtgcctaacagcaaagcatgccacaagaggctcctcaaaagccgggtaattgatgccattgttttcttgacctagttgaagagtcaaagaagagaaggtgatgcagaaacttctttccagtgaagtgacagatccaagcaaggaacacctgcctgtgaggggagcggtaggggagggtagattcggcagcactcgggtagtggcagggaccacatattgtcggtgttaaccactgttatcattggcccaggtcgagtgaggacgagtcatttccccactaagcacttggggagtggcagggaccacatattgtcagtgttaaccactgttatgactggcccaggtcgggtgacgacgagccatttccgcactattgtcccttcttcctcactgcacccccagccctgcaccctcagctccaaatacacattctcgttcactcaacgtttgttgacacctagcgtgggccctgtgggatggggtaaaagttcggtgttgggaggagccccggtgacagatttttggttttggtggtggcttttgggcaaggacaggtcagttcataaaagatgacgccccaggtctggatcgaattctcctgggagccagaccaaagcaccttcctggactgcaaagtgtggaagccgccgcgggccgggcgcggggaggtgtcatgcgccggaacctgcgcttggggccaagctctggagctgacgcgcaggggcaaggcgccccgcgtcccggactggcggctccgcgcatgctcctcccaccggcgtcgcaggcctcgagaggctccggaagtactgggtgcagcctgatggcgcaggaggtagacacggcacagggcgccgagatgcggcggggcgcgggcgcggctcggggacgcgcttcctgrtgctgggccctggcgctgctttggctcgcggtggttccgggctggtcccgggtctcgggcatcccctcccggcgccactggccggtgccctacaagtgagtgcggcggcgcgcgcactgtcggggttggggtcggcgttgacgatgggggatggggtgctggggcggggacccctgctcaccgtggtttgtgtcgggtcacgagatggtgcggggacagcgccgggtgacgctcggagcgcacttgagagcaaagttgaggactggggagtcgcagccgctcgttacgtgcagccctgggacctttcgtcccctctggtcacttgcggcagaytcaggacagtcctgaatcgtggaagaagaaaaggagagtaatgttatttaatggagggacttctgggtacaagtagctgatttcttgagtagtttaaaaacactgtctatcgcatttatttatatcatgcactgtcgttagttattaccgcggaacatttggtacaatttactgggcgaccaactcgctctggtttgaacctgatcagaacctgatccgaagtccttattgggacttcccagttttgccctcaaaagtcgcgcatcccgggaatccccgtctcctgcagtcctggttagaccgggaagattgtcaccgcttttgtccagtcttcagcctggaggtaggacgccggtcctaagtcggggacagagcccgcacacctgggaggtcgattccagcctttgacagagaagacacagcctccggcggtcagagatagctaaacacagagaaagaaaacatggtgtcaacatcaggcaggagaaagaccagcagtttttgaaaacagctatttttctttaaaccaaaagcatcattggacataattttaacttactagcataagtaatcaacagctaaaactgcacacaacaaacctgaaaaaaacagctattttgtatgacagtatgagtgggaaggagttctgcctgctgcgggtcaaatctggctctgtcatcaccagggatcttgggaaagttactcagaatctctgtgcccacatgccctgagtcaaaaaataggaatagtggtagcacgtacctcataggtttgctggaaggattaaatctagtaaaatgccagctgttgtcaaacctagatagtgtattctgctcactgaaatgtttacaacacttttttgttttgtgtgatatactacgtggaaagagaagtttgtggttgaagctagttttctggaaaatgttaataataaaatgtttgtaagaagtcaaaattactcaatagaacaagaattgtaaatccaaacgatttgatttaacattagggcaaggtgttgactatggctttttagtggattttttttttaagtctcagatattaagtacgtgctcccatctaattccctcaattgaatataatatttaagtttattaagttcacacttaaattacctttgaactaaaatagattttgctgtgtcagtgaaatctccatgtgattatgtatttgtttaaaccaggtaagtgcctataaaacactgtacccaagtagcagaaacttttgggagcgtcgttaatagtttcgattagcataaagattttaacttcttaagttaaaatagaaatttttgttgatttgttaagatttgttagatctggctacaaccttggggatctaggattcttagatagaagctgttgtcgccaccacttctttctttcccagtgccagattataggtgaccagtgtgtctgttgagctgaattcagctgcagtgcccctcgagtcctattgctgtggccttctccggtcttcttttcttgcctgcattgttgaggtcaccttctaactgatctctcatgttttatttggcctctctccataccctcttttaattcgtgaaataaggtttactttatagcaaattcagtcctgtcagatctgctacttaacatcctttaagtttagccctccccaattataaggcagggaattccatgcacattctcctagtgacaaaatgacagcccctgccagtctcttccgtctccattcctgcgtcgaggcctgaaatccagtcttccgtacctaccggagaccaaatgtgccaggcttgtcttacaatacttaacatttcctctgcctttctgtcttaaccttctaatcaactacattaaaaacctaggcccggccttcatctctttctttgccctccccaccccattcatcccatacctggttaacaatgatttgtccttcctgtgtgcccataggactcattcctttagtctagcacataccacactcattacttgttcagtgtctttccagctcccacccacagttccatgagaaagggaacagtgttttaatttttgtttccctccttcttactatagttcactatatatgtagtggagcctcaataaatattggttgaatgaatgttaattcgtaagtaaatataaaatgtattctgttactcataattatctgaataatcttaatgtatggactgtttgtaaaattgaacacattggaaaaatgttcatttattctgtaaacatttgcaaatgtctactatgatctggagctataaaaattttaagacaaaattcctgtcttcaaaattttcacagtgggatcagggaacagggaagcccgtatttatcagagtgcttttagtttatcatttgctattaaaaacattattggaagtttgttcacaagataacaaaatgtgtgtttatatttattaactatggtccgacctttgaatggtcccctaaaaatgttactggattctaaaagacgtgagaagaatcagattcattttagaatctaagtagatggtttctttttctttattaggcgctttgacttccgtccaaaacctgatccttattgtcaa

SEQ ID NO: 93375 - DNA, 13079 bp, Homo sapiens
tagaaaaacaccctcaggcatacaggggtccacctaggaaacataccaaactcttcctcttctttaaaaaaatagctaaataccaactacagtcagatgagtgataaatcagaataaaaagctgtgagttgtagtataaaaagactagcagtaaataccgcaggccgtcaaaggcaaaaataatggcatacatggatacaaaatcaaatacataaatctagaaattttctttaaagatgtgaaaagtaaaagaataataatttagcaataatctggatccccaaactcagtaggaagaacaagggtgggaggaggggtagtgaagtgtagcagagaatggaaaataaagtaaaataatgctaaaaaaaatcttatacaggagagtcgcagggagatcgataactaaattatctcatcttcaatgaaatatagactgagggaagtttgtaaaaaatgaagagttcagcaatatgaaatttcaagcaggatgtgagccctacaaatcactgaaggaaacaacaaaatatgccccagatagcaaaatactgaaaacaaaatattaataataatttaaaagctgaaagtataaaacataatataagtaaacacaaacatattagtgatcagagaaataaattttaaataatgaggtatacataaataaattagactctgtagtggctgtttcagtcgatatgcctactcttaaggttgagtgcccattcccttacatacttggccaaattttcagagattgttaacatccgatatggacaagtacataagggaatgggcactcaaacttaagagtaggaatgtcaactgaaacagccactacacagcctaatttatttatgtatatcaaattttgaagtgagcatatatactacagaaatgacaaatacagataataatttgtatgccaaacacatagtgacaatgatacatatgctaacttttatgacagtattgtttatgatagcaaaaaaaaaaagaaataacctaaatacccatcaatagcaagatgggaaataaatcatgctatactcacttaatcaattattacccaacaattaaaagaatgaatggacctataatatgtgacatggaaaaatttctaagttgggaagacttagagaatcggtaagttgggaggacaatgtgcagaatagtatgtataaatgcacccattttgttatagtcctaacctgtgtattcgtatatgtatatttttatgtaaatatatagaaaaaaatgtctggaagaatacatagtaaacttttaataaataccaccgggaggcaagtagttttgccctccttattctatctactctgaacaatttgcatttttatacagcgaatgtatcacttgagtggtggttgtgtttagttttcttactggccttactcaaatgtcagctcttcaatcttcccctgactccctggatttgccttttcctgggtgactcaaatgcatgccatacttatttctacaatcacatgtgcactattacttagtaaagaattgtagccatgttttctacctaggtggtgagcttcctttaggcagagactctatcttacttatctctgaattccccacatccaacacatgtctggcacatagtaggttttcatggtttaatctaatgaatgaattaatcaaccaatcaaacaatataggagtgagacatggttaagctttccaaattctgtggttaggttatccatgccatacctcactccaaggcctgtagtgtatcaggatgtatcacttgtagtgtaacagggactcttcctgggaagcagtatagtcattaagagaaagagatccaattccagctccaccactgcccggctggtgatgccaccatacatgtcacttaacctctctgtaattcagcttcctcttctgtgaggaagggctaataaccattcctgtttcacagaactattgtaaacactaaatgcgttaaaatactaccattagttgtattatacaaagacatttctagataacaacagggaagaaaatcaaaattattaaccaaaccttcaaggcattgccattaaaggaccctgtcccatggggtataagaggagggacaaacattcacacatcgttgcagtcccttcatgttagcacttctaaatactgagccaaggacagccacccccagatgctgccctattccccaccactctgcctctcctgcgccgacccttgccaccccacctcttatgccccttgatccccatctgtatattccaccattcccaaccctggagtcaatcctattccaaatcatgggaaaaatataataagcccttggccatctctataattttggaattttgaaatcttggagaaaaagtataggttcttctgtattagaaaagatcccatttccagagaaggcacaaatgcatgacaagaacactccatcaatccctgtggggcactacttgaaattttcccacaagctgatcttatagaagagggagattaagaaaagtgaaagttatttttcacaggaggctctagtagggacagaaagtcatcatgaaagcatcatgacaggtccacctgatcccagactcaacctctgaattgcttccacattgtctgtgccacacaagctcctgagccctctgcagcctgaagaaatgagtgaaatctaaatgtggttctggggtaagaacctactttccatcttggaatctcacagagaccccaaagctaaataaaaattccttcaatttctcttttttaaaagatattattactgctgacttatttcaactttcaattatttgattataagcgatcttttacattttctgtttgcttatttaatgtctgtttatttttttatgaattgttcaagtagatttctgtcttaatcttgtgaggtagcatttaccataaacctaaaactcagacacctaaaactagcaggactatagcaaataggttactgttttatttttgaatgagaaggccttgattcagtgttgaacagcaagaagaatcaaaagatttttattcaacttcaagtacaaaattatctttgaatttgtttatttatctcctgagattaacctgataaactgaactcttcatggactaggacccagtggaacaattctttggatttctaaagcggtaaggcagaccagcaccctccgtggccagtacagagagggcaggccaaccctaggataaagcagaagggaacaagctttgggcattgctgtggatggagaagcctgagtgctgcttctgggcaggtaaacatatgcctggatgtgctgcagggatcttagcttgtccccatcaatgtcctcctttgagtcagaagaaaacttttcagtaattgggcagaagggcagtgggctacttctttaaactgttgaaagtctcctttcagctctcatgtctcaggccagagagacaacttagggtggcattcagtttcctggtctccaggctaaagtaatcattttgaaagctgattcctctgtgtttcagagatgctccccacagatctgaactactgggggtctccaacctgtcacaagcctaaggggggaaaaactaacaatatcccttttagtaacagatttctggtaaaatttggatcactgggctggagcaattctcaggccatagtggagatgccatcaaattcttttcttaatggcatggactaaccgtcctctaggactactgtcgggagcttttgtcctaggtcatgatttctgctgacataattggaatatctgaatccatatgataaggagtcctgtttcaagtaatttaggcagactatgtacttcagaaaacaagactgagccatraaaagggaggaggaggcacacagaccctgagatctttggtgagtgtgtctcaggyggatccgaagctgacaaaccatgtgagtgtgtatggccatgaaaactttgaattatctgccagacagagtaagtgccctaaaaccaaratacattttaaaatgcttttattctgaatatttattcataggtcaagcctcatatttcattccattaatgcattcatattgcacctgttttcctctcccttaggtgctttacatatccaaatgaacaaataccaattcacttcaggttccttggctgtctcttaactctcggcctctgacactctccctccctcctactgctctcttggctcttctcaatccccaaccctaagtcccatgatccccaccctcagaatcgcccacatgtctctgtttgttttgccccaaaagatgccagactggagataatttttctttgatttaaaatccaggcataaaaaactttaccaattcatccttggccccttagttctagaaagaaggtaattaaaaaaaaaaaaagtttgttaatcccaagtgtggcttttatcaagattctttaaataaccctttgttatttaaccagactcaattgaccacctaactggtaaaaggaaaaaaatatatatcacggctcatatttagcataacaacctaatcatcaggtaaattccactgaacaagaattagagaaacctgaagacaatcttcccttttagaaggctgaacttagaaacctcgtataattcaactccactgaaagtactgctccactaccctggaaaagcaactccatggtttatctctagattattgggtagtaattgttttttgtccacttttgattaaagtaaaaatacaccattgtgcacaaagggatgtgtacatctcataaatttttacaaactgaacactcttgcataactagcaccaggtcaagatttagggtgctaccagtaccccagaagcctccctcatggctcctcccagtcattaactcaaccaaatgcaactacaagtctgacttctacctcaatagatgagctttgcctggttttgaactttatattaatggaattataccaaatgcactcttttatatctgacttcttttgctcacatattatgtccatgagatgaatctacattgtggtgggtagcattaatgcattcttttttgttgccattgtttgttccattatatgaatgtaccacaatttgttcattcattctacctttgatggacatcggaattgtttccagttttggcaatggtgaataatgctgctacaaacattctagtatatgccttttggtacacacacctgtgaatgtctgttgggtttatacctaagaggggaattgctgcatcatcaggtatgcatatattaagctttaaaagatactgtcaaagttttccaaagtaattttaccaatttacactcaatgaaaatttcaattctgcacatcctctacaacatttagtattgtcaatttgtaaaattttaagcattctcataggtggttagctggagctccttgtggtattaatttgcatttccctaatggctgttgatgttgagcaactttttatattatatgcctgttggctatggaggtactcccttttaaaatgtgccagtttgagtctcttgtccacttttaactgattttttcttatttgtaggaaatttttaaataaattctggatgctagtcctttgtctgatatttataatgtaaatattttcttctgtctaatgtaaatatcttcctctgttgcttgccattttattctccttaaagtaagaaaagattcttggccaggcacagtggctcacacctgtaatcccagcactttgggaggccaaggcaggtggatcacctgaggtcaggagttcgcaaccatcctagccaacaaggtgaaaccctgtctctactaaaactacaaaaattagccaggtgtggtggcaggcacctgtaatttgtacttgggaggctgaggcaggagaatcacttgaacccgggaggaggaggttgcagtgagccaagaccgtgccattgcactccatcctggcccacaggagtgaaactctgtttcaaaaaaaaaaaaaagagtttgttgctcccaccgagttctgragaacgccagcagctcgctgcttaaaattaaaccacagggttccatgatgggtcracttgatgggaaagtcatcatcctgacagccgctgctcaggggattggccaagcagctgccttagcttttgtaagagaaggtgycaaagtcatagccacagacattaatgtgtccaaacttcaggaactggaaaagtacctgggtattcaaactcgtgtccttgatgtcacaaagaagaaacaaattgatcagttcgccartgaagttgagagacttgatgttctctttaatgttgctggttttgtccatcatggaactgtcctggattgtgaggagaaagactgggacttctcgatgaatctcaatgtgcgcagcacgtacctgatgatcraggcattccttcctaaaatgcttgctcaaaaatctggcaatattatcaccatgttttctgtggtttccagcatcaaaggagttgtgaacagatgtgtgtacagcacaaccaaggcagccgtgattggcctcacaaaatctgtggctgcagatttcatccagcagggcatcaggtgcaactgtgtgtgcccaggaacggttgatacgccatctctacaagaaagaatacaagccagaggaaatcctgaagaggcacggaatgatttcctgaagagacaaaagatgggacgatttgcaactgcagaagaaatagccatgctctgcgtgtatgtggcttctgatgaatctgcttatgtaactggtaaccctgtcatcattgatggaggatggagcttgtgattttaggatctccatggtgggaaggaaggcaggctcttcctatccacagtgaacctggctatgaagaaaactcaccaatcatctccttcctgctaatcacatgttaatgaaactaagccctttttaacaatgtcactgtttgcaagagtctgattctttaagtatattaatctctttgtaatctcttctgaaatcattgtaaagaaataaaaatattgaactcacagcaagagaatagtttttaaaataaatctcaatttgtaagcatctgtgttagtcactttgggctgctataacaaattacyatagatggagtgtcatagacaacaaacatttatttttcagtctggaggctaggaagtgcaagatcaaggtgccagcagatatggtatctggttagggcccacttcctagtttgcagatggtcctcttcttgctacatcctcacatagcaagagcagagaaaaaaagcaagctcttatgtgtctttttataaggacactaatcctgttcatgggggcactacctttatgacctaattacctcccaaaggccccacctcctaatgtatcatattgggggttaggatgtcaacacatgactttggggtgatacaaatagcccattgcagcatatagaattaaaatgtaaatatgaagaaaaaaggaagtttttgttttttttgtggggggtggggttaaggaagaagatagtaatttcaggactaggcattgtagctcatgcctataattcctgcactttgggaggccaaggcaagaggatcacttgctgccaggagttcaggaccagcctagttaatagagagaggctaaggtaggaggattatttgagcccaagagtttgaggctgcagtgagctgtaatcatgccactgcactccagggtgacagagcaagaccctgtacctaaataataataataataatttccactttatttttcaatattcaaatatttttatataattctgcattgttctgtatgtagatcctaattttaaaattttacaccatcatagatgaacaaaggtaggaagcagtttggcttcaatagcttacagtaaaagaagtaaaggagttcagcctcaaaacgatattgttgatctgtcatgttatgaaaaataatccagtgtttatacttaacggatgccatcccttattaattatttactattttcttagtctaagtaaacactctttattaaaataagcaatgatacttgacatgggcctaagaaatatatagttagctaactgacaacattgtcagttagagggatttcttttttaaattaagtacagatttcttcaccaaactccaggataacagaaaagaggacataaaatttggacatagtctctggataaataaatgtaaatttaaatataaatcatataacaggaaacgaaattaaagaaaataaatttttcaagaaaagtaaatttatggatgataattctgtaacatagtcagggcaaagttttttctttttattttaatttaaggattttatgtttgtttttcacttgttgtaacctcacatgaccaaatggtatgatgcacactgagatactcaataaatgtgcagttattcttagccttttttcctagaactttaatattaacaaggaaaattttgaagtgcacaatgaaaagataacactttgtgtatggggaagaatatcatgcagttgatgacagtacattaaaattcacacaaaaggacattttgactagcattccgaaagagtccattgattataagattatctatgaggttttggaccaggcattacactactgaattatggctaactttggtttgtgatctagaccaagtcacctaatctatcttggattttagttttctggtttatgaaattaaggagttaagctaaatgacttgggtttcttttcatgtatcataatcaaaatgctgtaacttctctagtgaattcatagaacactgactcttataactatgtcatgaaatactttatgctgtgaacaggtatacgtgtataatatatgtatagctatgaacaaataaattttaaataaatgcacaatgaattctaaaaaaaaaagagagagaaaagaaaatattctcaatttgaataaagtcagtgcactagcctttcagtttatggtttgttcttcttgcatctttttaaagaaatctttgcatgttccaaggttttaagtacattctctaatacattaaatacattgttatattctggaaaatttatttcacattaagatccatgatctaagaatttatttttgtttatggtccgggataggtagcaaagtttgttttgttttgttttttcccaaatttcaaccagttgattcatcaccatttactgaaggaagaaaaatagcctttggcactgtactactgtggcacctttgtcataaataaggtggccagggatatatgcgggtctgtttcaggactttttcttctgttcctttagccaatgtgttgatccttggaccaaggaagtagtgttaattactgtggctttataagaagttttggaatctggaattctatactctttaagtttgtcttcactcttcttcaggattgtctttactattcttgatggtttgcatgtatatataaatttcagaatcagtttgtcaatttccaccaaaaaaaaaaaatgctagagtttttcttaagatggcattgaatctatatttcaatttggtgagaatacccatcttttcaattgttaaccaaaaataaaattctaagctgcccaaatatctgaacagactcctcctcttggccaagggcattccaaagttaacctgaaaaactagttttggccatgagaggaagtggggagtcagatatgactcacagctgaccagcattaacatgaacacagaaactttaaaactgataagagtcttaatagactctttaagtctgataagaaacatttatggctgggcacagtggctcatgcctgtaatcccaacactttgagaggccgaggaggggggatcacgaattcaggagatcaagaccatcctggctaacatggtgaaaccccatctctactaaaaatacaaaaaaaaaaaaaaaaaattagctgagtgtggtggcgggtgcctgtagtcccagctactcgagaggctgaggcaggagaatggcgtgaacccaggagacagagcttgcagtgagccaagattgtgccactgcactccagcctaggcaacagagtgagactccgtctcaaaaaaaaacaaaacaaaaacatacaaacaaaaaggaacatttataatctattctctctgaagcctgctacctggaggcttcatcagcatgataaaaccttggtctccacaaccccttatcttatcccagacattcttttctgttgattctaaatctttagacaataacttaactcttttaaccaactgccaatcagaaaatattttaatctacccatgacctgtaagcacctcccccattttcagttgtcccaactttccagaccaaaccaatgtatatcttacatgcatcgattgatatgttatgtctccctaaaatgtataaaccaagttataacccaatcaccttaggcacatgttatcaggatctcctggaggttgtgtcatgggccattggccactcatatttggttcaaaataaagctcttcaaatattttacagagtttacttcttttcattgacatgatattgagccttctaatccattaacttgttacagcttcctacttaatttctttctactttaatttctttcagcaatattttatagttttctgtgtagaagccttgcatatctttattttccctatttaatattttttgatgctagtaaaattttaaaaatcatttcctaatttgatgtggctgatatatgcagatacaattgatttttatatattgactttgttgtatacagtggccatgctaaattaactattattaattctaatagtcaatttttgtagattcttttggaatttccaagtatacagtcctatcatccacaaaccaaaacagttttatttcttgctacatattacatatgtcttttgtttcattttcttgtcttattgcactgactaggaattccaatacaatgattcataaaaatggcaatagcagacatccttgcttcatttttgacaccaggggcaaggtttttagtgtttaatcattaaaagtgacatttgtggttagcttttaaaaatactttttattattaagaaagttactttctatttctactttgcaaaggattttttcatgaattggtgttaaattttatcaaatgctgtttcttaattttttgagatgatcatatttattttctcctccatcctgttaaaatttatacagaattccactatgttcagagaacatactccatatgattttgactttttgaaatttgttgagacacattttatgacccagcttacagtgtattgtggcaaatgtttctcatgtacttgaaaagaaactatacgtctacagttgttcagtacggtgttctatatagaactggaaaattggaaattaagcaattcactaccgattaacctatgcaataaaaaaaagtcatgaaacttaagtaaagcagcgcttagagaaaaatttataaccttaatgcttacgctggaagaggaataacatttcaatttaggattgttttatttttattttccttttgaaatgacgcttctaatatagtgaaatgccttttcttatatataacagtgcttctcaactgaggacattagcaaggtctaaagacaattcttggttgtcatgattcagggcggggaatgttgctgacatctagtgagtaaaggtcagggatgcttataagcatcctgcaatgcacaggatggtccctcacaacaaagaattatccagttcaaaataccaatagtgctgagttgaaaaacccttttatgtaataatactttttgccctaaaatctacattgatagtaatagttagtagaacctgatgtatcttttatcctttgaccgtcaactttttgtgtgttcttatactttttgtgtgttcttatactcttttaagtataatataactggatttttatttttatacattctgataatattttatttaacttgaagaatttagtccgtttatatttaatataaagatggatatatttgggttcaaatctgctaccctacaatttattttctttttgtaaacatatattttccccattttttctcttatcttgtctttcttgtgataattgaaatatttctaaaaattgtttcattccctcccccactggcttgttacatagggattatttgctatttttttagtggttgccttagaaattacaacatgcatttttaacttattatcgtttactgcatattaatacttctaccacttctcagaaaacacaagggtctttgacactttaatttacacagtccgtctcccttgtatgatattgttgtcttatatttatattctagaaacattttaaaccttacattataattgttgttttaaacaggcagtatattgatttatattttttacatacttacccattctcctcattccttcctgaagtttcacatttccatttgggaatattttccttccacctgaagaaatccctttacagttttgggttttttttttttttctgcaagagatgaattccctaagcttttgtttatttcaaaatgtcatttttgttttatcttcattttgaaaatattttcctcagtataaaatgctaggtagactgttttctttccacactttacagatgccattccatcattacctagctttcatgaattctcttaaaagtcagttgtaaatcatattgctgctgctgtgaacatgtttctttttttctggcaacttttaagatgtttttgtctttttcatcaattttattattgtgtgcatacgtgtagttttctttgcatttatgctacttaatgatacataaactcctgcctctatggtttgatatctcatgggtttgtgaaacttctcagccaatttatcttcaaatattacttatttgacacattatactgttacatggatccattttctctcttttctctttctggaactccagttacatatatttaggccactcacaattttccatctgtatcatatatttcatacttttcattcttttttttccctttgtgcattaatctg

SEQ ID NO: 93376 - DNA, 12765 bp, Homo sapiens
attttaagttgtaatacatattgtcttagtccattttgtgctgctataactgaataccacagactgggtaatttataatgaacagaaatttatttctcatagtcctgtatgctggaaagtccaagattgagaggacatcatcttgccatggcctttttgctgcatcatcccatggtggaagggcaaagagaaggtgaaaaagaaacaaaactcaaatttttataaggaactcactcctgtgataacaaactcactttcacaataacagcattaatccattcatgacagatgagctcttatggcctaaatcaattcttaaagatcccacctcttaatactatcacaatggtcattaagtttccaacacatgtattttttgggacatgttcaaaccatagcattctggccccagccccccaaattcatgtccttctcacatataaatacattattccatcccaatagctgcaaagtgttaactcattctagcatcaacttaaaagtccaaagtccagagtctcatctaaatcatatatgagtgagactcaaggcatgattcatcctaaagcaaattccctgttagttgtgagcctataaaattaaacaagttatgtgcctccaaaatacaatgataggaaaggcataggatagacattcccattccaaaagggagaaataaaaaagaaaggagtaactgatcccaagttagtccaaaactcaacagggaaaacaacctcaaataaggctccagaataacctccttttactccatttccaccttctgttcacactaaggcaggggttgtacccagaagaccttgggaagctccaaccccatggctttgctagtctcaccctcacagcagctcttacgggttagycttgctgcttcagctgtccgaggctggggctgcacattggttgctctgcagttctggagtctcaagtgaccctgccatgacacctatactaggtgtagaggggactctctgtggcagctgcaaccccacagttccagtaagcattgccctagatggggctctctgccatggctctgcccctgtgataaatttctgcctggatgtccaggctatccaatatatcctttcaaatctaggtggaggctaccatggcctaagagctcatacattctgcatgcctgcagaattagcactatgtgggcaccaccaaggcttactactcgtgcctctagagtggcaacatgagtcacacctgggcctgcttgagctatgactgggtggcagagaaatgctcctctgggatgcagaaggtagcgtcctgagtggccctggaaagtcagcctgtggatggtaccctgggtctgtccctggaaaccatctgccctcctagagctccgggattgtgatgggaggggcagccttaaaaatctccaaaatcccctcggggtcattctcccattgtcttgatgaatagtatctggctttcttctattcatactaatctccttatcaaatggttgcttagccacacatttcctctccagaaaatgctctctttctttctctaccaggcaaccaggctgagaatccttcagatcccttttaattatagatcccatctttaaattatttctctcttctctcattttactgtatgcagttaaaagaagccgcacagttcttcgatgtcatggtttaaaatttcttctaccagatatcctagttcattgctcttaaattctgcttttcacaagacctcaaggcgtggatgcaattcaaccaagttgtttgccacttcataacaatcatggcctttacttcagtttccaataagatattcatctcttctgtctgatacctcatcagaatggcctttactgaccaggcccggtggctcacgcctgtaatcccagcactttgggaggctgaggtgggtggatcacctgaggtcgggagttcgaaaccagcctgaccaacatagagaaaccccgtctctaccaaaaaaaaaaaaatacaaaattagccaggtgtggtggtgggcgcctgtaatcccagctactcgggaggctgaggtgggagaattgcttgagcctgggaggcggaggttgtggtgagccgagatcgtgccattgcactccagcccaggcaacaagagtgaaactccatctcaaaaacaaaaaaagaaagaaagaaagagagagagagagaaagagagaaagaaagagagaaagaaagaaagaaagaaaggaaggaaggaaggaaggaaggaaggaagaaagaaagaaagaaagaaagaaagaaagaaagaaagaaagaaagaaagaaaaagaatggcctttactgtctctatttctactaacattctgatcacaatcacttatgtaatctctaagaagtttctcattctcttcttctgagtcctccagaattactgttaatactccatttatagcaatctaagcttttgttagcctgctactccagattcttccagcctttacccatcacccaataccaaagccacttccatattttcaggtatttattataacaatcaccacactcctagtaccaatcttctgtcttagtccattttgtcctggtataaccaaataccacagactagataatttacaatgaacagaaatttatttttcacagttctgggggctaagtccaaaatcaaggggccagcatctggtgagggccttcttgctgcatcattgcatggtggaagggcaaagagagggtgacagagagacaaatgggggctgaacttgtcttcttataaagaacctactcctgcaataacaaacccacttctcttgataatggcattaatcattcatgagggcaggsccctcatgggctgatcacctcttacaggtcctaccttttaatagtttataatggccattaagtaaactactacttaagtatgctgttttggagacacattcaaaccgcagcatataccttttcttgaggaaaaatattagactattaggatatgaaaaaaagtgacaaaggtgtcatattgactgctatggcagtcactcatccaacttatctcagtgggttttctttgaaaatacttggcctttgaacaaccacaacatgtaacaagatcccctacacagaggggtcctagagactactgtttaattcaaactgagattataggtataggccaggtgctgtggctcatgcctgtaatctcagccctttggatgactgaggcaggaggattacatgaaaccaggaattcaagcccagcctgggcaacacagcaagaccccatctctacataaaattttaaaaatagccaggtgtggtggtatgtgcctgtagtccaagctacttgggaggctaaggtggaagaattgcttgagctcaggagttcaaggctgcagtgagttatgatcatgccactgtattccagcctgggcgacacagcaagaccctgtctctaaggaaaaaaaagagattacaggtggttcctgagaaggactggcctcctcaagtcaaagggatcaaatgctgacagactcagcagagccagttacagggatcttggagtcatggggatcttttagcaaatctacatgagaaaagtagggaggatggtataaaaaggcaaaggtagtgtcagaacggagtcacaagtaggaaatagagatcagtcacaaagaagagcctaacattccaatgcaggtcagtatggaacagtatatctggagagaacactgcataaatagttacaaataagagagaacagcttggtataggcacagctgttgaagggttagaagctgtgctggagccaccaaatctttttattataaagaggcaccagtaaaaacaaaacaaacaaaccaaaaccaaaaacaaaacatagtactgctagagagttttgtcattttactagacattgatggaatcttcattaggatgctgggataatactttcagagaagaatagacaactgagaaaggatttaaagataaaccgtgaaatggattagtatgtggaaaagtgactttgcaaggaaaaaaatgaagaaatagatatcatttatatgtcattctgtatcatccatgagggaagggaagtatctatgggaggcaccactatacctcctgggcccttaggttcttactggaggagagaggtgagcacaggtccgtccccactgtgggcaagatgccacagagacttctctttcttctttgacgataaatgacagaacactgaagccaaacccagagcacagaaaaggtgctggctggaaaggctagtacttggaacagagaagaagaaccagaacttcccctgattgaatggtgagattcagaagaccatgtcctgtagagtttattcttcctcaaaagtgttctgttgccacacagagccacacagttataaggaaataactaatcattacttaacagagatcgaaaaagctctctcaaagcaatggatcattccactctttgaagggagtattccaccaagtataagtattgaaggtgaccacaccacaggggttgaaaaaaaattgttctgcaattaattccaagtaacatgcatgaataatcttacatgaacatggtactcattgtagaataaaggttaagaacctagggatataaaagagggagtgtatgtatgtgatgggggagggagaggcaaaggaaaaggaaagttctggctttgccccttagaaccatgtgatttagagcaaaattttcaaactccataacgttcaatgtgctccaattgtaaagtatatctagtaatacccacctcagagttttcgtgaggcttgaaaaagaaaatgcccacaaagcacttagcagaataactggcacaaagtagactctcaataaatggatgaatcaactcagcatagcaaccagagagccagggccgctggggctttggggggattgttttcaatccctcccagacataccaggtgccttagctctaattctttaaggtttgtaaagatgagcctctttctggagtttgactctcagagaattctgttagagaatcacagatcataatcccagttcactctttcattgccaattctgagttgaggattcagaaaatgggcagtgggatacaaccatgggagctgggctctccaaaggtgttctcaaaatcatggtccctttgtaacaataaaatgaatgtccaacagtcaagcacacacagtctttgtctgagatgcaagaactcttaagctctgccaaggtaagaagagaaacttctagaaagagaccctcagtgaaaaaaaacctcggcttcaagcattctaagacagttgccaggagccactggctgatttaaaaatccagggaagcttgggggcagggaggggacaacaaggtaaggtgaaggttacaggaaggaaggagtgactatgtcaactttgcagtaactgaaaattccaaattatttacagcggcagaaatcaggaaagctcaatgatttgtattacatttgaaaattaatcacccatcagataatgtgtagcatatcataaaatgttatggtaacataatcagactaacataaagtcaaacagaatgctagagacttatttgattcatttctcctcaaacctccacaatgtaaaccttttgtctgcttcccattcctctacccctaatttttttttttttttttttgagatggagactcgccatgtcacccaggctggagtgcagtggtgcgatcttggctcactgcaacttccacctcccgggttcaagcaattccctgcctcagcctcccaagtagctgggattacaggtgtctgccaccatacttggctaatttttgtatttttagtagagacggggtttcaccaccttggccaggctgggctcaaactcctgacctcgtgatccacctgcctcggcctcccaaagtgctgggattacaggcgtgagccgccgcacccaacctcctctacccctaattttataagctattaagaatttgggtgctctgcggacgccaccgctgaggaaaaccgtgtactattagccatggtcaaccccaccatgttctttgaatttgccgtcgacagcgagcccttgggccatgtctccttcgagctgtttgcagacaagatcccaaagacagcagaaaattttcgtgctccgagcactggagagaaaggatttggttataaggtttcctgctttcacagaattattccagggtttatgtgtcagggtggtgactgtgaagtcaccataatggcactggtggcaagtccatctacacggagaaatttgaagatgagaacttcatcctaaagcatacaggtcctggcatcttgtccatggcaaatgctggacccaacacaaatggttcccagtttttcatctgcactgccaagagtgagtggttggatggcaagcaygtgctctttggcaaagtgaaagaaggcacgaatattgtggaggcatggagtgctttgggtccaggaatggcaagaccagcaagaagatcaccattgctgactgtggacaactcgaataagtttgacttgtgttttatcttaaccaccagaccattccttccgtagctcaggagagcacccctccaccccgtttgctcgcagtatcctagaatctttgtgctctcgctgcagttccctttgggttccatgttttccttgttccctcccatgcctagatggattgcagagttaagtttatgattatgaaataaaaactaaataacaacaacaaaaaagaaagaatttggaagggcctgaggtccccccactccactcattgcacccatcagtgacatcaagaaaggacttgaaatgaaaactagcattgtaccatgctgtgcacctcacagccacagccaccccaggagataagcagaggccacaggctcaggcggcgtagcatctcacagcagggatactcccccagcaacagcagccagaagacgaatgctccaagctggacctgctttagccacatgtgtgataagctttcaaatctcacacacacaagcagaggaaggggcacttcagaatcacaggaaaatgccaggagtatttcaaagtcaaataatgcctagagcaagagaaaaaaagcaagaagaagctcctcatctcactgctttcatgttcctgccccagggtgggaggggctatcctaatacataactcactaagttttacaggtaaaccaaatgacattctaggtctaatcatcgttcaggaaagtcagagaggaagataataaggaccattcattgcaacccagcagaatcatcaccaagtcaaggcctccttttctagcacctcattttattcctaaattaaaacagtgataactgtcagaggcatttgaaccagagtgactcygtcttgaaaacaagctgtaaaaataaggctgagacctattggtctgtattcccaggaggttaggcattccaagtcacagcatgagataggaggtcagaaaagatacaggtcacaaagacattgctgataaagcaggttgcagtaaagaagttggccaaagcccaccaatccaagatgatgatgaacatgatctctggtgtcctcactgctcattatacgctaattataatgcattagcatgttaaaagacactcccaccaacatcatgacagtttacaaatggcatgacaacatcaggaagttaccgtatatggtctaaaaaggggaggaacgcccagttctgggaattgcccacctctttacaggaaaactcatgaataatccacttcttgtttagcatataataaaaaaaaaacccataaaaatagcgagccagcagctcttcgggttgctgtgctgtggagtagccatactttattcctttactttcttaataaacttgctttcactttatgaactctggcacaaagtagactctttatggactcaccccaaattctttcttgcatgaggtccaagaaccctctcttggggtctggattgagatccctttccggtaacacaaccaccatcttacatctcagagcacatggtacaggaaaaagaactgagggtctggaactatacaaacttggtttcaaatattgatgctatcactgaatatgagttatttatgttatcagctaagttcttctatttgtaaaaatagagatgatcagatctatgctgaagggttattggaggaattgatggaaataaaacacaaagggtcaaaaatgatccctgcaaactcataggtactcagtaaaggctaactcctttccatcactagaaaataaagaggaatttaaattagtatcacctggtgcacaagaaccaagcaaggatgttgtccattatcaactatgggaccctaggatggcaggaaatgggttcccacacaggctgctgcctgccctcagcctctcttcctccctctgtcctgccctgctttttcaaaataaagattgactgactcaaaaatgtgataaccaaaaagctcccatgctcgcaagatcagacaaagttggttctcccattacacacctttagcctatgaagatggggactaggaagccaggatttaagggagatgtccatgagcacaaatggctgtctgtaggagagcggtagcatagccagccctgtggcaggatgttgtctataaggaaagtcacttgactggggagttcatgctcactgtgaagtttaacttggaaaaagccacatattcagatttgggttcaagaatttaaaagatgacttttatcttgtaattgattgcaatgtggggtgagatggtgcttaaattttttttttttcctgcacagttctttaggagctctttataaaccactgaaagtcatgagagatataaatatatcacctgcaaacccaataatttgattgggtttggggacttttttgcctagaatctatctactaaaagtcaccagagtaaagtgaaaatagcaacacattcagaattgaaagaattgaatttctgttccatttctgctacctactagttgtgtgaccctgaataaattagttaatatcaattgcttaccgccatctgtaaaacaaaggggctagaatggagtatgaaactgaagaacacccatgtaagaatcacccaaagtgcttgctaaaaaccgcagatcctaggcttggcactgccctcactgaatacagcactggggatggggcctgggatcttcattgttcacaaacacctgggatttttaaatttactgtacttgagactcactggagaagatgatctctagactgtatctcagatgggcactgtcatattctaaatgctttttgttctagtgaaagtgctgattcatttgtaaatcagttcatagtttaggcaggtattgaacccttctttcctttttactttccctagccaatgaggttgcccattttcttctcactcacagctaaccagctaaggctaaaataaaacatcctgtccaatcttcattctcaaatgagccaaataaatttcaaggtccttgactttcagggcagcgccttgtccaagagatctcatagctgtttccgatgttgtttcccaactgaaaatatttttcttcccaagccagacaacagggtcttcaatttggttccaaagccctgtgtctcttctacttcctgcaactgctcagatttctctagaaatctcctgcccaggtatttggcctagtttacttagcaagttagagcaggcagggtcactgcacaaggggaattggtaccagacaaacagcatataaaaataaaataagtcagagctggaggagaacaacagaggtgataaaatgctagtgaaatgagtggctcattaaagggtaaaccacctacatgctctgtaagaggaccagtcatttgtcctgtgatggtcagagctcatgcgcctcaaagagagaagtaaggacatgtgctaagtctgccataaaaagaaatgttttcagtttaaatatatcaatacatgtattcttccttctagatatgtcctttctactttttggtgttaaagtgcctttacctttttgaaatggtggtaacggttaattttgtaactatatttgataaaaaatgatgtttaaaacatcatggtggtatactctggtttctcttcaaatcgcgtaaatctttcgccttttaaaacatcatggtggttctctcacccgtgttttgtttttattttatttggctcaaaatctcctaggaaagactgactctccaccttagcaaaggtacacggtctatcgtggtcaaagcatgggaaaggggacccttcatctccagcgtgggagtcattgtacctgtgtattttcagctggcaatttccagcggaaccctcttaagagaaagttctctctacttgagctcattcagaaatagtgatttcttggatatattgacttttttcaaagggagtcccatggtttgcttgtttgtttgtgggtggtaggaaagatacaggtattcttatctcaaatgtggagatggaaatgggagatgaccacttgggtgtctgtgttgccctttctcagtccctgcactgtgagtagcagctcattgtattcattcactgggaccacacactttccgtaggatttcctcagattttaatacatttgcctagtgcctagtgccaatacattgcctgaaaaaagggattcttttaatgccaccattctgggttccccttttatttatttccccaatccacttaatacctgttagagcacttctgttgcaagagtgtgggcaggggcttggatttcacacttgagcagctctggaaagggaggagacatttatacccaagataatgtacttgactggattttatgttccctttgctatttctataggtatttatgcttaaaaagagttttcatctacccctgcagcacagccgaacttctcctctggcgggatctagtcacacacacacatactcacataatcctccttgcctaaaaacagcaggtgagctggagtagaaaacaagagaacaagtacagcgacctggaaccatgccaccaagggagagaggttccttttgagttagggcaactaagcctgaatccttctttggaggaatctaggagtagggagatatacaactatgacttacatcaggtaaaacatcatcctcgatatctttctttgggtgaatatgaatataagcctgacatgctgccccacatctaccctttagcttatctgggaaaaaaaatttatcaacttttctttggttattcagtctttcattaagcctgtccaaccacagagaggagaagttaagacttgtagaagatagcaacaaagatttcctaccctcctcatgctatctggtccctgaaagcagctgcagaacccttctctccctcagcctgggtctgtgtttagggttctggcttgcttacacaaaggctatcccataagattccaggggaagcctgactcccatcctcccatagactacagcaggctggttctgcaaaaagtattcctatcttcagtattcttacagtatttctatttaagtatctgcttataattgtcaaggtttgatgctaacattttaaaccgacaattactaacattttaaaggaatggttaaattgtaaaactcaatttctatgcggaagaatgattctaaataagcagtccttcgtccttcagactgggttcacgagtagctacagggagtgcatttctttttcttgctttctctctctctttcaaaataaatgtatctactgtgtaagtgtcaagcactgcccttacatttgagggtatgcagataaattcagttatagacctcaaggggctcataattcagggctcagaagtctaagaatagagacaagggccaggtgcaagtgtgggccagagggaagagggacggatcacagctggtgtcagggaagtcttcacagtgatgatatttgagtcttcgaaaatataaaatggacactgagaatcctatcaccagaaaggaaacattgaatatttccaagatgcaaagaaatacttccaagatgcaatacttctaagatgcaaaactaggactttgagaaaagcctacagattcaagtgtggatcagcagcttgagtgatattggttctgtcaacaatttactaggtacttcaggctcgcccctcaagcatcccataatttcagggtgcctcctaaatagaaatgaaaatattattagaaagttcatttaaataaacctcctatatgaaaaaaagacctctttccaatttgttgaaataagagagtcataatatttatttcatcaagsgggtgtgaggcttagtcaggattcatttacttcattactctttctagggcacttgaaaatttatataatcccatttgtagtttgtaagaccagacttcatgaggatttgaggagaaattgtataaatgtgaatatttttatcgagtttttcttccttctttcaagtataaccagccttactctagcttttccagccctcgctagaaggcactttgtaatagcaagagtttcccaagtgaaggcctcggccactcctctctgcctcatgctctgcctcattcatcgctagagaaccttccttagtgccaggaccccccatctcctctagacttacttcattcactgtgctcttactgcaagtccggtttacatgcttatctgtttcctcaagtagactgtgaacaaccagagggtatcaaccatctcttacctgtt

SEQ ID NO: 93377 - DNA, 136017 bp, Homo sapiens
ggaattgtgaaattacaaaattttaattgtggtaaaatacacaaaatttaccatcttaatatgatttaccatcttaaccgtttctaagtgtacaattcagtactgttaagtacatttacattgttgagcaatcaatcttcagaactcttcatcttgcaattaaaagaatgaaaaatagtccgagtgcggtggctcacgcctgtaatcccagcactttggaaggccgaggcgggaggatcacaaggtcaggagttcgagaccatcctggctaacacggtgaaaccccgtctctactgaaaatagaaaaaaattagccgggcgtggtggcgggcgcctgtagtcccagctactagggaggctgaggcaggagaatggcgtgaactcgggaggcagaggttgcagagtccattctcaaaaaaaaaaaaaaaagaaaaaagaaaaatagaacttcatcttgcaaaactgaaactacctatgaaacaactccccattcctgtccttgtcatccccctcctccccccattctacttcttgtctctatggatctgactagataccttaatataagtggaatcattcagtatttgtctgtaactggcttctttcacttagtataatgtcctcaaggctgtgtcaatttctttttaagagtgaatagtattcccttgtatgtatacaccacgttttgtttatccatctgtttatccaccgcacatattgagattttaccaaagaaatgataccatatctgggccaggcgcagtggctcacgcctgtaatcccagcgctttgggagaccgagatgggtggatcacctgaggttaggagtttgagactagcctgaccaacatggtgaaaccccgtttgtactaaaaatacaaaaaattagctgggtgtgctggcgggcgcctgtaatcccagctactcgagaggccgaggcaggagaatcacttgaactcaggaggcggaggttgcagtgagctgagatcctgccattgccctccagcctggatgacaagagcaaaactccgtctcaaaaaaaaaaaaaagaaaaagaaaaaaagaaatgatgccacgtctggaatttgcttcaaattaatacaggatgggggtggggggaatggggggggatataagatgaaacaagcctggccatgggttgaagctgggtagttaaacatttgtcttttttatatttttaacttttcccacaataacatgtaaaactaacaaaaaactagtgatgtgcataactaccccttcagagcagggagttcatggacacatttcccaagcacagtcttcagtcattaattgtggaaggacatccatgattccttgctccccaactattttgagaagaggaggacagttccggtgacctgagggaatacatgaggaattgattacaactctgatttccctgctgtccagttttccagcctgacttatatttatattttattcaggtccaggattttaggttatcaagcccaacctgtttttttctttcccccaaacagctgagatttaaacaattcacctgtttaaagtgtacaattcaatggtatatatttttggtgtattacactattaatattttaaattgaagtaaaaataaattttttttagtgtacagttcagtggcattgatgacattccagcctgtttttagagtccaagtattgattcagctttgaagtcaggagatgtcttaggatcaatgcctttctaggctttattaagtcaatgagaacctgaaagtggttgagactttcgggaataggatatttgcttcaagtatgattgaacagagcctggaatttgagtgagaagcctaggatgggcttctaattccaccatctagtaggtgaataaacttgactttttttttttttttagacggagtctcactctgtcttgcccaggctgaagtgcagtggcacaatctcgactcactgtatcctctgcctcctgggttcaagcaattctcctgcctcagcctcccaaatagctggaattacaggcacctgccaccacacctggctaattttgtatttttagtagagacggggtttcaccatgttggccaggctggtctcgaactcctgatctcaggtgatccacccaccttggcctcccaaagtgctgggattacaggagtgagccaccgcacccggcctaaacttgacgttttactcatccttttgcccctcaagttccctcacttgcaaaagaagtatagtgctggtccttcccacagcagagatagggcccagccctttcagccttactctgctttatcttaaggtacactcaaaatcgtggtgaacactgtggtcaccaagggatagacagttttacaactcttctgaaaggtagaattcttaaaaataagagattaggctgggcacagtggctcatgcctgtaatcccagcactttgtgaggccgaggtgggaggattgcttgagtctagaagtttgagaccagcctgggcaacataacgagaccctgtctatacaaaaaataaaaaatgagctgggtgtagtggcttgcacctgtcgtctcagctactcaggaggctgaggcagggggattgcttgagcctgggagctggaggctgcagtgagctgtgatcgtgccactgcactccagcctgggtgatagagcgagaccccgactgaaaaaaagaaaaaaaaaaaagattacaaaacaagaacataagcaatcaacttaatgatgggcttcattttcattttaaaaaaatcatctggccaggcacggtggctcatgcctgtaatcccagaactttgagaggccgaggcaggtggatcacctgaggtcaggagttcgagaccagcctggccaacatggtaaaaccctgtctctactaaaaatacaaaaattagtcgggcgtggtggtgggcgcctgtaatcccagctactcaggaggctgaggcaggagaatcacttgaacccgggaggtggaggttgcagtgagctgggatcatgccattgcactccagcctgggcgacaagaatgaaaccccatctcaaaaaaaaaaaaaaaaaatcatcttgtgcggattcagcaagatgttatgctggtggtgggccatgaactgacacttgttgaatgaggatacatccttatcccacacaattcagtcaatccacaccctgttatcaaatttgttttccagctcattatttttcccatttgagattaataatacaatagttattataatgagccctttgtatatacagattatcttttatccattagcctcatggatgaatagaataggacaattggatcaggcctcacatcctgtggtggagtctggctgtgcattgatgtcctggctttgccactcatattaactaacgtacccttggtcaagacatttcacatctctgaacctcaggtccctcattctaaaaaggggatcataacaactgtcctggttctaaaaagataatgaaagacggaactgtggaaggaaaccttacatatgcggcaggtattaagtattagcacccataccaacccatttcacaaacattctttcccctgagccctctggaagacttgtttatgcctctagccttttgacaaggtggttccttgtccctcccctggaccccccaacacccatggagacctggatctcccccaaggctaccctgctgagtgaagcgtctgcttattttcccagaaattgacatcattgttccaagttccttactgcttcctccacaacactgttctttcatccttggtggggagaaactccattgtgtttattttattttattttttgagatggagtttcgctcttgtcgcccaggctggagtgcaatggcgcgatctgggctcactgcaacctccacctcccgggttcaagagattctcctgcttcagcctcctgagtagctgggactacaggcacccgccaccgcggccggctaattttttgtatttttagcagagacggggtttcaccgtgttaaccaggatggtctcgatctcctgatctcgtgatccacccacctcggcctcccaaagtgctgggattacaggggtgagccaccatgcctggtcgtgtttatttttttaaattaattaattgattttttttttgagacaaggtctcagtctgtcgtccaggctggagtgcagtggcacggtcatagctcattgcagccttgacctcctgggctcaggcgaccttcctgcttcagcctcccctgggatgcatgccagcacacgtgataatttttgtattttttgtagagacaggattttgccatgttgtccaggtaagtcaccaactcctggactcaaactatctgcctgcctcagcctctcaaagtgctgggattacaggggtgtgccatggcgccaggcctccattgtgtcttgaaaggcactgacatttgttctgcaaccttctccctttccttgtcacagtcatctattagtttcaggctcactacccaccccgcaaccccaattctctaaagttccttgacctcgattgactcctccacctcctgccatccttttgggaccctcgatgtccaacataccagccttgtgggcactaaacccaaggccagtgatgcccatctcacttttctattccattgtagctgccacaccccaaactgtctcatttcctggaatatccatttgaaggcctgaactccagcaccacactctctgctgccagtttgccagtcctctcctcagaggccctggccttggagcccttctctcatctgtctcccagtccatcagctccccgctggttttattaacagttcctgtcctctaggactagagctctggcccatcactgcaatcgcagtctttctgtgccctccacctcctcaccctcttgtccttctattctatgcaagcaggaaacttgggtttcataactaagagctatatttctgtagataccttgccagattatagcagattatagctggacaccactacacgatgatggtttctaaactccactaggtcttcagtgactcttgtctaacttgtcgctctagcatctcacactggttatgcgaaatttccaccactttcctaaaaccttccatctcacttcagacccttctgttgtccatgttagcttccttcagtggttggcttcttgccttcacccgaaaaacctcctgtatccgttcccagcaccaatcatcctccaatactcttttttttttttttttttgagacaaagtctcctctgtcacccaggctggagtgcagtggcctgatctcggctcactgcaacctctgcctcccaggttcaagcgattctctctgcctcagccttcggagtaggtgggattacaggcaggtgccaccacacctggctaattttgcatttttagtagagacagggttacaccacgttggccaggctggtctcgaactcccgacctcaggtgatccgcctgccttggcctcccaaagtgctgggattacaggcgtgagtcacccgaagagtgactttttagagtatttgggcggggtgcagtggctcaagcctgtaatcccagcattttgggaggcaaggcaggaggatcagctgaggtcgggagttcgagaccagcctggccaacgtgatgtaaccccgtttctgttaaaaatgcaaaattagccgagctttttggcatccgcctgtaatcccagctactccgggggctgaggcagggacaatcgcttgaacccgggaggcggaggttgcagtgagcccagatcgcgccattgcactccagcctgggcaaaaagggcgaacgaaactccgtctcaaaaaaaaaaaaaaaaaaaaagtcactcttggaagccttaattgccttcctcccctcactgcacccccgcaactctttgctgcagaagtattgttctagggaaccttactggttccaacagacgggtggacctcccaccagactgtgagctagctcctcaaaggcaggcattctctttccttttccttctctcctgagcgctcctgcagttcctggggcgtagtaggggatccacaagcgtttgtgaccagtgaagttctttacaagggtgagatctgcacgggaggacccgagcgagggtctcggcttgccaggaagccggggttccccgggaagcgtggagttcacccgcgcactcgaagtgcctttgcaaagtgagccacgggagggaggagcggtccccgggctgggcgaggcctggggcccagtgcgtccagagcggagggtgacgggagctgcctgtgctggaggaatcactttttaggcgcttgttttggaccattgcacaaacccgggtgcaaaccccaagctcaccagcgtgagtgagctgggccagcagcagggaggagaggggaaggtgggcgaggagggcgccgcgcaccccgaggcccgtgtgggcggtgggaagatcccgggggcggctttggacagccccggcagcgaccccttccccagcccgacaggtgagcgccaggccagccgcggggtggagcccgccgtgcccaccggccaccctccccggtgctaccaccaccgcgcaggtaacttcccttctgggcctgtcccagacccccagggcctcggcgcccgggccatccctcgtccccagggcctctccgccctgcacccccagccccggtgcacttgtggggccgggctcctttgtccgctctctgatggcgccggctccctgcccagcgctgagtcgggtccggccgccagccccgcgctcgcagacctcggctgccgggtgtggcgcggggactggggaacgctggcccgtgcccagtgcggttggagcctgtcccgcgcgtccccgggacgcgcttcttcccgcctccgcccgcgccagcgcccgcacccggatccccacttctcccggccctcgggagccaggagagccctgagatggcgttggcggaagtgaagccccgagcgggggtctgcgaggctggtgatcagcgccggtaacatggcctttctgtcctctccccggtcccagtgcaccccttaaacaacgacccccgcgttttccccgtactagatggttagggcgcatagtgccgaactacgctgctgctacagaatagcttttttgggggcaacataaaaaagaattgtatgtatggtttatatacaacaaaatgtcccattttcagtgtgcaaatcgacgggatttgacaaattatacactcctgtaaccattatcccaaagtgaacattgaccatttccttcaccctgcaaagttccctggtacctcctttctgtcaatccaccccaggccccgcactcaaccccggttctgattgttatcatagcttagctttgactgttctagaacttcatagaacaagatcatcaggtaagtactcttttgtgtctaacattactttttaaatggccatcactgagaaggtgtctctgggtgcttccggtgcttttatttgctctaggcctgcctggtctaatgtgggagccactggtcacatgtggttattgaatactggaaatgtggcaaaatccgtactgagatgtgctctgagtacaggcacctgatttctgaaagcttagtacacaaaaaagatgtcaaatatctcactaatacattcttacattgtgcgttaaaagtgataacatttttggctacattgggttaaataacatatattaacatgaacttcatttgattctttttacttttttaatatggctactagaaacttaaaattacgtacctggctgtgtaatattttttattaggtagtggagacagcacagctctacactgtgctatcctataaacacttggttctgctcactgcatgtaagagtaaatgaaaaacttgtcttgacaccagaaacaatcctcaatggaggaagtgatctaaaacagggccagcctttccctgaacctttgaaactttgttaaacttacttgtgtgcttaaaagaagtagagggccgggcatggtggctcatgcctgtaatcccagcactttgggaggccgaggtgggcggatcacgaggtcaagagatcaagaccatcctggacaacatggtgaaaccctgtctctactaaagatacaaaaattagctgggaatggtggcatgcacctgtagtcccagctacttgggaggctgaggcaggagaattgcttgaacccgggaggcggaggttgcagtgagcccagatcgtgtcattgcactccagcctggtgacagagcgcgactccaactcaaaacaacaacaacaacaacaaagtaggaagaattakgtgtccccttggtattaagttgcatttttacaaaaggtctctaaaatatccaaggtgctttaaaaaggtatcttgtgtttttgaaaaaacagaaaatgagcaattgcttatgtaggggaggaaagagctgatatcataagggtcacggctgacagccttaaacaagagacagattaacaagagagaagcataataatttattgaatcataggtttatgtgacatgggagccttcagaaatgaaaaccccttaaagatgcaagggaaatgatctgattttatgcttggagtccatgaagcagggacagatgagctaatggaaatagactgagtggggaaacccagcaaagcctgtccacattcttcttggcctctctgttgtagcgtttcttcctccccagtatggggtaggacctctttggaatgagggtcttaatttctttatggccagctgttgtatagaaaggtggttgagaggaaggttagagtcatattttttggctttatggctggctttggggggaaaagggttctagtttctatgacttgccttgggggagtatgaggggtgagagacaggagggcaggagaaggtcagagagaaactttgcttctgaggccttcatttttgggttttgttttctgagccccaacacatacaacctaatcacctaaatatattaagacataacatggtgtatctttgaccaaattaagatagaaatctgtttttttttttttttttttttttttggagacagagtctcactctgtcaccagggtagagtgcaatggcacgatcttggctcattgcaaccttcacctcctgggttcaagtgattctcctgcctcagcctcccgagtacctgagactacaggtgggtgccaccacgcctggctaatttttgtatttttagtagagacaaggtttaaccatgttggccaggatggtcttgatttcttgaccttgtgatccgcccgccttggcctcccaaagtgttgggattacaggcgtgagccattgcacccggccataagatggaaatcttagtggtgacaaataaaatttagatcttagtttaaaaaaacatagtcaataatatattcaattttatagtctgctctctttttcaggtaacataagcattttctttcttcctttttttttttttttgagacacggttttactttgttgcccaggttggagggcactggcacaatcttggctcactgcaacctccacctcccaggttcaagcaattctcgtgcctcagcctcctgagtagccgggattacaggtgcacgccaccacacctggctgattttttgtattttagtagagatggggtttccccatgttgcccaggctggtctcgaactcctgagctcaggcaatccgcccgtcttggcctcccaaagtgctgggattacaggcgtgagccaccgtgcccggccacataagcattttctttttttttaacttttttttttgagacgaagtctcgctcttgtcccccaggctggagtgcaatggtgctatctgggttcactacaacctctgcctcccgggttcaagcgattctcctgcctcagcctcccaagtagctgggattacaggcgcctgccaccacgcctggctaatttttgtatttttagtagagacagggtttcaccatgttggccaggctggtctcgaactcctgacctcaggtgatccgcctgcctcagcctcccaaagaagcattttcttatacaaaaatttattaggcataatgtgacttgtacgaatgtatgccagttttcttcaccatacctctacggcatttttccatttcggtaacttttacaaagagagtcatttgaacagtataacagtgccagaataaggtataattaaagcacagtttatttgccccttaatcctgcaggaaaggtgaagtccagtggaacatagaccttgtctttttgtttatctccatattcctaggacttggaaatatgtcaagcatgtaatagatgttcaaataaacattatatatgtaatatatgtatatatataatttatttatttatttatttcagacggagtctcactctgttgtccagactggagtgcaatggtgtgatcttggctctgggtttggattgacaatgttttaagctataaacataggtcagataggtgggtgccctggtgactagtgaagatgtgcgatggcattgaatgtgatcaactgtgttgtgtagagaaaggtaggcccagggacttagggaggccatctgggatggaacatgtatattttgaatagcttcagtttactcagcctgaccatggtcagctagttcaaatggaattcacagctctgacgtgtgataactttagttaagatagtttgttttgaaaggtaagcagaggaaaccacaaaatcagaatgggcattcctttgaggaggacaaataagaagtgggtaactgaaattgttcctacccgaatgcatttgtgctgaatttccaagtatgtaaaaaaattgtgaaattacaaatgaaagtgaaatttatagttattaccttttgttagttactgtctctctctctctctctttttattttttcttttttggtaccgagtctcaccctattgtccaggctggaatgcagtggtgtgatctcagctcactgcaacctccgcctcccggcttcaagtgattctcctgcctcagcctcccatgcagctcrtgtagctgggamcacaggcacacgccaccacgcccggctactttttatatttttagtagagacattgtttcgccacgctgaccaggatggtcttgaactcctgacctcaggtgatccgcccgccttggcctcccaaagtgctgagattacaggcatgagccaccgcacctggtctctctttttatttttgagacaggatcttgctttgtcacccaggctggagtgcagtggcacaatcacttggctaactgcagccttgacctcctgggctcaagcaatcctcctgcctcagcctccccagtagctgggactacaggtgtgtgccaccacacctggctaatgttttatttttcttttgtagagagggagtctcactatgttgaccaggttggtgtcgaacttctgacctcaagagatcctcccacctcagccttccaaagtgttgggattacagatgtgagccaccatgcctggcattatttttctttttctgtaactgtaattttatattgtggtcttactcagttgcccatttgcctgccatgagtacacaaataatactgtttatggtctactttcacatacatggtgaaattacaagagcagaaggcccctgtacacactcaagggaaaaacaatagtactcaaagtaaagaaaatcaagttattgggcttcctataaaacaaaagggtttgaatcagaaagcagcagaaaagtcaaataaattttccttatgactgtcaacttaaaaatcacaagatctataaatttagaaaggagactttcttttttaaaacattttcttttctttttttttttttgagacagagtctcactctgttgcccaggctggagtgcagtggcgtgatctcagctcactgcaacctccgcctcccaggttcaagtgattctcctgcctcagcctcccgagtagctgggattacaggcgcatactaccatgctcggctaatttttgtttgtttgtttgtttgttttttttttgagacagagtttcgctcttgtcacccagactggagtgcaatggtgcgatctcagctcactgcaacctcctccacccaggttcaagcaattatcctgcctgagcctcctgagtasctgggattacaagtgcccacaaccacgcccggctaatttttgtatttttagtagagatgggatttcaccatgttcgccaggctggtcttaaactgctgacctcaggtgatccacccgccttggcctcccaaagtgctgggattacaggtgtgagccactatgcccagcctaacttttgtattttttagtagagacagggtttcatcatgttggccaggctggtctcaaactcctgacctcaggtgttccgcctgcctcagccttccaaagtgctgggattacaggcatgagccattgcacctggccaaaatttttcttacctttcgagtcggagtctcactctgttgcccagaccggagtgcagtggcacgatctgggctcactgcaacctctgcctcccaggttcaagtgattctcgtgcttcagccccgcaagtagctgggattacaggtgcctgccaccacacctggctaattttttatttttagtagagacagggtttcaccatgttggccaggctggtctcgaactcctgatcttaagtgatctgcctgcattggctgcccaaagtgctgggattataggcgtgagccactgtgcctggtgactttatttcttttcttttctttctttctttttttttttttgaggcagagtcttgctctgtcacccaggctggagtgcagtggcacaatctcggctcactgcaacttccgcctcctgggttcaagccattctcctgcctcagcctccctagtagccaggattacaggtgtgcaccaccacacccagctaatttttgtatttttagtagagacagggtttcaccatgttggtgaggctggtctctaactcctgacctcgtgatccacctgcctcggcctcccaaagtgctgggattacaggggtgagccaccacgcctggtttactttatttctttgcaggctgtaacagcctgcaaaggggccatcccacaggctgggaagcacacgttttaaagagacagggtctcgctatgttgcccaggctgttctcaaacttctggcctcaagtgaccctcctaccttggcctcccaaaaccagaggcaggcactctgaaggagggttcagttttatgctgaatgggttggctaaatatacatattcaacaggttacaggaggagctatgaatattcatgaaggtggtcctgactcatgtgtattgaataaacatgaaaatagcatatgacccctgttcactttggggatggagacttaacatttaaatgaatttcagttaagccctatgcatcaaaagatctttccaggacatgaaggcacgcaagtccacagcctctgtaaactggccagagccagtccatggttggtggtcttatcaggagaaagttactcaaatcagtctcttgtccaataaaagctgtagttttgactggtgtaacaggactcagtcagtcagcatctgtgagctagatgagttgtaattattttaatattgcttatttaaaaacagtttttattttttatttttttgagacagagtctcgctctgttgcccaggctggagtgcagtgagccactgcacctggcaagacttttttttttagagtaattttaggctcacagcaaaactmagtggaaagtacagagttcccatacaccctctcccccactgctatgcccagcctccctgactattaacatcctgcacctgcagagtggtacatttgttataatcagtgaacctacattgacgcatcatttttgcctaaagatcataggtttttgttttgtttttttgagacggagtttcgctctcattgcccaggctggagtgcaatggcctgatctcggctcactgcaacctctgcctcccaggttcaagcgattctctcttcctcagccttcggagtagctgagattacaggcatgcaccaccacacctggctaattttgtatttttagtagagacggggtttctccatgttggtcaggctggtcttgacctcccgacctcaggtgatctgcccgcctcagcctcccaaagtgctgggattacaggtgtgagccaccgtgcccggcggaaagtctgtagtttatttacatcagggttcgctcttcctgttgtccattctgtgggtttggataaatgtgtaatgacatgtatccatcattacagtattatacagaatagtttcactgccctaaaattcctttgtattgtgactattcatccctctctccctcctacccgctgacaaccactgatctttttactatctctctagttttgctttttctaaaatgtcatatagttgaagtcatacagtatgtatgtttttcagattggcttctttcacttggtaatatgcacttgagattcctccatgttttttcatggcttggtagcccatttttttttaacaccaaattatattcctagagattgttgtatattttccactttacagatgaaggaataggcacagaaaggataaataacttgcccaaggccgggcgtggtagctcacgcctgtgatcccagcacttggggaggccgaggtgggtggtcacttgagaccaggagttcgagaccagcctggccaacatggtgaaatcccatctctactaaaaatacaaaacttagcccagcatggtggtgcatgcccgtaatcccagctacttgggaggctgaggcatgagaatcatttggaccggggaggtggaggttgcaatgagccgagattgtgtcactatactccagcctgggcaacagagtgagaccctgtctaaaaaaaaagaaaaaaaaaaaaaaaagaacttgcccaggtacagtttgtacagatcagtctgacactggagtctgagctcttaaacattttagcatgcctgtgaatcctagagaaatttggtttatcatgatgaagtttgttgcatgataragttgaggtctttggaaacccagggcaacagacctaggcactttgcttgcagaaggtatctacagctttctgtatagtgacaacaataaaaagcctagaagataagactttgtttcaaaaaattcaagtatttagtttggacagaaaactgctgtgtgcttttgaaattttggtgagacgaagcatggtggctcacttttgtaatcagcatcttgggaggccaaggcaagaggattgcttgagcccaggagtttgagaccagccagggcatcatagtaagaacctgtctttacaaaaatgttttaagaattagctgggagacgtggcacgtgcctgtagtcccagccactctggagcctgaggcaagaggattgcttgagcccagaagttcaaggttgcagtgagctatgaacatgccactgcactccagcctgggtgacatagggagacactgtctcttaaaaaaaaaaaaaaattctgagctaggtgcggtggctcatgcctgttatcccagcactttgggaggctgaggcaggtggattgcttgagctcaggagttggagaccagcgtgggcaacatggtgaaactccgtctctacaaaaaacccacaaaaattagcagggcgtggtggtgctcacctatagtcccagttactaggatgctgaggtgggaggatcgcttgaacccagcgagcagaggttacagtgagccatgattgcaccactcactgcattccagcctgggtgacagtaagactatgtctaaaaaaaaaaaaaaaaaaaattaattctggttgaatrcactgtctgctttactagttttaaatatttctctttccttatccataattttattgcctttcagattatatctgggtgttggcacccagccactattctgccaatgaagtacatcctggtcacgggtggggtcatctcaggcattggtaaagggatcattgccagcagcattggaacgattctaaaatcatgtggactccgagttactgccataaaaatcgacccctatattaacatcgatgctggcactttttcaccttatgaacacggtacgaaagtgaaccacttcccccttatagcactaggctcaactgcattctttcttccattttgggtaatttctttaggatgtagttccagatttagagtgactagatcgtatgctatgaatatgtgaattttctcatggtcattgatacattgttcatacctctgatgacattccaaattaatcatcccttttggaaacattgtatcttttgcactacagattctgttttatttttaacataaaggtagtgtgtttctcttaacatttcccactgcctggagtaactattattaatggtgacattttgatgtatgagtatatttgatttatttttaaaatggcattagcccttacatgctatttttaaaaaactttttataaggcccagtgcggtggctcatgcctgtaatcccagcactttgggaggccgaggcaggtggatcacgaggtcagaagatcgagaccatcctggctaacacagtgaaaccctgtctctactaaaaatacaaaacattagctgggcgtggtggcacgtgtctgtagtcccatctactcaggaggctgagacaggagaatcacttgaacctggcaggcggaggttgcagtgagccaagatcgagccattgcactccagcctgggcgacagagcgagactctgtctcaaaacaaacaaacaaacaaacaaacaaaaacaacaaaaaaccaacccccaaaaaaacctttttatatacaagcaaaaaagtgcataaatcataagtgtacagttggatgaattttcattaaatgaacacactgtgtaaccagcccctgatcaagaaacagaaatgttcatgtcctgccgggcgtggtggctcacgcctgtaatcctagcactttgggaggctgaggcgggcggatcacgaggtcaggagatcgagaccgtcctggctaacacggtgaaaccccgtctctactaaaaatacaaaaattagccgggcgcggtggcgagcgcctgtagtcccagctactcgggaggctaaggtgggagaatggcgtgaacccaggaggcgaacttgcagtgagccgagattgcgccactgcactccagcctgggtgacagagtgagactccatctcaaaaaaaaaaaaaatgtttgtgtcccttgttgctatcctgtcttcctgtttttgttttttgagacagggtctcactctatcgcccaggctggagtgcagtggccaagatctcggctcaatgcaacctccacctcctgtgctcaagtgatcctcctgcttcagtcccctgggtagctgggattacaggtgtgcaccaccacacctggctaatttatgtaatttttttatagagctgggatttcgccatgttacttaggctggtctcgacctcctgggctcaagcaatcctcctacctcggcctcccaaagtggtggtattacaggcatgagccactgcaacaggcatgagccactgcaccaggccttgaatatcgtgttttaaactttactaacctgagaataaaacaaacaaaaagagggtatcttattgttttaatttagagttctttgattttgattttgtttgtgaatgacttattcaagtctgtggtagattgtatttttgcttcaaaatgttacccaccatccctctgtggagtacatttccctgccctttgaccttggagtttggccacgtaggatagttaacttgtcctggtttgtttggaatgttcctgattttaaaacagaaagtcctgtgtcctgggagccctcttagtcctgggcaaaccaagcaggttggtcactctatttggccatgtgatttattttgtcctatgggatgttagggaatattaacatatgccttgttgaagcagaaaatgtcaaatgcatctgtgtggtttggctcagtctgtcttgtgcttctgccctctaccatgagaacagcctggttttcagagatttctcgttcagtctgggtcctggaatgagaagacacaaagaatagactcacaagtgactcatagcccccatgtaacatgagggagaaataaataaatgttttgtaagttgcagagattttggggttgtttgttgtgtggcaccattgactaatgccatgtgttacaccaaattttctttggatttttttttaatgattttttttttctttttttgagacagagtctcactctgtcgcccaggctggagtgcagtggtgtgacctcggctcactgcaacctccgcctcccaggttcaagcgattctcctacccagcctggcaaacatggcgaaactctgtctctatttaaaaaaataataggccgggcacggtggctcacgcctgtaatcgcagcattttgggaggctgaagcaggtggatcacgaggtcaggagatggagaccatcctggccaacatggtaaaaacctgtctgtactaaaaatacaaaaaaattagctgggtgtggtggtgcacacctgtaatcccagctactcaggaggctgaggcaggagaattgcttgaaccagggagtcagaggttgcagtgagccgagatcgcaccactgcactccagcctggcgatagagtgagaccctgtctcaaaataataataataataataatggtaatacaaagattagccaggcgtggtagtacatgtctgtaatcccagctacttgggaagctgagacatgagaattgcttggatccaggaggcggaggttgcagtgagctgagatcacgccactgcactccagcctggttgacagcgaaactctgtctcaaaaaaaaacattgaaaaaaaaaattgaaaaaaaaagtattgtgatatcaatttgcttttttccttaaaattaattttctagaccacagttatgtaccttagaatggataaataaattaggatataaaaggcttctgattaaatttgtaagttaatcaaccttttttcctgtggacatctaacagtaggaataaatgatagttcccttaataggggaaaggttcaattcttacaaggtggctttagaaacatacgactctcagtccatgccctgaagtgacaatagagatctacagacgtgtctagtagttaaagttggtgctcctcgtgtgacgaagtctgcacctgtcttttatgacagtgcattgtgcacgtagcttatggcacacacaggctttttccctcactttcaccaagttgccttatgggttagctgtggccttgctttgtcatctactgtctaattatggctttaatcaagatgagaatcaagtaaaagtttcttatcgcagttccagagtccaggatactgatgctttgaagtaaaatgctgtttgtttttaaaatttctgttttcatgtcttttttatgtggcatatgttgagtttggaaaagctaaatcttgaagacagaatttcagtagattaaaaaaaaaccacaatagaatattataaatagaattttctgatgcattttcttggatataattgaattgttaatatytccaccaaaaaggagatggtgatagaatatggcttacaaatacatcttttaccagctttttaacaaaaatatgtccatctttgaaaaatctactggaagcaaagttttgatttttccattgcctttttaatcctaggtgaagtcttcgtcttaaatgatggtggagaagttgatttagaccttggaaattatgaaagatttttggatattaatctttataaagacaacaatatcaccacggggaagatatatcagcatgtgatcaataaagagaggcgtggtgattacctggggaaaacagtgcaaggtattatattccacagacattatggagccctgtgtgctgaatatctttgtactgctcaaaagtagaactgaaggccgggcacggtggctcaggcctgtaatcccagcactttgggaggctgaggccagtggatcacctgaggtcaggagttcgagaccagcctgaccaacatggtgaaaccccatctctactaaaaatacaaaaattagccaggcatggtggcgcatgcctgtaatcccagctattcgggaggctgaggcaggagaattgctcgaacccaggaggcagagattgcagtgagccgagatcgtgccactgcactccagcctgggcgacagagtgagactccatcttaaaaaaaaaaaacaaaacaaagccaaaaaaaccaagtagaactgaaaatgtcacagtccctgcgctctacaagttctaattcttttaaaattgttgcgtttttttcttttcattttccaaaaatatgtcagggtaacttgccaggtgactttcaggtgattggggaggcctaaagcacattcttttctcatgagcatggaataaacttttgtattaatacttctttctacagttgtccctcacattactgatgctgtccaggagtgggttatgaatcaagccaaggtgccggtggatggtaataaggaagagccccaaatatgcgttattgaggcaagcatagaactttctttataaaattatatcctgctgggtctttgagcatctgatcttcatttatttgacaaatacttacacacgccctcctgagtgctggacactgggctaggaggtggggtcacagcaagaaacaacatagatggcttctgtctttgtggtcacaagtgagtgggcaagattggcattagacagacaatcacacctactcctgggtggacrtgcagtgatctgcttgtggagactgatcagctgctgataaagtcaatgtgagggcctcttctgtgccggggcctgggatgggcacagtctctgaccttggggagcttgcagacaaccctgtctacacacaacagactgcattctagtgcatactatttgaaaagtatttccgaagtgctttggaagtgtaaagagacactgggttagggaagtcagatggtagcggtgataagtgattagtatcagctgtttaaagaaagaagctagtggctgcgcgaggtggctcatgcctgcaattccggcattttcagatgccagggtgggaggattgcttgagtccatgagtttgagacagcctgggcaacatggcgaaaacccgtctctacagagactacaaagattagctaggcatgttggtacgcacctgtagtcccagctacttgagaaggtgagatgggaggatcttttgagcccgggaggttgaggctgcagagagcagtgattgcaccagcacttcagcctgggtgatggagccagaccctgtcttaatttaaaaaaaaaaaaaaaaaaaaaaaaagtcgtatttgaacttgccacttgtttacttccttcaccttgttcccttcctctccacgtgcagaatgacaataacatccatatcctcctcctctaaatgtcagttggcttaattgccgggcgaaagagcagaataatgaccaatttggttcttagagtcaggctgcctcagtttgtatttctgcagtgacccctgagccacgtatagctcagtgattaagagtctggaggcaaactgtctgggtttgtagcctagcaaggtcacttatggggaggagggggtgaccttgggcaagtttgctcaacctctctgtgcctctttaactcatttaactcatttgtaactcattgttttgaagattaaataagtctctacacttagtgcttagaatggtgtcacagatatagtaagtgcttaaaaattattagctattattaagatgcctgtatgacttttggaaaattctcacagtttcaacgtcctcatttgtaataatgtaataatataatattataataataagataataacaggattggggattaaatgcaatgtatcagagcactttgcaatgtctggcatttaggaagtgctcagtgaacataagttagctattattattgtcatcaatgtaagtgttagcagatatcatgatatgtagaagatccattttgttaatagtagaactgataaagttactggctatttattttttatagatagggtctcgctatgttgcctcgggctggagtgcagtagctatccacaggtgcgatcaaagcccactgcagcctcaaacttctgggctcaaccaatcatcttgcctcagcctcccaagtagctgggactacagtgtaccaccactatgcctggcaaatttttaattttatttcttattctacccttgaattgacttgtcttcacaatgattaatttagcacttaatatgtactagccctgatgatagctgctaaggatgtgaggttgagtgtgatctgactcctgctctccaggagctcattggctggattttaaatttcatggaaacagggaaactgacaaacagaaccccttctccgttataaccctgatgtttatatttgcttattggatactagtggtcaaccatcctctttggttgattgtaagttgtgttcaacagttgtgtctgtgcaccatttaagcttttgaagaaggactgccaaagctgatttttagttttaatcatagaggagctgttgaaatgtcttcaaagccatttttatgagtgagacctcaacttctcataccagtggagctgacaggttttatttatattagtacgagttatcttggcatgaacctgaaataatttatgcttgtcttaaaggaataacagttttctttcttcttgtttattttccaaaaaagaagactcagccaagtgtggtggtgcaggtctgtagtcccagctacttgggaggctgaggcaggaggatcatttatacccaggagtttgaggccgcagtgagccatgatctcactactgcactccagcctgggtggcagagcgagactctgtctttaaaaaaaatttaaaaagggccgggtgtggtggctcacgcctgtaatcccagcactttgggaggctgaggcgggtggatcacgaggtcaggagatcgaggccatcctgtctaacacggtgaaaccccgtctctactaaaaatacaaaaaattagccgggcgtggtggtgggcgcctatagtcccagctactcaggaggctgaggcaggagaatggcgtgcacccaggaggcggagcttgcagtgagccgacatcgcgccaytgcactccagcctgggcracagagygagactccatctcaaaaataaataaataaataaataaaaataaaaaaagaaaaagaaaaaagactttcattaaagacaaaggcaaaaacaactttgcacatctcataaatttgctgctgcttccatttcagcataaagtattgttataggtgatattttcccttttatctggggcaacagttaacttcaaactattccagtagtaatattgaaggtttctgaacacgataatgtgggtgacctagaggtatggtaatgggaacttctgaattagcagggagactgtagtaccgctgctgaccacgtgagggcagaagctgataatgtttgaagttggcctccttttggcattcactattattgaccccccagagaatccccatcaaaacacaagatggaagcacacggtttagtttaagtgcagacctctggttttccttagaaaaaataaatgattttcaaaaattagattttggtgccttgtatttagtgggtacttacactcacttcacccctgccaagttcctgattgcatgtgatgttttcatttcgttgagttgttgttgttgttgttgttgttttttaaagagacagtgtcttactctgttccctaggctggagtgcagtggtatgatcatgactcactgcagcctggacttctccaggctcaagcgatcctcccacctcagcctcctgagtggctgggaccataggcgccgtgccgccatgcccagctaattttttatgtttttgtggaggcaaggtctcactttgttgcccatgctggtctcaaactcctgtgctcaagtgatacacctgcctcccaaagtgttgggattacaggtgtgagccactgcacccagccctggctttggttctgctgtaattttggtaacaggtactagaacactgttccttagggcttatattgaatttcaggacctttctgtcctggcccgactactaaactaaacctccagtgctgcatgcagggtactgggctcatgccctcatggggcttacagtctagtggggtagagagccaggaaacaaagacggaaatgaaatagaggcaacttgtgctgaattcctaggatgggtacagtgctgtgacaagggctagtgggatataggctgctttaggtggggggtcagagtctgccctccaaggagggtcagagtccgccctccaaggaggatgcatctctcttggactggaggataaagaggttgctgtagatgaagaaggagggtaggagggcttaaggagcaggaaggaagagcatggagtacccaagaggccagcggggaggggaccagatggcattggagactcagtgcaagggccaggtcctgagagccttttgttggctgcattaaggagatttgatgctagttttttgtttttgtttttgttttgagatggagtctcgctctgtcgcccaggctggagtgcaacggtgtgatctcgactcactgcaacctctgcctcctgggttcaagcgattctcctgcctcagcctcccgagtagctgggactacaggtgtgccccaccacgtccagctaatttttgtatttttagtagagacagggtttcaccatgttggccaggatggtcccgatctcctgacctgtgatccgcccgcctcggcctcccaaagtgctgggattacaagcatgagccactgcgcctggccttattgttagttttaatgaagcaatgggctactgaagagtatacacgtggagaaatcttttttgaagttttattttttatttttatattttttcagagaaagggtctcgctctgtcatctaggctggaatgcagtgggatgatcatgactcactgcagccttgacctcctgggctcaagtgatcctcctgccttggcctcccaaagcgctgggatcataggtgtgagccgccatacccagccacaatttagtgattttgaacgtatttataaacctctgtgtaaccatcaaactttagttctcatgctcggtttattaagaactctttttattagcttgtgtactgtgggagatgtgtggtcatttgtgtctttttttgtttgttttccattcccagctgggaggcaccattggagacatcgaaggaatgccgtttgtggaggcgtttagacaattccagtttaaggcgaaaagagagaatttctgtaatatccacgttagccttgtcccacaggtgggctttccagataagtatgtggacagcaactttgataagttttcctatgatattctatgtgtcctgcatttgaaagtggggcaccattaatcatccataggagctagtgtccagtgtgctgacgggaccccattttttttcagctcagtgctaccggagaacaaaaaaccaaacccacccaaaacagcgtccgcgcactgaggggtttaggcctgtctccagatctggtgagttgaggacagtgggtaagtctatcctgaaggtctctgggagcaggaccttcacttcttttttttttttttttttaatttgagacggagtcttgctctgtcacccaggctggagtgcagtggtgcagtcttggctcattgcaacctccgcctcctgggttcaagcgattctcctgtctcagcctccagagtatctggactacaggcacatgccaccacacctggataattttggtatttttagtagagacagagttttgtcatgttggctaggctggtcttgaattcctgacctcaggtgatccgcccgcctcagcctcccaaagtgcttgggattacagccaagagccaccatgcctggctgcccttcacttctttatctttatcatcatctaagtcctttctcattctcaaacggctcctgtgacaatgaggtttttctatctgggagccggaaaaggcktattcccttagcctcaagtgttgcttcaatctgttcttccctaggctctcatttgatgggccacattgatagttgggcaagtgtgatgtcctgtcatttatatgattcctggattctttagaatgaaggtgaaaccttgggattttcctgtgaccctgctatcaatgataaccctgtgatgggttatcactgctctttttttctttttgagacggggtctggctctgttgcccaggctggagtacagtggtgtgatcttggctcactgcaacctctgcctcctgggctgaagtgattctcccacctcagcctcttgagtagctgatactagaggtgcacgctaccacagcgcactaatttttgtgtggtgtgtgtgtgtgtgtgtgtgtgtgtttgtagagacagggttttgctatgttactgaggctggtctcgaactcctgggttcaaccaatcctcctgccttggcctcctaaagtgctgggattgcaccacgcccagtccgctgctcttatttttagtctaaacagtgatgtgtccttatagcaggtgatccagtcatcaccagtagtctctgtcagaggttgacaaataacagcccacaacttgcttgcctgtttttgtaagtaaagttttattggcatgcagtcacacccattcatttacatattgtctgtagctgctttcacactgcacctcaattgaggatcaggacagtgactgtgtcacctgcaaacctaaaatatttcccatctggcccttttgagaaaaagtttgttaaccccgatctagctcttttcttgtagttaatgaagcaacacttgtgagcctggactctgttcaccagagacgtctcgatgtttcgagttcttactgatacacttatgctgaatttgattatacttatattagtgctcagaccaatttctaatagtccagtggaatgtccaaagtgaacaagtacatacttggccaagtttcttgtaaaaagaaatgaatgtggcatcctgctgaaagtgaatcctgtttgctgaagcataactggctttgacagattgtctgccgaagttcaacgcccattgagatggccgtgaaggagaagatttctatgttttgtcacgtgaaccctgaacaggttggtgctgctctttagattttattgtctggcaggyacttctgctgatgccagtgttttgtacctcttcaatgatcatattacttttcacggcatttatgcaagcactggggaaccctgatccaaccatgattccctagcccttaagtgagataggatgcatgtttctttgcatgatcactcaacttatgtcacaaaaccagggtgggctttcttttcttgagacagagtgtcactctgtcacccaggctggagtgcagtggcatgatctcagctcaccgcaacctctgcctcctgggttcaagcaattctcttattttagcctcctgagcagctgagattataggcatgcgccaccacgcctggctaatttttttgtatttttagtagagatggggttttgccatgttggccaggctggtctcgaactcctgacctcagatgatccgcccgcctcagcctcccatagtgctgggattacaggcgtgagccatcgtgcccagtaccagggtgggtgtttaactcacagtcaaacctctagagagagaaccacatgaagcctacttatcatctctttatcttgtgtttccttctggaacacttactgctttcactcatttctcctctctacctgtggcagcttaagtcaccccaaacacacgagcacgttgacattcgcactagctcttctgactccatcagtgggctcagttgacttcattggtacagaaactgtactgtgatttgggcttaggttctctgctctgtagggctttccaccttggtattctgataattcgcttttcttttttctttccttctctcatctctgtctcttgattccaataaggcttggttataagggattggagttacctatagtttaaagagagtgatataaatggtgctcaggaaaagggtgaggtttggcagaaatcttttcttcagattataactctgggttctctgaagtctaaaaatgatsaaattgaattttggcatcttggaaaatagtctgatggagagccccctgcctgatgcctcagagtcattgccgaagtctgaactactttgaaaaatgtgatggcagattgaagggacacttctgcatctgtatgttgatatgttgtcatgccattttgtttgcgtccaatctttttttttttttgagacagagtttcactattgtcacccaggctggaatgcagtggtgcactcttggctcagtgcaacctctgcctcctgggttcaagcgattctcctgcctcagcctcctgagtagctgggattataggtgtgtgtcaccatgcctggctaatttttgtatttttagtagagatggggtttcaccatgttggccaggctggtcttgaactcctgacctcagatgatccgcctgcctcagcctccaaaagtgctggaattacaggcgtgagccaccacacctgacctgtccaatcgttttgtgtacacttcttttttttttttgagatacagtcttgctctgtcacccaggctggtatgcaatggtgcgatctcgactcactgcaacctccgcctcctgggttccagcgattctcctgcgtcagcctcttgagttgctgggattataggcacatgtcaccatgcccagctaatttttgcatttttaatacaggtggggtttcaccatgttggtcaggctggtctcgaactcctgacatcaggtgatctgcccgcctcggcctcccatagtgctgggattagttttctaattaaatgaagctaaccttgtgcaaattctgatgctagctttggttgctgggtttttgtgtgtgcgtgtgtgtgtgttatatcagtgtaaataaactgccagtctctgctgaattttgtttcattcttgtggtggcatatttgaatagatccatctaagtatggtgatttctcatcgccacttaggtcatatgtatccatgatgtttcttccacataccgagttcctgtgcttttagaggaacaaagcattgtgaaatattttaaggagagattgcacctgcccatcggtgattctgcaagtaatttgctttttaagtggagaaatatggctgacaggtaagcgaaaggaattacttgtataatctttaataatttttgagtttgggggtagaactaagacctacttgaaagggtragcgtgtgtatttggcattttgcgtgtgcacattttggtctggatatgtctaaagatggagcatactgttgcggtgctttgctgtattatttgaagatttctggagcctttgattttgttatacataaaccaaagtgaattaaaggaattcgaattctggaaggaatgtttttttagctctggaaggattctgatttatttgatttatttgctagttcattttttagtttctgaatatttaaaatttttttttgtttgttttcttttttcttttttgagagtcttgctctgtcacccaggcgggagtgcagtggcacgatctcggctcactgcaacctccacctcctgggctcaagtcatcctcccacttcagcctcctgagtagctgagactagaggcacacaccaccacacccggctaatatatatttttttttttttgtagagacgggatttttctatgttacccacactggtcttgaactcctgggctcaagtgatctgcccaccttggcctcccaaagtgctgggattataggcatgagccaccatgcctggccttaaacagttttaaacttcacaggttttttgttttgttttgttttgcttgtttttaagatttggctaacttttcctaaagaaaatcattttggatgggaacttttggctatgctagttttgtttcatcctgcattcattaactgttcagcataattattaaaactcctgatggattctaactttcagacaagtatattaatttaagcaaagtttctctattttgaagttatatgaaaattaagctgtgtgcagtggcacttacctgtagtctcagctacttggaaggctgaggtgagaggatcacttgagcccaggagttggaggccagcctgagcaacatagcgagaccctgtatcttaaaaaaaaaaaaaaagggaaattaagtccctgtcacttgttttctttttttttgagatggagtgtcactgtgtcgcccaggctggagtgcagtggtgcgatcttggctcactacaacctctgcctcctgggttcacgccattctcctgcctcagcctcctgagtagctgggattacaggcgcccgccaccatgcccagctaattttttgtgtttttagtagagacgggggtttcaccatgtttgccaggctggtctcgaacttctgacctcaggcgattcgcctgtctaggcctcccaaagtgctggggttacaggtgtgagccaccgcgcccggccctgttttcttttactaaatgtagttgagatgggacttcttgggcagcttaggtgagcgccagtaggtgcagctgttacgtatgtaggttctggactcaaatcctggcctcttctcttaccagctgtgtgagtttgggtgattacttaacctatctaggctttttttcccttctgtatataataaggggataccagtgcctacctagtggcaattatgagaggaaaccttaaagacttaacattgagtcacgtactataataagtatcggttgctgatgttggtaaccataattaaaatgatggtgacaaaattactgacccttggtagatgactaatcagattgaggctctcttgctctttcatttacaattttaaaaaatgctttagattttctggggcaagtggaatcaggaaggaagagcagtttctgagcttagattctctaaaacccttgctctctagagtgcttaaagtgccagtcatttcacaggaattttctaagtagcttggggctgatacactttaagcactagaagttttaatattttaactctttttattggaaatagctctaaattatactctatgcgtttatgctttttttctttttcttttctttcttttttttttttttttttttgacacagggtgttgctctgttgcccaggctggagtgcagtggtgcaatctcagctcactgcagcctcgacctcctgggctcaagcgatcctcctgcctcagcgtccccagtagctgggaccacaggtgcgctacaccacggccaactaatttttgtatttttagtagagacggggttttgccatcttgctcaagtgatcttcctgcctcggcctcccaaagtgttgggattacaggaatgagccatatgcctggcgcttctgtgctttttaaagccacatgtttggtctttgtattagcttcctgggggctgccataacaatgaccactaactgggcagcttaaaaaaacacaacaggaatttattctctcacagtcctggaggtcagaagtgcaaaatcaatgcatccacagggttggttccttctagaggctctgcaggagattctctgccacaccccttctcctggcttctggtggctgccagcaatcagtggtgttccttggcttgtggccacatcactccaatcttgtcctccatcttttatttccttatttattttwttttttttgagatggagtctcactctgtcacccaggctggagtgcagtggtgcaaccagggcttaatgcaaccttgaacttctgggctcaagtgatcctcctgcctcagcctcccaggtagctgggactacaggtgcatgccaccatgcttggctaatttttgtgttttttatagagacagggtttcaccatgttgcccagcctggtctcaaactcctgagctcaagcaatccacctggtttagcctcctaacgtgttgggattaaaggcgtgagccaccatgcccagcctttggcctccaggcctccatcttcacatcaccttctcacttgtgtcttcttcccttctcttcttttgtaaggatgcttgtcattggatgtaaggcaggccctaatccaggatgatctcagctggagagccttacttatgtctgcaaagaccctttttccaaacaaggtcacattcacaggttttggggacaaatttctttgggggggggccaccattcaactcactacagcctttttatttttaatttttatgggtacatagtaggtgtatatatttgtagggtacatgagatatttggtacaggcatataatgcattataatcacatcagggtaaatggagtatccatcacctcaagcctttatcctttctttgcaatacaaacaatccaagtatactcttttatttatttaagaatgcacaataaattgttgacaattttcaagcaaggagatattgtgcatgggtgcctctgcagcactgggcctccctctgcatcacattggtggtgacattgttaattgatgcgaagtgtccattctttagctttggtcctctcagtatagcctgtagagaggtgcaaggagccaaacggaggccaaaggaacagcctctatcatggaggcccagtgctgctcagaggccaggggtccctgattaaacagggacagcttgcctgggacccgaagtcaaggtgggcacaattctccacctcctcctattcattgtcttttttttttttttttttttttttggagacagagtctcgctgtgtcgcccaggctggagtgcagtggtgcgatctcagctcactgcaagctctgcctcctgggttcatgccattctcctgcctcagcctcccgagtagctgggactacaggcgcccaccaccacgcccggctaatttttttttttttgtatttttttagtagagatggggtttcaccatgttagccaggacgatcttgatctcctgacatcgtaatccgcccacctcggcctcccaaactgctgggattacaggcatgagccaccacacccagccctcttcatctctcttgagacccgactcttgggggtggccctgcaaagaggactcccctccccctcccacagcagcttgaagtagtatcacatgcttgcctcacattcggtgatggctgatggctgagtggggcacatgagggagaccttggttgctctcggaagtacaggtccaagggggaatgagagctccctggtaggtgtgacccagtggactcacctgtaccacctgctgcccagtgactcctcccctgggaagaccagctgtgagtgagccgtaggagtaacctgtgatactgaccccagtgctgcttccttccgggggcagagctgatgttgtctcttctgtctatggaggagggagaagggggtgaagccaaatctgctgttctcaaatgcggctctgcctgcctgcctctgacatcatctctactacttggtgtgctgtcatcctgctttctgttacccgcatcctcttttttttttggagaagaagtctggctctgtcgcccaggctggagtgcagtggcatgatctcggttcactgcaacccctgcctcctggattcaagtgattctccttcctcagtctcctgagtagctggaactacaggcgtgcaccaccatgccagcctaatttttgtatttttagtagagacagggtttcaccgtgttggccaggctggtctggaactcctgatctcaagtgatctgccggccttggcctcccaaagtgttgggattacaggcatgagtcaccacgcccggcccgttacctgcatactttatggagaggtggtgtgagatacagacagctgtgaaacctccagagcaacataaaataaagtagtgagttcaagggttagcagcttgaactattttagtcaccttttagtgaccttttatcagctattttagtcatctttctagaaagttaccttccctgtcagttttgacttcttagcttcttgtgcattattcccacacatagcctgtttgtgatctagtttctcttgtactctttacagatatgtgttctttttgtttttgtttttttttttttttttttggagacagagtctcgctctgtggcctaggctggagtgcagtggtgcgatctcggctcactgcaacctctgcctcccgggttcaagtgattctcctgcctcagcctcctgagtagctgggattacaggtgcgtaccaccacgcccagctaatttttgtatttttagtagagacgaggtttcaccatgttggccaggatggtctcgaactcctgacctcaggtgatccacctgccttggcctctcagagtgctgggattacaggtgtgggccaccgtgcccggccactctttgcagatgttgatattcaagagagatattcgtcatcatggtaacatttttctaaggtgtttggggaagggtttgcttcaaagccctaaaacaccttcagccccaagatgacatttccacgtacctaataccaaaccagatatttttcatgttctttgaacagatttcctgacaaaagcaacactaaaaattgtgtctctaatggtaaaatgtgatcgagtgtcttctgtagaatggaatttttctcataaaaatgatctaaatggctagtaatattttaaatcgttctctcagcaccattcttcaggcatgccatgaataaccagacttttgtgggtcagctgggaatgtaaccattttaaatgtagacactttgaatgcattttcttacacaatgtcaccttacaaagttaatattggaatgtttcctactgacacgcagaatgcattttttttatacaatgtcaccttattaaccaatgtaagaatagctcatgtttatgagattgggatagcttttcaatttttacttttaatgcttttaactttttctctgatatacttgaatttttatctgtayctgcttgtgtaaaacaacgttgggatttctgtttttgttttatgagacagtgtctcactgtgtcgcccaggctggagtgcagtggtgtgatcatagctcactgcagccttgrtctcctgggctcaagtgatcctccaacctcagcctcctgagtagctgggattgtaggcatgccccaccacgcctggctaatttttgtatttttttgtagagacggggtctaactatgttgcccagtctggtctcaaactcctgggcttcagtgattctctcgcctcagcctcctgagtagctaggactacagctgctcccgaggatttaaaaagtgccttggagtaagagcagcagctgccattgttctgtttgtgatgttctgttatgtgcatataacctttgagtttgttttctttcccaggtatgaaaggttacagaaaatatgctccatagccctggttggcaaatacaccaagctcagagactgctacgcctctgtgttcaaagccctggaacactcagccctggccatcaaccacaagttgaatctgatggtgagtcctggcctggtcttttggctatctcagtaattcatgccaatagcacatgttccagaggggcaagttttgttaaagggtccctgagatcacctgcaggacttacgattcaccagaagaactcacaggactcatcatatagttatactcatagctaagatttattatagccagacaatgcaaagcaaaatcagccaaggaaaagtcgtgcagggtgaagtctaggagtaaccaggcgcaagcttctaagtgctctcccctggtagagtccagtgagttgtgataatacatgcaaactgccatttactaaggaagctcattgaagacttgaagcccaaggtttttactgggggctggtcacgtaggcaccctcttcttagcacttcccaaaatgccagcctcccagaaggaaagcatgcagcagaaaccatgttgtctgtacagacactttcagcacagtgagcttctcctatcagttcttggaatgatgggaaccctcccaaaatcagagtttccagaagccagtcaagtctcaatcttgtagcaggcctttccaagggcagcagccaggcttgctgtgtaaacggttttcttttttccttttttgagacacagtctccctctgccgcccaggttggtgtgcagtggcatgatctcggcccaccgcaacctctgtcttcaccgttccagcaattcttgtgcctcagcctcctgagtatctgggattacagactcccgccaccatgcccagctaatttttgtatttttaatagagacggggtttcaccacgttggccaggctggtctcgaactcctgatctcaggtgatctgcccgtcttggcctctcaaagtgctgggattactggcatgagccactgygcctggcctgtgtaagctgttttctacatgtaggtttaaggcacatttctgaaagtaggctttgcacattcagatgaatgagcatgcttgtcatgctcgtttaagtacrtcgtaattgcctaacaggaaaataataggacattttttccctttagcattggaatggaatctagattttttaaaatactatattcccctctctaacwtggaggaatgatagctagcaaacagtgattatttgttttggaaactcagtattgtggaataacagaggcgtagttatcttatatagcttgagtatattcttccatataagaacggaagtagtacatgtttagagtaaaacattyaaacaaagcataagccaggcgaagtagttcacgcctgtaatcccagccctttgggaggctgagccaggtgggttgcttgagctcaggagttgaagaccagcctgggcaacaatgggagacctcatctctataaaaaaaacttaaaaagttagccgggtgtggtggcatgcgcctgtagtctcagctaattgggaggctgaggcaggaagatcacttgagcccaggagtttgatactgcggtgagctataattgcgccactgcactccagcctgggtgacagattgagaccctgtctccaaaaaacaaaacaaaacaaaataaagcataaatctaaaatgcagaaagcagattcctcctccctgaaatcccacttgttaccagttggatacgtatatttatatatctatctcacatttatatttaatgatattcagtatgagtatatcattgtttaagcaagtcttatcatcttgacttaaatggcaaaaactttgtataatgagtaaaaagatccatttatatgttaaagaaatttaatggcttccactttgacactagcttaggagaactagctgctgtttctctctcctctttttagcctccttctttcctaatcactttttaaaaattttattttattattttttaattaattaattagttaattactttttagatggagttttgctcttgttgcccaggctggagtacagtggtgccatctcagctcactgcaacctctgccttctgggttcaagtgattctcctgccttagccacccgaatagctgggattacaggcatgtgccaccacgcccagctaatttttgtatttttagtagagatggagtttcttcatgttggccaggctggtctcgaactcctgacctcaggtgatccacctgccttggcctcccaaagtgttgggattacaagcgtgagccatcgtgcctggcctattttttaatttttatagagacggggtctcgctatgttgcccaggctggtctcgaactgctcaaacaattcctcctgccttggcctcctaaagtgctaggattacaggcgtgagccaccatgaccagcccctaatcactttttacttttggctttctaaggaatagtttacttcccattcctcccactccttcaagtcgcccgccccattatgtaaaaaaaagaaaatggcaatggaaaaattgccatgacatatacattttataaagcctttagaaatttgtatcttaaagtttatttgaatagtcttttttttttcttttcttttctttttcttttttttttttttgagacagggtctcgccctttctcctagggtggagtgcagtggtgcgatcttggctcactgcaacctccacctccggggttcaagcaattcttgtgccttagcctcctgagtagctgggattacaggtgcccgccaccacacctaattttgttatttttagtagagacagggttttgtcatgttggccaggctggtcttaaactcctggccttaagtgatccacctgcctcggcctcccaaagtgctgggattatagacgtgagccactgtgcttggccaggagagtcatttttacagaagaaatactaaactaatatagatagagagggactgttatatacataagaattggtgcacatgatgcttcatctgataggattcattgacattagcttctcctaagtactgtttgaatcctggccttgtcatcttccttctaagattgggctgcatctgtctatctctcctggtttgctgcagctgcagcggcttccgggctggtttccagctgccagtcttccctgcctttgccacactctaccagagtgatcattgtaaaatctttctcggttctctctgttcctgtcgtccctttacttaagatctttcagtggtgtctcagtctgttcaggctgctgtaacaaagtaccatagaccaggtggcttacaaacaactgccatttctctctcacagttctggaggctggaagtccaagattagggtgccagcatgtggccgggttctggtgagggccctcttttgggtgcagaggaccaacctctggttatatccccatgtgcggaaggggtgagggaggtctatggggccttttttataggggcactaakcctattcctatgtgctctgccytcttgacctaatcatccctcaaagaccccacctacctcctaataccattcctttgggagttgggatttcaacataggaattttgggggaacacagacattcaaaccattgcaattggcttcaagtgtcaagtctgtgtcatggcttctcagcctcgtcccttgccttcctccaaccaatcaggtctgtcctctcgctgggtggggccttttttgagggtcccagagtggctaccactttctctctttttcctctgaggtttcatataagtggttcctttgctggagatttcttttttttttatttatttttatttttttattttttgagacggactctcactctgttgaccagacttgagtgcagtggcacaatctaagctcactgcaacctctgcctcctgggttcatgtgattcttctgcctcagcctcccgagtagctgagattacaggcacctgccaccatgcctggctaatttttatatttttagtagagacggggttttgccacgttggccaggctggtcttgaattcctaaccttagatgatctgcccacctcggcctcccaaagtgctgggattacaggcatgagccaatgcgcccggcctgctggagatttcatacccttctcccctcctctctttgtctcctgctgcctcccatcacacacgtgcttatcttgcttctgctctcctctcggctggcttcttgaacattacctccccagagctcttccttgacgtcaatccttcctgtctttcctccagtgttcagttctagtgacgtcctagttgctttttttttaaatttttttttgagacagtgtctcactctgtcactcaggctggaatgcagtgttacaatcagggatcattgcagcccggacctcccaggctcaaaggatcctcccacctcagcttcccaagtagctggggctacaggcacgtgccaccccacgcggttgaccccaagttacttctgcatcgttctcttctttgtctgtcatagccattatcacagtatagtgtggatgcccgtttatctggttttgtaatctttctgaaagattataagagccgcaaaacagagactgtttttctatccctagtgcccagtacagtgtttgcataataagtaattattgaataatgtgtcatagtattagatggctgcagtatttttgagtgtttatttttcttaaatactccttttatctgttggatgttttttagtacatagactccattgatctggagaagatcactgaaaccgaggaccctgtgaaatttcatgaagcttggcagaagctatgcaaagctgagtgagtaccagggcccacgcacaccagttaggataggaccattgtactttttctgtaatgattcagtttaccctaattgctaattttcatgcattttgaaaggtagtttggagtacttgtggtctttgcaggtgattgttccacgatcatactgcgttgatttgaaatgtgccatgttaatgctggtggcatgtgcatagaaatggttttatttggggaggatggggatactgtgggaaagtgtgttgattctcctgaaggatgcagagggaaagtgtgttgattctcctggaagatgcagagatgaatcttacatatgcaaagttaaagtacaagaatgacagctttttttttctctctctttttamaaagtgaaagcaagtttattaggaaagtaaaggaattaaagaatggctactccacaagcagagcagccctgagggctgctggttgccccttttatggttatttcttggttayatgctaaagaagggatgaattatacgtgcctcccccttttagaccttatagggtaacttcctgatgttgccatggcatttgtaaactgtcatggcactggtgggagtgtagcagtgaggatgaccagaggtcactctcattgccatcttggttttggtggcttttagctggcttctttactgcaacctgttttatcagcaaagtctttatgacctgtatcttttgctgacctcctatctcatcctgtgacttagaatgcctaactatctgggaatgcagtccagtaggtctcagccttattctacccagcccctattcaagatggagttgctgtggttcaatatttcccctctcccttttataggagaactcttaatactaagggttgcagagggacaaagctccatcttctgtaacttcttcgtgttgaataggggcaatgacattcctccctattagagtctcttgtatttggggtagagaagaggtcagtcagaaagcgtcagatggcgagggccattcataactctgagttccaacaaaaggtgatatctggaagattaataaatgtttagtttaagaaaacattgagtaagcttattctgcattcctacacaaagagtacaatagcaatatattccacaacagtaaagcaaaaaattatcccaagtaaactaaattagaaggctttccatgaactgggcaactgttggaaccaagctgatatgcagttgctagctgatttcaatacatgcccagaattagaatactgatcccaatttttacgttacccatccctcttgttttttttttttttttttccgagacagagtcttgctctgtctcccaggctggagtgcagtggtgcgatctcggctcactgcaacctccgcctcccaggttcaagcaattcttctgcctcagcctcccaagtagctaggattacaggcacgcgctaccatgcctggctgatttttgtattcttagtaaagacgggtttcaccatgttggccaggctggtcttgaactcttgacctcgttatccacccgccttggcctcccaaagtgctgggattacaggtgtgagccaccacgcccagccctgctcttgtttttttctgagctgcagtcacagatcactgattgtttcacaggaataagcagggtcagtctaaattgcagaaaaaaacttcaaaaacaaccaataagactagaattcataataataacagttagaccatagttcttgaaacataattttttctctctccagtttcccattttcactaaagacaaatcatggtaagaacaatttgctttattatacttggcctgattatttgtataaagtgcagcaagaataattatttttcaataggcttttaaaattggctttgacagaaccttattccataaggaatctcagataagaccttttttaaagctgagcccacccatgggtttgtaccctcaaatacctatgaattgggtaaattcctctctttttgaggtcccaagataacttgaggctcctggacctgtcagaaagtgacattctttagttaccacaggtcagaaaccctgtacagggactgtgtagacaaggtatgaggctagttttcccacggggcttgtattggctttacaattcaagttcgattctttacaggaaagcacaccattccagtcaaagccttggtaatataaccagtttctccctccaattgtgtcctgttgcaaaataaaaaagattcttattgcacttatgcaaacaactatattgccataagttaagaatactcacaaattccaaatttcccaattctggacaaatcaggtagagagaaacaaatatgctccaaattttgttcacaggagtatactttactcaattgttacaagctgtatatagctcaaaagaacagttttcttgactccgaaaaataaaacaaaaaggatcagcaacattttaagcaaagtaaaaaatattaattttttattagttcattccatggagctaactcctgttctacttgatagtcatgaacatttcagctctccatgagagtcctgaaagattttcctctattctgctgtcacaatctccaaagttatcagaaacttgcatttaagaacagctgttagagttctatagttgatttttaactaccttctaaagaggaccaaaacaatacaattgtctgtgggtgacaaaatgttttagggcagccactattaaagccacaattgactaggaatttgttacatctgtggcttacaacaattttgcataacaatgataattattaataacatacacgaattcatattagaattatagaagtttcttataattttggaacacatacaataacatatttatacaaatacagcccaaagaaagccaaacaccatttcatatttgacagtgcttttcgtataatttttataccaaatataccaaacttcaccattgcattagtgcattaaattcatgtcaaacccaatttttaataaaaccttatagataaatctatccaattttagtttgaccataaggtaagatttttacaaaccttctataatcctttacaagttttttttttttttttgagacacagtctcttgctctgtcaccgaggctggagtgcagtggtgtaatcttggctcactgcaacctccgcctcatgggtccaagcaattctcctgctccatcctcccgagtagctgggattacaggcacccgccatcatgcctgactaattttttttgcatttttgtagagatggggtttcaccatgttggccaggctggtctcgaactcctgacctcaagtgattcgcccacctcagcctcccaaagtgctgggattacaggcatgagccaccatgcctggctcctttagaagtttttgttaaagagcagatcagcactctaagagaaacctgttgtgcttttatttcaatgttcaatttatggaaaacctgaatacacctttaactttagccaatgtccacacgcataatttctttttttttttttttgagacggagtctcgccttgttgcccaggctggagtgcagtggcgcaatctctgctcactgcaagctctgcctccygggttcatgycattctcctgcctcagcctccygagtagctgggactacaggcgccygccaccacgcccggctaattttttgtatttttagtagagacggggtttcaccgtgttagccaggatggtctcgatctcctgacctygtgatctgcccaccttggcctcccaaagtgctgggattacaggtgtgagccaccatgcccggcctgcgtaatttcttttataagattaatccttcacaaaccttctacaacttgctcaaactttcagctttatcttatctaacttaaaataatccgttagctggatgcggtggcttacgcctgtaatcccagcactttgggaggctgaggtgggtggatcacctgaagtcaggagttctagaccagcctgactaacatggtgaaaccccgtctctactaaaaatacaaaattagctaggtgtggtggtgcatacctgtaatcccagctacctgggaggctgaggcaggagaatcgtttgaacccacgaggtgaaggttgcagtgagccaagattgcaccattgcactccagcctgggcaacaagagtgaaacttcgtctgaagacaaaaacaaaacagcaaaaaacaatcctttaaccttttaatctaggcaaaaaaaaaaaaaatccacattttcatgccttcttataatcttttactaaaaacacatttcactttccttatgcaacttgcatgtaaaactgtttcttcagtagtctcaattacagattacactgttaactcttaggaacttttacttttggtgaaaaacctggttagtaagcaattttaattacgtactaggtatggagcctaggacactagataaggtctgaccttttccagcatagctagggggcatggctttcaacttgtccccaagccttacctagaatctaatgctccaaagtaggtaaattgaacaattttcaagagtcaaagcagtttatgaccttaaagcattgagaaaacctaatatctgacctgcctaatttagaccaaatgtctttattttcccaataatctttaaagctgtttttattacccaaagattactaaagttatgtgaactaaaagtcattacaatttttacttttcttacacaatacttgatttaagctttactatttttaaaccaattaaagctttttttttttaacatcacacacacaacacatataaatgcacagacagaaagaagatccagtagttgtaagcacccaaatatcaatcagaaaggcttatcccctaaactaggaattgaaccctgaacccaggtcaccattgtgatgatggagaccaagagaaagtactgccacatggttgcaaggtcaagctcccaaggacatgaaacaagatgagagggaacccttatctagtttttcttcagggacctacagcaaagtttgttattgaccagtttgctggggtggcttgaacagcaggcttacaggggtcctaggcccacattctatcctaagacccctcattatgacagaacaatacagaaagacacacaaagcacaccagattcactgtagcttaagagtagcctcggccgggcgcggtggctcacgcctgtaatcccagcactttgggaggccgaggcgggcggatcacgaggtcaggagatcgagaccatcccggctaaaacggtgaaaccccgtctctactaaaaatacaaaaaattagccgggcgtagtggcgggcgcctgtagtcccagctacttgggaggctgaggcaggagaatggcatgaacccgggaggcggagcttgcagtgagccgagatcccgccactgcactccagcctgggcgacagagcgagactccgtctcaaaaaaaaaaaaaaaaaaaaaaagagtagcctcacaaatcctttttaccattaatcaaaactttacacaggagacagtgatttttaccattcattcaaccaatttgcacagagagagagagaggccagaagtctgactggtaagaaattcttacccttttgtcggtatgctaggcttctgggttccctttccttgagcagccctagtgacccggctggctgcaccacagccctgggggccaagctgtaacacaaaggaaaattatcttttcctgttctggccagagcaaaatatgtgtgacaaaacatagacattagccactctgcctagcacccaatatcttactggcaaggctcaaacttgcccctggttgggccccatcatcattaatccaacctctgaccaggagtttcaacttgtctctgggcaagatggtcgccttgagtaacagaaaagatacgaaaaggaaaggagataaagggagaaaagcattgcccgcagcattttggggaaggcaaagagctcagggaggccagagaaagacgcacccattgcagtgacactgaaaagttcaggtggccgcttgtcggtcgtgaagggatcttttccaggagtctcatcaactctcaagtttccccttttgaggaggaaaaagctccccatgtcccatggtcctgtgcatgcctagttctgtcacccatagctatcagcaaagagtgcaaggcagaataatccaaagagaatagcaattaacatcccatagtgccaaacctattcttagcagagagggactttactgagagaggcctctaaccccctaaaccttaggaaggactctaaccttcctaagttgtgcctccaacccaaggtcattcaagcatccttgccttttattgagaggagcctttaactctctctgttttaggagagactctaagttgggcctctaacccaatcccatcctttacctgggtatatgcaccccatttacccaaagtcagccaattggtgcacacagaygattttcctttgggtctggggtctcttcagtattgttctttccgtgtttcactagaaagatgttactggaggctgggcatggtggctcacgcctgtaatcccagcactttgggaggctgaggcggtcttattgcctgagctcaggagttcgaggccagcctgggtaacatggtgaaaccccatctctactaaaatacaaaacattagctgggcgtggtggcgtgtgcttgtaatcccagctactcgggaggctgaggcaggagaattgctggaacccgggaggtggaggttggagagggccgagatcgcgccactgcactccaggcagggtgacaagagcaagactctgtctcaaaaaaaaaaaaaaaaaaaaaaaaaagaaaaatgttactggaccccaccacgtactcagtattgtcccttctgtggtcgctagaaagatgttaccagaaacgggtcccaatccagaccccaagagagggttcttggatcttgctcaagaaagaattcagggtgagtccatagagtaaagtgaaagcaagtttattaggaaagtaaggacataaagaatagctgctccattgacagagcagccctttctctcttgatgatattttccacatgtcttagattttaggttttattttgtaagtaattgacagaactcttgggggcagcattgcatcatgaggttagcatgatcctcctgggttttctgttgaactgtgttgctgttgtgtttgcctaggtctgtgaagtcttctagccaagaaattttcatttgccactacttaattagcatttgaaatcttaggctgatttttccaatttaactctttctgatgatgtcagagatcttaacatttttataatagtgttttgaaagaaccttaacctattttcattcagtttcttttcccagtggcattcttaattgaattgggtttctcagttagtatgctctgatgccacaaagacttatcgtaaaatatatattgaggtcagttgtgagaaattgtcacaatttcttcataacattgggaagatttcagaaaaaaagttcagggtgtgaagtcatataattggttctgaaaatagagcttgagcatagtcactagtgattggaccaagcattgcacgaatggctgaatacactagtttaaaaaaaaaatggatagtcaagtttaccctcattttgtattgatttcagtggtattcttgtgcctggaggctttggaatcagaggaacattgggaaaactccaggcgatttcttgggcaaggacaaagaagattccttttctgggtaaaactcatgtttattgaccctaactatgagtttattagatttttgacacctaggaggggtaacactaaaggtttgttatcgtaaaggtgtgaactcggatttgaaagttcaggtgccaaatagtctgctatagggtcaacaaactatattctaaatttggcccacagcctgtttttatgaataaagctttattggaacacagccacaccaatttgtttacatattgtctatggytgcttttgtggtccaacgtcagagtttcagaccctacggcctagaagctttactatctgaaagaggctagaatctttactatgtgaccctttacagaaaacgtttctcatcctaggagaacttgctgctattccagctgggtagcagaggctgggagaaggctccatctgcaactgtgcttaccttctccaattcccacctcagtctccagagtagctgggactacaggtacacaccactgtgcctggctaatttttgtgtgtgtgtgtgtttttttttttttaagagatggagtcttgctatgttgcccagcctggcctcaaactcctgggctcaagcaatctgcccacttcagactcccaaagtgtggggattacaggcttgagcccccgtgcccggccgagttgagcctttttaatgcttttttttcaaattgcgaagtacggcttctgtaccagggaaaccagaggaaatgggaccttgatgcgggagaggcagccctgtagctggggactcaggcaggagggggagtgcagagaggctgtgtttcccactgtgcagtggatggctgggtgggtttatgagcccattggacaggcttttagtgccagcagaccatttatttccccccattacctgctctttgattagcttcttagactctctcctcttaggatccattttcaaaatagaagactggagtagttacctggataccttgttttcttttactggtctaagctcgttgggggccattgtttttttttttgaagtttctgtctaaatgtgggtaatgttcctcagattattttaatagtatggaatggtttgcaggtctttagctttccctctagcatagcatctctttatgtcccagccatatggaactttctgaaatccccctcaccgccacccccaccccccagcactcagctgtttcctgcttattgacttctgttctggcatccctgatatattgattgctcccttctttgtttcccctgtgtacatcttaagtatctatcggaggagcatctgggatgctctttggcatttgtttagtggagagaattggtgaactgcagtgaaggcggagctgggtctgggagcatccctgtggcaacaggcttgggcgacacaggtctgccttccttcatcaccgagcactctgttcaggcccatcgtgtctccttccctgctgcccaccatgctcaagcccactgtggagtctccaacccccaccccccactgctgcttttccttacagtgaaggctatggggctgcctgtgggttagcagcctgacgtcctgtaggcactcaacctctggccaagcctgtgtttatggctgtgaagtcaccatgagaaggagtgggaaatcttagcccaggaaactccctctgagttggggtgttagatgttctctgaaggaatcaggcactgcagcccactaagatgcctcaactcagggacaaatctagaaggtggcagatttgtctcatggactctgcctctttctttccttctttccttccttccttccttccttccttccttccttccttccttcctttccttccttccttccttctttctttctttctctctttctcccttccctcccttccctccccttccttttccttctccttccttccttctttcttccttcttccttccttccttccttccatccttccttcttcccttcttccttccttccctccttcctctctctctttttattttctttttttttgagacagagtctcgctctgtcgcccaggctggagtgcagtggcgcgatctctgctcactgtaagctctgcctcccaggttcacgccactcccctgcctcagcctcccgagtagctgggactacaggcacccaccaccatgcctggctaatttttttttgtatttttttttttttagtagagatggggtttcaccatgttagccaggatggtctcgatctcctgacctcgtgatccgcccaactcagcctcccaaagcgctgggattacaagtgtgagccaccgcacccagctcctccttcctctctttctctctttcttctctttctttccttccttctttctcacccagcctggagcacagtggtgtgatctcagctcactgcaacctctgcctcccgggctcaagtaattctcctgcctcagcctcccaagtagctgggactataggtgcatgccaccacacctggctaatttttgtatttttagtagaggctggtttcaccatgttggccaggctggtctcgaactcctgacctcaagtaatctgctcactttggctttccaaagtgctgagattgcaggcttgagccattgcgcccagttgaccctgcacttttctgacctcatgttccttctttgtcaactttgggacttaggcggcttcatgatagtctaagcccctgccctgctctctgtcagggattcttctgagaggacagcagggagcaaaacaggcagagtcttgctctctgggagtctgcattctagataggggagacaggcagccaacaaatgaacagaaaatgtgaacaaatacaaagtgagttcatttgctttgcatatgtgctttttaaaataggagtttgtcttgggatgcaactagcagtgatagagtttgcaagaaactgccttaacttgaaaggtaagttcgaggtttgctaatgaccatttatttaaaaaattttctctcttcaaatatttttcagcactattggtgaattactgaactctkttcttaatcttcagatgctgattccacagagtttaggccaaatgccccagttcctctggtaagtggcttgtttatctttctgggtccagtcattgtcacttgggtcctggctcttgcctaaattcataaggggctattggctgggcgccatggctcacccctgtaatcccagcactttgggaggtcaaggcgggcggatcacttgaggttaggagttcaagagtagcctggtcaacatggtgaaacccctgtctctactaaaaatacaaaaattagctggctgtggtggcagatgcgtgtaatmtcagctactcgggaggctgaggcaggagaattgctggaacccgggaggtggaggttgcagtgagccaagatcatgccaccgcactccagcctcagtgacagagtgagactccttctcaaaaaaaaaaaaaggcgggggggggtctattattattttttctttacagcaccagaacattttaaattacattattcttatattaaattcctttgttcttgatagtccatcttctcagctatgccttaaagacagtcacaatcctggactgatttctctttgtcgcagctttcaagcttaatgtttaggaaaggattaaatcggctgtgacaacaatttataacatctactataaataaatgagctgtcctgtctccagactcatcaccagtctgcctattttccacactggtggtcatctgtctttctaaaacaaaagcgacagtgattctgctgccagtcctcatcttccatcagtttcttttcccttaaaatattcagtccaggattctgggctgggtcccaaagccactgtgctctgtcacctgctgctttgctgattcatcccatggcatcctgattcctcccaggctttgagtttttttcttttttgtgtttttttgaggcaagttctcactctgtcacacaggctggaatgcagtggcatgatcacggctcacggaagcctagacctcccggggtcaaacaatcttcccacctcattttttgattttttttgtagagacaaggtctcactatgttgcccaggctacatgctttgagttttacgtttggacaatctaaactagtttttcagatacagcctgaggttccctatacctgagatgtccacctgcctaaaatccctctccccctggaatctcaataaaagcattgaaaaatttaattaacaacaactcagttaccaacaacttcctattcatctgaggaaacctttcctgacctcttttctttacctgcctctgccttctgcctcatgctactgtgctcaccactaacagagcgagttctgcaagatgatggttggccttcagtcagcctgtttgccagccacccatgcacacccagtcgtgtccctgctgctgggcacctacttctaatggagctcgcgcctcacaatcgcgattggttttttaaacagctttattgagatacaattcatataccacaaaatttagccatttaaactgtataatccggccagatgcggtggctcacgcctgtaatcccaacactttgggaggcctaggcaggtcaatcacttgaggtcaggagttcgagactagactggccaacaagttgaaaccccatctctactaaaaatacaaaaaattagctgggcgtgstggtgcatgcttgtaatcccagctgctagggaggctgacacaggaaaattgcttgaacccaggaggcgttggttgcagtgagctgagatcgtgccattgcactccagcctgggcaacagagtgagactttgtctcaaaaaacaaacaaacaaaaaactgtataatccaatggtttttagcatattcacggatctgtgccactctcattacaagcaattttgggccattttcattactccaaaaagaaaccccacaygccttagctgacacccccaagcctcctatctccaccagccccaggcaaccattagtctaccttctgtcttcatagatttgcctgtttgaatcatttaatataaatggaatcatccaatatgtagccttttgtgactggttgcttttacttaggataatgttttcaaagtctgtctatgttgtaacacgtatcagtactttgtttctttttattgctgattaatatttcattatatggacatgaaacattttatttatccattgatgaacatctgcattgtttctactttttggcattgtgactaacgctgctgtgaacattcatgtgcaagtttttgtgtggacatatgttttcatttcaccaggagtggaatttctgagtcatatggtaattctgtgtttaaccctttgaggagctgtaggactgttttccaaagtggctgcaacattttaatttcctgccagcaatgtatgagggtcctaatttgtccatatccttgtgaacatttgttatttctgtctttttgatgatagccatcctagtggatgtgaagtggtgtctcatcgtggctttgatttgcagttgcctgatggctaaggatgttgagcatcttttcatgtgtttattggccacttgtatgtcttctctggagaaaggtccattcacatcctttgtctattttaaaattagggtatttgtatttttattattgagttgtaacagttctttatatattctagatataagttccttatatataatctgtgctatcggcatttgggaacacatcattctttgttgtatgtgggagctcctgcccactaggtgccagtatcactccctaacccctgcccaactgtgacactaaaagtacctccagatattgtcaaatatctcttgggggcaggggcagaatcgccctggttgagaaccactgatttagagaaatctagttctatttctgtcccctgtagcctgtttaatcccttcccttatggcaagcattcattcttttttttcttggttcatcttcccattttttacatataagtaaagctgtatgtctttgtcatccacttcccttcttagggaaatggtagcatactctacacagttttttcctgccttgcatttttcgcttaacactgtatgctggagatcaccccacggaagcacatagaagcattcttcactctttttttttatagcttgtaactcaaaccataatgaaccataacttaccagccagatggtacttttaagtcttatgctcagaaggcctaataccaatgaagggttccttatgagcctttaatataaacatatttcctgactaatagctgaaatggctgtgccaggaaaactatgggttttcttttctaagatatactttgggataggaagtgattttaccagtaggtgccactgttagatagtgttggcaaggttaattctttgatgattattctttactgggggtgtgtgtacgtgcgttaaaaaatttttacacatggccgggcgcagtggctcatgcctataatcccagcactttgggaggccaaggcgggcagatcacaaggtcaggagatcaagaccatcctggctaacatggtgaaactttgtctctactaaaaacataaagaaattagctgggcgtggtggcacgcgcctgtagtcccagctactcgggaggctgaggcaggagaatggcgtgaacccaggaggcagagcttccagtgagccgagattgcaccactgtactccagcctgggtgacaaagcaagactctgcctcaaaaaaaatgaaaaaaaatttttttttacacagagtaaaaaagttaagccctgcagaaaaaggtacagaactgtctctcctttgcccccacctcacttcggttcccttccccagtggcaactactttgatccatttctttctttctttttttcctttttaaagagatgggctgtctcactatgttgcccaggctggatattcacaggtgtgatcatagcgcactacagcctcgaactcctgagctcaagtgattttcccacctcaacttcccaagtagctgaaactacaggagctcagctgatgcatttctttagttatttcagagatttgtgtgtgtgtttttgtgtgtgtatacccacttagccacacacatatgaatatgtattgcgtttaaaaaaaagatcttggctaggtgcagtgtctcatgcctgtaatccctgcactttgggaggctgaggcgggaggactgcttgagtcttggagtttgagagcagcctgggcaacatagttacaccttgcctctacaataaataaataaaattacctgggcatggtggcatgcacctatagtcctagctactcgggaggctgagggggaggatcacttgagccccaggggttgagctgcagtgagctgtgatcacgccgctgcattccagcctgggtgacagagcgagaccctgtctcaaaacaaaaccaaacaaaacaactttgtagcatgctccagacactgttcccaccttgctttatatactgatcattccacatcaatgtgcagggatgtcttcggtgtgcttgctctgctgtatgctatatggctgcatccttatttatttaaccagtctcatatttagtttgtgtccattattttgctgctttaatttatgctgcaaattagtatccatgtacatatatccttgcacccacgcgcgaacacatctgcagggatagattcctagaaggggagttgctaagtcagaggatgtgtgcattttacattttgatggctcctatacacataagtgagatgagaacaataaaagctaattgctattgaacgtctttatggcctgcaatgtttgttggagaaaaatagccttaagagctagcacttgtatcgatgtgagaagtcttattaaaaaaaaaaaaaaaaagactaaggagatagaatcataaggcagcaagcaccatgaagcctgcagagttacttaagcttgagcaaataacagttactttgtggggactggtcattctggctgttctagctaggaaagtaaacagtttggaaaccaggagccttctatagggaatatttactcctaagatctcttcataggtcatcatgaccctcctttggcatgcatgattagtgctatggctgttgatgaaatcaatagagacactggcatccagaacagttccaagagaaagtgtctgttatacacataaaaagagaaacagatttttccctaagggttaaggtagactctttctgcgtctcagagtgcccaggagagaatgagtaaaatttattttattgtgtcatttctctgcttaatccacaaggtgaaattgaaggctctgggactttgcagaatacttagggttctatagcaactctggttttttgccctgcttcaaagtagtctcagctgccttctagatggtacataaccaagagcgtagctgttgctgacttacattctaaccctatatcaatcacatggctgctgctgacatccttgaccttgaatttggcttcagatctctccagtacatctgtagtgtagttcacagcactttggactttatattttgaatattttcagcttttgaggcatatatatatatatatatatgaatgaacaatctcaatctaatgtgtaggcatgtgaatgtgcttaactctaagcatttcttttctgtttgttgaaaaaggtaactaaaaattctaaatttacataagatattacaccctgaagacagaattcatgttccaccttcaaaagacatcagcacacacatgcacacttggatggtggtatgggaaaggaacagggagaaattcaaagcattttaacgagatgcaaatggatatttgagattttggtatttgatattatttcagttttcattatttatcataggtatgacgtcatttatccctttttgatccaggaattttcagggttaagtgaattttacatctaccatagtagatttgtgaaacagtcacataattaaaagctgatttgggtgaaagttgatttttgttatacatgaagtataattgattaatgcataacattttcctgcctttagttgaagccctgtttaaaatattttcctcatctgtattatttttcaacaacttcatatggagtgcaaattaagaggtgttgaaaacaaaccagatggcccacttagaattatcttttaggcaattttgattactttgaggattttcttgcatttagagtgttgaagtaagcatctcctgactattacaaagatcatatagaaatcacttggaggttagttagggctaaaaatcctttttcccataaaagtagtcattaggaatacagctataggccgggtgtggtggctcacacctgtaatcccagcactttgggaggctgaggccggtggatcgcctgaggtcaggagtttgagaccagcctggccaacgtagtgaaaccccgtctctactaaaaatacaaaaaattagctgagcgtggtagtgggtgcctgtaatcccagctactgggaggctgaggcaggagaatcacttgaacctgggaggtggaggttgcagtgagccaagatcgcgccattgcactccagcctgggcaacaagagcgaaactctgtctcaaaaaaaaaaaaaaatgcagctataatatgggttaaatagctttttacagaccactctgggagcctaatactcctttgatactgtctctgtggggatagtaggtttagagttgacatcagactgttggctgaggtaacttttttctactcagagaaagaaaagttcttgcctgggcacggtggctcacacctgtaatctaagcactttgggcagccaaggtgagaggattgcttaagcccaggagttcaagaccagcctagtcaacatggtgatacctcgtgtctacaaaaaaataaaaaagtaatcctggcactttgggaggctgaggcaggtggatcacgaggtcaggagattgagaccatcctggccaacttggtgaaatcctgtctctactaaaaacaaaaaaattagctgcgcatggtggcacgtgcctgtagtcccagctactcaggaggctgaggcaggggaatcgcttgaacctgggaggtggaggttgcagtgagctgagattgcgtcactgcactccagcctggtgacagagcaagactgtctcaaaaaataataaataaataataaaaaataaattaaaaagttagctgggtgtggtggtgtgtacctgtagtcccagctcctcaggatgctgagatgggaggatcacctgagcctgaggaggtcgaggctacagtgagccatgatcatgccactccactccagcctgggtgacagagtgagaccctgtctaaaaaaagaaagaaagaaagaaagaaaaattctcctgaaagggaacccttgcacactcttggtgggaatctaaattggcattactattacggaaaatagtgtggaggtgcctcaaaaaattaaaaatagaactaccatatgatccacttatcccactactgggtatatatccaaaagatatgaaattattgtgttcaagaggtatctgcactcatgtttgttgcagcattattcatagtagccaagatacagaatcaacctaagtgttcactgatagatgaatagataaagaaaatggaaaatgtggggtgtgtgggagaaatggggagatgttggtcaaagggcacaaacttgcagttataagatgagtaagttctggagatctaatgtacagcatggggaccatagttaataatactgtaatcccagcacttcgggaggctgaaatttgcttagagagtggatcttcattgctctcatcacacacacacaacagtaactacgtgaagtgatgaatatgttagcttgctcgtggtaatcattccacagtgtatacagagatgaaaacatcttgttgtacaccttgaatatrtacaattttttttttttgtcattctgtgactcctacaccttcttactccctttgtgaccttgggtggactcagcatggtgaccaaagactttcatgatctgaagtgggtgtgccctcttcattcctcatacttgacattccaccccaaacatggtgtacacattctttaaacagccttgcatttgggcatgatgtgtttgcttgggctgttttctctctttctgaatgcccactgctgcccctttcctgcatgctcccctcaaggttctttctacagagcccagttgaaatgctacttttttgatgaatccttcccctgacctggtcccaaacttactgacttagaatctcagaggtctggaaatttgtgtctctcatggcatcttgtatagtgccttgcccataataagtactttatatatgttggagttgaaatagataatgtatattaactctgcgaggggctaattgatacctagaatgaacataggctaaaatgagaagctagcatgagctagatatcagaactgaacaaaacacacaccacaaataataaaaactcaaaccatagactaacgttggttgggaatgaagatatgaaaaatctcaaataaaatattcgaacatccaatttaacagcattaaagaatgatcatgactgagtagtgtgtttatcctgggaattaaattaacacattatattgattgaacaaaagagagagactgtgtagcgccatacatgctcaacatcgaaacctggtgctcacagtctcataatgaactaggaagacaccagtacttcttaaacaagaagaatatcttccacaaagcagtagccaacagtaaagttcatggtgaaatagtaagggattcttattacaactagcaacaaataaaaaatgtgcaccatcgtgaacaaaacagttgttaaaatgagaccagcaaatgctctctgggaagtgaagctggcgttctccttcctgcctgtagagttatgaatccatacaaccttttgggaaatcagttaggtggtctgtttgacaaaccatacaaatatccataccctctgactcagacatttacttctcagaaattctcctaaggaaatcagaaatgttgacagaaatatgaataggtactcattacatttagaagaattagaaatgacaacaatctactcatcataacatttggaagaatcggaaatgacagcaatctaaatgccccacaatggggaaatagttaagattattatggggtatctgtacagtggaatgtaatgagtcatgagaaatgtttaagagttttaataccatgagaatgctcttgtgttgaattagaatgatacaaattgtatttaaacagtccctcaactgtttataaaaatctcctctgtttcttggtgggttagaaatcacctttttttttttttgagatagagtcttgctctgtcacctaggttggactggagtgcaatagcacaatcttggctcactgcaacctccgcctcccgggctcagataatcctcctgcctcagcctcccgagtaactgggattgtaggtgtgcgccactatgcctggctaatttttgtattttttgtagagacagggtttcaccatgctgcccaggctagtcttgaactattagactcaagcgatccacctgcctcagcctcccaaagtggtgggattacaggcgtgagccactgcgcccggccacctttctatttttctggttaactttctaaatgtttgaaatggcttccaatgaatttcattttattattgggggaaacttccacacttattttctttcttcccaaatctccacaagtatactctcctcccaaaatttagatagttgtatttttctgattattccaaataagagtgctgagaggctaatcacaaagagcagcagccagagatttacaaagtgttctcttactattgaacattttcacttattctttttgataggacacacatccatatggctcagaaatcaaaatgtccaagaatttgtcaagtgaatagtggctctcttattcctgcccccccatctgcccagtcctcttgaagcacgtaaccaatgataatagtttctactgtgcacttgcagagattttccaggaaatttcaagcaccttgccttccaagtcactatataccagctactcatctcgtgcccagttcactttggtcaccctgtccccaccatccctgtgcttacatcaaccggtacttctctctctctgagctcaaacaccccagagagaagcctggccctgcccagccttttatgggtagatgaggtgggagcatgggtacgtgttcctttgcccacctcggagagtcatccagcttctggaaaaatgatagcagccaacttgacagaagaacccagcatacacattcaagttcattagattaaaaaaaaaaaaaaaaaaaaggccgggcatggtggctcatgcctgtaatcccagcactttgggagacgaaggtgggtggattgcttgagcccacgagtttgagaccagcctgggcaacacaggaagacccctgtttctacaaaaagtaaagaaaaaaaattagccagtcatggtggcacatgcctgtagtcccagcttcttgggagactgaggtgggaggatcacttgagcccaggaggtcaagactgcagtgagccctgaaagtgccaatgcactccagcctgggctaccgagcaataccctatctcaaaaacaaaacaacaacaaacaaaaaaacacaaaaaaaccctgaaactaaaaataagtcaaaggcagtactttgcaggcagttattttcagcttgaaggtagagccgtatagcagaatcttggagagggcttatgttgtttgaaacgccttcagtatcatcattttctacactttgaaagtggaaatgggccgggcatggtggctcacgcctgtaatcccagcactttgggaggccgagacgagcggatcacaaggtcaggagatcgagaccatcctggctaacacggtgaaaccctgtctctactaaaaacacaaaaagaaaaattagccgggcgtggtggcgggcacctgtagtcccagctactcgggaggctgaggcaggagaatgccgtgaacccggaaggcagagcttgcagtgagccgagatggcgccactgcactccagcctgggcgacagagcgagacttcgtctcaaaaaaaaaaaaaaaggaaagtggaaatgatcccatatctttctgatgttaactacagaaagtatagtgtggcagtctgggctctagagcgcgaggtaaaaataataaatggcttgaagaacattgttcaaaggcatatcatgtacaattgggtttttgatggggagggcagcagtggggttaaaaaaaatctcatgtctaaagcacagatatgtgcacagcacataaacagatgcacaagacatctctggagttaaaatttcctggggggtggcgattagaaacaagtgtttaacaaagctccttaggaggttgataatggcttaggaaaggttgagagaggccgggtgcgacctgtaatcctagcactttgggaagctgaggcgggtggatcacctgagattgggagtttaagaccagcctggccaacatggtgaaaccccgtctctactaaaaatacaaaaattagctggatgtgggggtgcacacctgtaatcccagctacttaggaggctgaggcaggagagttgcttgagcccgggaagcggaggttgcagtgagccaagatcgtgccactgcactccagcctgggcgacagagcaagactctgtctcaaagaaaaaaaagaaaaaaaaagaaaaagaaaaaaagaaaggttgagagagactgttcaaaggcaatgggacccaatactgatactttgatacttcatgggtgttttgcggaggagagttgcgaggataaagaagaaataaaaatctagcttccggggcactgctgtgaccaggctattagggtcagcttgagccattggtaacttggacaaacttgaacgttaacatttgaactcttatctggtaaggggtagcagaaagttcccttccctccttgaacgttaacatttgaactcttatctggtaaggggtagcagaaagttcccttccctcctctgcacttcttgcctccatattccacactgttgtcacttcaccccctgcatcccctagctggacgcaaaaagtggaacttgaacttgagggctggctgttttctcagaatacaggatgccaagagttgagagggcccaaggtcttcctgtgatcttttatattacacgtcacatgccagtaccatggcgttaggctggtagacccgaggccacccggtcagtgatgagtggggccgcctctaggtcctgtgttccttctgttccccgtcgagggtcattcattaagaaagcacagcgagtgctgggagatagcatgacgtcaactgtctgtttgtgaagtgtttttcttgctcgctagtggatagtgtgagatcagagtggaaattggagatgacctgagcactgaggagttaaggaaggagagcaagcaacagggtgattctggtggaaaagtggagcaagggagttggtttggcatttctggattcttttcaggtctcccacaccatctttgtagttttcggcaggatcacagagctatcttggccctcacattttatttttttatttttatttttattttgttttatttttagacagggtctccctctgtggtccaggctggagtgcagtggcgtgatcatgtctcactgcaaccttgacctcgggggctcaagtgttcttcctgcctcagcctccctctctctctctctctctctctcttttttaaatctatagaattagttgaatcagactaaggttactttcaagtctattatgttatgaggtcagtacttaacaaagtaaggtatgtctaataatttctttattaataataactgaacctcacagccaggttattataattgcaaagaattaaaccagagactttgggggattccacataggataagaccacagcacaggcgctcttcctccagtgctcagggttctattttgttttctccttcactgggatatcttttttactaatacttggaattcttcaaaactaacttctccatctccattcttgtccagttcttgaaagagatcatctagggtgtttggaccctgttttacataaaaaaggatgggagaagggaggggagaaaaaatgaatcagttactgctacacattctcagaaattagaggccttggggtctgtgtgccaagaaggcagctcaggtttccagtgacatgcatctaatagctaacagagagaaaccagctttagctgttgtattgctccgtgtcatagaactggctacctttttgtcctccatatcacacatctgttattttaatacaatgcgtattttaatacagttgttttcttatgcgatcttgggtctttttctttatgcctctaaaaacattcttctgagaagggatctgtgggcttcactggattgcccacggcacacaaacagttgaggacccctgccccaaggttttcctggaagctgggtttgtctcctgctccagggctagggctgacatattacatgaggcagcaggcagggagggctccttctgtaatccttccgaccaccctatgagggagatctactttacaggtggggaaacaggctcagagacaggcagtcacttacttgagtgtccacagctggttaacagaggggttggggtccacacgttgactccagagctcaaccccttaactaaccaccgcccagtttttcccaaacgttgagctatgcaaaatgactttggctcaatggttcccatgctttagcatgcatcagaatcacacgataggcttgctgaccttagtaaatacagactgccagccccacctccagagtttctgattcactaggcctggggtggggcccgagaatctgtacacaaggtcttgctctgtcacccaggctggagtgcagtggcatgatcacagcccactgcagcttccacctcctgggctcaaatgatcctcctgcctcagcctcccgagtagctgggactaaaggcgtgtgccaccacacctggctaattttttaaaagttttaatagagacaaggtcttgctgtgttgttcaagctggagaatctatattttcaacagcttcccaggtggtgccaatgctgctgctctgggaccacacttggagaaccactgcttgagatgtcgtgtgagatcgtgtgcaggctttttgactactggacttcctgcagtgtcttaagtggagttaatttttgtctctaccataaaactctaatcttaaagccattactacttggactttcaggtaggagtctatctgtgcaaaatactacttagaaaaccgattgaaataacagttcagtttgtcagtttcaaattagactatattatatatatatatgtatatataaattgtggtaaaaaacacataacattgaatttacgctcttaatcatttttaagcatacagttcagtagtgctaagtagattcacaattttgtgcagcacatctctatggaagatatattttaacccctaagattcctacaaaaacacttagcactttgctttaattacaagaccaaactgtaagttacttattcagcctttgatttatgaatatgaaacactgttttcctgaagcctttactagattctaaaccatgcatggtgatgatatatgtaaacagagtatggtggaaaaccttagtaatggaaaccttatgggaatataatcaggtacatgttaagtagactttcagaacttaccattagtcttcctacctcgttccagattatgtcttacgtactttttgtaggaaagacataaaatatagaaaaagttacccgtgttaccttttgaaacaacttgtttgagtacatggcctaggctttcctgttagatgattatttttcttccttttagaaaaaataaagggtcttttaaaattttaaattttttcactaacttgttttgctgtttaattaaaaagtccctttttctgctagtgactttaagtgtttttacaagttcttctatatttcaactatgagaaaatgagaaaatatcagattctggggtcattgaattcagcttttttcttttttagtattaaaaacagaagtctttccaattgtcatattggcagaagggacatttctggttaaaatctggagagctggttaaaatatttgaagaaatgttctttcctgaagttagagctaaatagtgactgagtcatacaaaacaattccatagtcacttctgttgtgaagatggtttttaattgcaaaatgacaatgactctctcctttgagtcctctgctcgactaggcctgaccttgggcttccctctctgtccttgtatctgactacccttaatatttgatcacctggcctgccttcagctagaatcctatcaaggcaatttagccagaagctccttatcctggatatttccttggtaattttccatccactggccscccccatcctgctctatggtcataaacccccacttatcctttctggagttgagcccaatctctctccccatggcaagaacacgtttcagtggtccctgtatgggtcgccatggccctcctggagtaagttgccttaccatccttggcaagtgtcctgactcagctttttctttagcaaaaggaaagacagtactgtatattggagtgaggacgatcagctcttctctgtactctgttgccttgaatgcattttgattttgacaactctggggtgattttgatgtgaaactttatggcccaggaaatttagtcctttcttgaaagttgtttagaaatgcacggttgcctcattaacacaaatttaagtgatgaacacaaatgtaaatgcttttgaaatataaatgagtgctgacaaggcaatttgtcagtgggttttcctaacagactgctaagtaagtgttggtcttgttgagggattttacatacacaaatgaagcctgtccaaggccagctaacactattttgcagtcctctttgttttcctaaagcctggcacagaagtactgaatccatgctgaaggccttattgggtttgcttggtgacttgtgggtcttccaggcataacttggcattgcttccatttattatggctagtcctgcagagtcctgtgctgaggctgcaggagggatagaaggcttggcccttgttttctgagagcttgccttctgaaatgtggcctgacttaaggggaagaaaccccacctgcatgtgtcctccctcaagcgacggtccctataaggctctaccggagtcctctcccctycctccctcccctcccaccatcagtcccattaagtgggctctgcggatggccacttactttgagtaaactggggaattcagcctgaatcaatagcttcagttcatcctttgacaactggtctggatcaccttctttggctgcatatttttcaaaaatcctcttcagttcctcaggagactttttagtactcattctggtgtcytataaattgggaagaaaataaacttaccaaaaagctgaagtacagttttgtgctgagggttgtctgcaggattttagtgccattgggccatttccttggcataaatggggaagaataaggaaaagagaatggtcggggtcggaatggcaccagtaactactaacatgtttaaaaaataagcatcttaggccaggcacggtagctcatgcctgtaatcccagcactttgggaggccaaggagggtggatcacttgaagtcaggagttcgagaccatggaagcctggccaacatggtgagaccctgtctctatacaaaaattagccaggcgtggtggtgcgtgcctatagtcccatctacttggaagaccgaggcaggagaatcgcttgaacccgggaggcggaggttgcagtgagtgcgatgccactgcactccagcctgggtgacagagcgagcctccgctgcaaaaaaaaaaaaaaaaaaaaaaagacatcttagatagtatgttaaatgtctgttcttagagtacatctgttaggagatggtccctggagccaaacatttttattagtaattaatgacattctacactttttatgtacctgatctgcactctgcaggctgtggtcttgaagaatacttgaccacagcttctagcttctaagttacagggaatatctccagatggcataaactcaccttctctccagaccattatctttcacaccattctaaaaggaagcagagtattaatgcaaacagaaggagctctaggtagtaccaaaatcacactaacctggttgcccaatagtgaaacagctagaagaatcaaagaggagtttgaagagctgagcagaatcatgacacttttatagtctttacgggcacgccaccctgattatgaaaatttccttttgttggccatttaagggtaattattaatggtttttgaaactcaggcttaagactgcatgaaccccataattaagggcaagatccagtaaaggtccatctcgacagttgcttcatggttcagagtcgtaagcttggatttttttccccctgagattatattttccctccaatgtagaattatatttgctcacagttcacatttcataaagcttagatatagaggattcttttcaatttagttgcatatttaggctttaaaaaataactttcttcatatccagaaaaaataaatgctgccctgtgcggtagctcatgcctgtaatcccagcactttgggaggccgaggcaggaggattgcttgaggtgaggagtttgataccagcctggtcaacacagcaagacatttctactgaaaaatttaaaaaatcagccaggtgtgatggtacatgcctgtagtcccagctactgtagaggctgaggtgggaggattccttaagcctgggaggttgaggcaacagtgagccatgattgtgccactgcactccagcctgggtgacagagtgagatcctgtctgtaaaaaagaaaaaatgctgtcatagaaggacaatattacatagtttaaaaaattacggtatggccattgaagtccttctgatgtctttacatattagcagcttaaatatttgaatacatgaatgaatgaatggaagtattgcttcagaagcaggtttaagaagtggaaagaagatactcagtaatttgtggttttatttggcaaatcaatattgagtaacatggtcattttttcagctctttcattatttgttggtcctgtgtctgctttttatttctcattatccttttccttaccaaatatatttcgtgatcattcgaaaaacttgtgagaacactcgacttactcttgttcagttggaaatacttcaaactttttgtaactgccatgatttaaaattgccaaggarattgatttctactggaaagagttccatgaaataagtaggacatttccaagggacattgatctaatgctgattgtaactcacaggaaggggttccaggtggattttaagagcactttacagctttgaaacacttgtacacttccacacttatagaattttccctgactctgccttatatcacctacaaactgaggactggactattgggactgtatttctccctgatgtttctcagctctaaaattctagggccttatttacattggagaacaaatgggaaatctaatagaattccttaaaagcttcccgccagtcttgagcatttatcattccatgtgtctttgctgtcttgtatatattcttcttgtttttattatggattctttgactttgctatgcaccaatatagaatatgtattaactcactggttggagtaaagacaggcattttatttttagttataagattttacacaaaaatattctgattttggcaatgcattttaatcaagattttagaaaattgccagtgtttttacacatatgttctgttttcctgggaggaagtaggcgtttgtgcttaatcataacaagaactatctttttttaaacatcttttaaaaaatatttcagatctacagaaaagtggcaagaatagtgcaatgaacaccagtctgcctttcgactagattcactaattgcgaacatctccacatttgctttctctttctctggacagatactttcctccacccctgagtcatttgagaatcaattacaaacatccagatgcttcccccctgagcacctcagcatctgtctcctaaggacaaagacattctcctatgtaaccacaatgccattatcatagcccacgtcaaatctctccaattgttgaatagcatcttaaatcatcttttctctcaaattaccactagtgagctaaaatcaaatggggtgtttattatgttttgcatctggtttttttgtttatttttttgaagccacttcactgtgtcactcaggttggagtgcagtggcgtgaacacagctcactgcagcctcaacctccatgggctcaggtgatcctcctacctcagcctcccgagtagctgggactacaggcatgtgccaccatgcccggatacatatatatatattttgtgtatttcttgtagaaaaatacaacatgggttttgccatgttgcccaggatggtctccaactcctgggctcaaatgatctgcccgcctcagtctcccaaactgctgggattacaggcgtgagccactgcacctggcctattttttgcatctgaagaaatgattttaataactatatgtcatcttagtaacgatataggatgaaagataacatgttctatataatacacccatatattacatatgacgtgtgtatgtatatataaaaattatctctaagaaaaacttttggagcagtattggttaatagtcttctaggctacaaatctcttctttcaagggacaacttctgattagaatcagcccaatgcggccgggcacggtggttcacgcctataatcccagcactttgggaggccgaggtgggcggatcacctgaggtcaggagttcgagaccagcctgaccaacatggagaaacctcatctctactaaaaatacaaaaattagccaggcgtggtggtgcatgtttgtaattccagctactcgggaaactgaggcaggagaattgcttgaacccgggaggtggaagttgcgttgagctgagatcctgccattacactccagcctgggcaataagagcgaaactttgtctcaaaaaaaaaaaaaaaaaaaaaaaaaaaaagaatgggcccaatgctgcctattgtcagaatttatacttgtagcgaatgctagcaaaacttgaacttgaaaaacagcctgtgcggcttcttaagtttttacttgctcacttctaccagtcacatctcttgtctcttatttttctctttacccatagacttaaaagcatgagggtaaacttgcacttggaagcatgaaaaatccactaatagatactcttgtgaaacattaactaaaaatatatggagacaagtgataattacagggtgtgttcacaagagtgcgttttgaaaccagagaaggggggaaacgacaggcacaagggtggtaatgggaaaatggagaggcaaaggttatttatcacctcactgttcaattgtttgatctttggacaggcttaatttttcctaggaaagccaagagtaacatattttaagagctctgggcaccacaggcttctgtgggttattctgcttgaaggtgacagcatgcaatgtcttgaaaagcaccttcaggaagagggtacagtgttagtacctggtccctgcaaaacaaaatgggtgtgaaatgctatccatgggttcttgttatctttgatcctgaagtttaaaagagaccttgaatactcaaatgctgctttcccagaaagtatagcttgcttgtcacctgacctggtgtctaccttccctggaccttcagacaaagttcacttccaacctttgcctgggctgtgaggctcactgtcttttgggtcagcctgtgctcaccttcagcagttgagttcccagaggtctcctgaccatagcctgtgcttcttgagtgcgtatctttactatgggcagtgtgctgacctaggcacccaactcccacggcctccttaaatccttgctgcaactttatgaagtggatgctgttggtccccccagtctgtagagacatccaaggacctgctcagggtcacactgctggtcagcagtagagctgggattcaagttcaggcccagcctgcaccctcaaccaccgtgccacatgcccctcccaggagaagggcttctctgaggacaaccattgtatgttaacattaggaccacaggtagtatcacacttaagtgttasgtttacatctggaggtataagaaggttctttttctgaggtgtaagaaagttcttttcctgatgaaaatgatataggcctttgtctgttttgcactgctataacagagtacctgagactggctaatttataaagaagagaaatttatttcctcacagttctggagggtggctgggaagtcccagatcaaggtgctggcatctggtgagggccttcttgctgtgtcatcatgtggtagaaggcatcacatgggtgagagagagggaaggggactgaactcatccttttaccaggaacccattcccatgataactaacccattccaatgataatggcattaatccattcatgggggcagagcccttataacttaattgcttcttaaagattccacctctcaacactgttgcactgaggattaagcttgcaacacatcaactttggggaatgcattcaaaccatagcagctttcttttactggtggggaaaaaaacaagtttaaaagactggaaaaatacatacgtacttatgggactgctcattgatttcctcattgtagattccattctcacactacttggtgacacagcagcgcaggttggaagccagaaatgggaaataaactgcttcaggttagaggcaggactctgtcaggcaggactgggcatagtgtgtactcggcctctgagtagggcaccacccctcccttcccgtctgctgaagagactcacctgcaacttgggacatccatgagtatctcagacacccctctgctactctgtggcccactgacccatcccttagtctcccctgttagtttttaatacacttaaaacactgtgagattccaggccgggtacagtggctcatgcctgtaatcctagcactttgggaggctgaggcgtgtggttcacagggtcaggagatcgagaccatcctggctaacacggtgaaaccccgtctctactaaaaatacaaaaaaaaaaaaaaaagttagccgggcatggtggcgggcgcctgtagtcccagctactcaggaggctgaggcaggagaatggcgtgaacccgggaggcggagcttgcagtgagccgagatcgtgccactgcactccagcctgggcgacagagcaagactccgtctcaaaaaaacaaaaaacaaaaaacactgagagattccattattgagtacttgatctgaacttgacactgtgtcgaactcctcagtggagatggaaaataaaaagatctaatccttgtgcttgatgagcctacacttaatttatgagaggagatgcatttatgaaataatagaggaagttaaagctgtttgtagtaaataacggtattagattcctatggctgttgtaacaaattaccacaaacacagtggcttaaaacacatatacatttcttctggaagtcagagatataaagtgggttggcagggcagtgttccttctggagggtgtacgagagaatccatttccttgctttttccagcttctagaggccacttgcccacggccatcctccatcttcaaagccagcagcatagcatcttccagtctctctgatctctgctttgtggtcatatccccttttctgaccctgaccctcctgccttcctgttttaagagcctttgtggttacaatgggcccaccctgataatccagaatcttcccttctcaagagcctcaatttacaggctgggcatggtggctaattcctgtaatcccagaactttgggaggccaaggctggaggatcatttgaagccaggagttccagaccagcctgggcaacatggcgaaaccccatctctacaaaaaaataccaaaaaattagccgggcatggtggcatgcacctgtggccccagctacttggaaggctgaggtgggaggatcacttgaagccaggagtcagaggctgtaatgagctatgatcatgccactgcaccccagccttggagacagagtgagatcctgtctcaaaaaaaaaaaaagatcctcaacttaatcacatctgcaaagtcccttttgccacagattcataggtttcagggactaggatgcggatatctttagggtaggggaggcattattcagtctcctactatgagttactgaaaatgaattgatgatgtataggttatttatttggtaggctgagcataacaatggcattaattatgaggcagtaaggggaactggagggggcccctaaagcatgaggaatgggagggagaaggtatcttgggaaaagtagagaaggaggtggtctgtgtgtagtatggtggtgggtaggagagtggaggtgccattgacaatggccccagctagctgtggtagaagctacaggttcgaatacatgaggagggcatggctagtctgggctcctgtgtgaggtaggacctgagagccacccagaagagtttaggtttagtctgtagtgatggaggctgctggagctagcagtgcaacccaacattagggaaagtaatgctgatgtaaaactgcttgatactttatgtacaatttgaatatgacttagaatcaaaatcagaatcaggcttgaaaacctaatgagcagtaggaaaggaatgaattggagaatacttgtaaagaatactagaggaggccgggcgtggtggctcatgcctataatcccagcactttgggaggctgaggtgggcggattgcttcagcccaggaattcaagaccagcctgggcaacatgatgaaaccccgatgctacaaagtggaaaaaaaaaatgctagaggaaattgctgtatgttgcctaagagtctggaaatagaaatagctgctggtgagtaggctttccctttgtctccaggtgaaatattcaacgatgaggaacaaaaggaaagctgggcttaccagggtaggtcaggtaggtccagtcaggaatttcactgttgctaagagaacctaactcctgtagactttgttgtttaaggcacctgggatgctgtaaagtcttgaactcattacacttttattatgggctgcagaaaacatcagtaaaggttaattagtgccatatttatccttacatgctgattttacatctcctaaagctttatcacttattgatccttttttatttttctcatactatatggctcagttccaagagaggacaaatctggggatcagatgacagccagtatttaggctgaattagaggaagcaaaggcaatccttttgcaatggaagatgcgttttcctttcagatgcaaaaatctagagtattttggaaatgttggtgttaaatctaaagcatatttgagattattttctttaaccaccccagtaacaataaaatagatatgttttgaaactgtgatgttctcctgtctctcaggcttttagtggaaggaatgcaaggaacaaagacatttttgttaatttttgctgctgaatcaggttgcttataacccaagaggcagccagccatcatcatcttgtaggatccagcttgtaggatcatctgataactctgcaaggcagctggtgtgtcaggcttgggcaccatagtctctgccttgccctgaccttccgcttcctgagtgttggggttccaccagctggtgcctggcagcgttctttgcctgagtatgtgatggtgattcccagatgagatctcctaagctaggcccacacagaaccttcctgttccctccctccatcagcgacttgcctgtcaattctctccctgcttttctcctttcactgatgttcagggcaacatttggtactggagacctattttcacctgcttcccacctcttctctagcattttttgccttctccactggttcctacgctagcatgttttaatcagaggatcacagtggcatttataccttggattttctttctgtgctatcatttcaggagaaggtagcgtttattacttctgaaaacagcagggataatgtgaactaataccctagtgtaaggcctaaatactacattttactcttgatgacttaaacttgtattttcattagtaaaatacgatgtgcaaagtttaaaaagccaacagttctgaaaagcctataatgacaaagtcattaatcctcactccctctgtaccactctttagcttcttctagctctttckctgtgtttgtctccatgttgctaaataatctcatagtattctttgaggactttttagacttctcccgctttgttgaaggagtttttaatgctcttaggcagcccctatgcccactgcattttccttctctccccacctcccacccctacacttgacttttggaaatattttctggtcttcaagtgtttgtcaagttcatcccaagtaagcagtaaggcagatttcctgttctttttcttttcttttgtttacatttttgagacaaggtcttgctctgtcatccaggctggagtgcagtggtgtgatcatagctcactgcaacctccgcctcctaggctctagcaatctttccacctcagcctcctgaatagctgggactgcagcctgtgccaccacacccagctaatttttgtattttttgtagagaccatattgtccaggctggtctcgaacttctggctccagtgatctgtctgccttggtctcccaaagggttgggattgcaggcgtgagccactgcacctggcctcctgttcttagttggctaattttactctaatctcaatgcttcataccagaatatttcttgaataccaaccttgccagtaactgaacaaactacatgtaaagactcttcttgggtattgggtattgggacccaacacagtgaggaagactgaagagtcgtagtgcacttctatcaagaaattaggggaggttatccctgtagtctgcctagatggttcaggttgtctgaaacttaaatggaagttgaggctctgaatacacgtaggacttctgaatctgtggcaggtggtgcagtcttacctgatttagagaatacatagagaggccaggcatctatgtgcaactcagcttcatcggccagaagtgaatgccctatctcacctcactccagtaatacttaacctagccataattagctaaccaaagataggaacaagatgccaaggccaagagcacttgagaattgagcagtccatctaacaagggaggtcatcgagtttcttctccaccctttccctgaagtaactcttggagcaagcttgggacactgtgttcagatggctcggaaagttctggggcactgataagatcagacattttgttgggaattttttacctcagaaaattccagttgtcaaagattcctgtagagcaatatgtggcaattacggtatgggaaaaaaacaacaacaacaaatgaaaggttttatgagagggaagctcaagcaattccattagaacaggtcgactcacccaactgtagtctgttctaacaactttaaaaaagaagatgagatgaaaccatgagatcgtagtgaacagaactgagaaaacagatgaattacgagactcaccaggataggcttttcataaaaatcacctgtttctcaatttctgcagtgcgattgtgatcataaatataaagccactccggctctcaaagattgactgtctctcccacaaagcactcgccagacacaaactgagagaaaggcagggatggggaagaacctcgttctgtgagggcacagagagaggaccctgactcagctatggctcccagaaataccagctcctggagtggctgatgttggatagtggagctaagatttcagggttaagcatggtttcatttaggaaaagagggcagaggaatgggaggagattgtccaggcagagggcacagtgtgggccaagtcgccacggcgggaggaaaggagatgcagttgaaaaactcaaagaaccagcactcagggtgagaggggcagggaatataagataaggctggacggttaggctggcctgataccatgaggtcaagggtttcaagcaggaaaaatgccgcactaagatttgctgtgtgaatagaccactctgcctgcagtaggtagggtgtgctggggccatgggaatgttgagtggccagtcagtgagccattgctgtagcctgggagaaggctggagagaagtggatggatgcgggaattctggaggggataaatccacaggacttgacagagtggctatgagggagagggagcgatcaagggtgccacttaagtttccgacctacagagtgtgctagactggatgatacttctttctttcttttcttttcttttccttttcttttcttctttctttctttctttctttctttctttctttctttctttctttctttctttcttttcttttccttttcttttcctttctctttctttctttctttctttctctttttttggaatccctctaatggttttctataaataggttcttttggtatacctttccacagtacaagtactgatagatttgcttatggaaaatctttagggaatgcactgggcagtgggggaagagggttatcatgaaagatgtgaacaccgaagtgggaggcctcagcaatccagatctcgaagtgtgaggactacttggaactgatggtttgagtaatggcaggagggacatcatcaagatgctcctgatacattgttttataagtgatttaaatgaaagatgagaagcagatggaaaggaagtacaatgtgcagtgtgtctatgtcatgcctgtatttgaacatgatcgttggaaagactgatcaaatgttatagtttagggaccatgcttacccaatgatcattcctttaaaygtaaagcttgaaatttgggaaatgacatttttacaagatggcaaaactggacttgttttgttttctaaggtgattgatatgcccgagcacaaccctggcaatttgggaggaacaatgagactgggaataagaagaactgttttcaaaactgaaaattcaatattaagtaagtttcccatattgtttattttacaagatgttggatgtggctcatgtgactgcaggtgcccagcactctgggtggwggagactccccctgccccttccagcatcctcggagggccctgattctctctcttcccatctcccctgccctcactgaccctctgctctgggcattcttctccctagtaagcttgtcccttgggctggcctcagtagaacacactgaatgcccctccgcatttgatctgcgtgactccctgttcattgggctgttttgtgagttaccgatgctcctggagatgaacttggactgggacttggactgattcacactcagttcttttgaatccacagttctctccattacatttgaaccggttccctgtttaatgtctgtttgcctggtcttagtgactcacaaatgaacttcygagtaggagggcagttatgcacctcagaagcgtatttctctgttccctggcagccccartgtggggagatggctcgccatttgatatttgctgatctttccactccccataaggttaattctaatttctgtggaactttttcataaattagcatattatataagaataacttattgtttaaaacaaactaaagcctttaattcaatttaataaatgtatcttgagtgcccactctgtgccatgtgcagatataatagtgaccaggacagataccagccctgccctcctagggcctcaaaacaaggggaagaaatgtgacaaaaggggaaggcagattgctaaggggaccggatgcagagagggagctcaggaattgtgagtgttcagtgtcattttcgtgaaattataagaatcccttagaatcctgtgaagttataagaattcttttttttttttttttttgagacagagtctcgctctgtcacccaggctggagtgcagtggcacgatttcggctcactgcaagctccgcctcctgggttgacgtcattctcctgcctcagcctcccgagtagctgggactacaggcgcctaccaccgcgcccggctaattttttgtatttttagtagagatggggtttcacagtgttagccaggatggtcttgatctcctgacctcatgatctgcccgcctcggcctcccaaagtgctgggattacaggcgtgagtcaccacgcccggcaagaattcttcagaaaaatgccttcttaactcaagaaagagtaagaccagaaatatgagcttttcctttaaagatgaatataaaccttctaaggaatagaaagcttcctagccagaatgaaattaaaaaaggaaaggcttcaaagtgaatacagtttcctcctttctctgcataaaaagccattgttctctaagtcactaacatttttccttacacatactatataagaactttttttcttcatgaatgttagcaattctgtagctttcaggtgtcttcagattctatgaaactttgttcaagtaattgcctacgtgacaaaaaatggttggtgaaaaattaatgtcctaaaattatatctattgagaaagattcagtgataattgtactaagtttttaaaaagagcattgtactcaatatagttaaaaatttgatagatataagtctgatttaagatttttcttggccagtcgcactggctcacaccagcactttgggaggctgtggccggcagattgcttgagcccaggaattcaagaccagccttggcaacatggggagaccctgcctctacaaaaaatacaaaaattagcctggcatggtggctcatgcctgtggtcccagccacttgggaggctgaagcgggacgatcacctgagcccaagaggttgaggctgcagtgagccatgatggtgccactgcactccagcctgggtaaaaaagatttgtttttcttagtgctggatgtggtgtaatgtgcctgtagtcccagctgcttgggaggctgaggtgggaggattgcttgagcccaggagtcggagaccagctgggcaacatagtgagactccgtctcaatttaaaaagtaaaatttgtttttcttcacagtagacataaaaatattgatgatttgatgattttcatgaatcttaaacacagcagcaaagcttgttttgaaaaattttgaaaacaactttattgagatataatacatcatataatttgtctattagtagtgtacaattcactgattttattttttattttttatttttttttgagacggagtctggctctgtcgcccaggctggagtgcagtggcgaaatctcggctcactgcaagctccgcctcccaggttcacgccattctcctgcctcagcctcccaagtagctgggactacaggcgcctgccggctatttttttttgtatttttagtagagatggggtttcaccgtgttagccgggatagtcttgatctcctgacctcgtgatctgcccgcctcggcctcccaaagtgctgggattacaggcgtgagccacygcgcccggcccaattcactgatttttttagtgcattcacagaattgtgcaaccatcaccgcaattttaggatattttcatcacctcctgtagaaaccctgtgcccattagctgtcaccatccctacttcccgccagcccctggcaaccactaatctactttctgtctataggtttgcccattatggacatttcatgtaaatggaaccatatgatttgtggtcttttgtgtctggcttctttctttcttttttctttttttgagatagtctcactctgttgcccaggctggagtgcagtggcatgatctcggctcaccgcaaccttcacctcctgggtttaagcgattctcctgcctcagcctcctgagtagctgggattacaggcacccactaccacgcctggctgatttttgtatttttagtagagacggggtttcgttggccacactggtctcgaactcctgacctcaggtgatctgcccaccttggcctcctgaagtgctgggattacaggcgtgagccaccatgcctggtctgtctcctttcttctagcataatgtttttttgctacatccacattgtagcatgtatcagtacttcattccttttaatggccaaataatattccattgtatggatagaccacattttgtttatccattcctcagctggtggacatttgggttgtttccaggcaacaatttctttaattttttctccttaattttttaaaaagtcctttttctaaagggaaagaaaagtatgttgccttaaatttaagttgtgcttcatagtttccaagaagtatgtgatatatgaacttgtgccctcccacttgtgcagcactgtcttccacaggtctccaaaaaaggctgtgccagagataagaatgtgaccactgtgcaaggctctactgagtggcatacaaatatcaaaacatatagcatgatagtgtttttttgttttcttttgttttttgagacggagtttcactcttgttgcccaggttggagtgcagtggtgtgatctcggctcactgcaacctccgtctcccaggttcaagtgattctcctgcctcagcctcccaagtagctgagattacaggcatgtgccaccacgccctcctaattttgtgtatttttagtagagacggggtttctccatgttggtcaggctggtctcgaacccccaacctcaagtgatctacccgcctcagcctcccaaagtgctgagattgcaggcatgagccgccgtgcctggccgatagtgttttatgaacgtttttttttctcctagtcaacatatttcttttgtagaattttatgtatttatttatgtttttataagctggtacatttcttttgtaggattcccccatcccgtattggcatatttcttttgtagacttttttccaagtcagcacatttttgcaagaatgctatgaacaaaatacatttgcctacattgcctgtgaaaacaattaacaattttgatagaaagcattgaaatgctactcatttttttcatttaaatttgacttataggccagtagttacaatgcttggattaaatagaaaaacaggaaagtaaagagtcctctagtaaaaaataatgccttgaaatagggtcacagcctaaagatattgatagccgcagtggatggatgactagagtgagcctttttttttttttttctctttttgagacagagttttgctcttgtcacccaggctggagtgcagtgacaccatctcggctcactgcaacctccgcctcccaggttcaaccgattctcctgcctcagcctctcgagtagccgagagtacaggcatgcgctactatgcctggctaattttttgtattttatttgatgtggggtttcaccaccttggccaggctagtctggaattcctgacttagggtgatcctcctgcctcggcctcccaaggtgctgggattatgggcgtgagctactgcacccagccgagcctaacttttatattcaagaacaattcctctttttttcttaataacctgttaattccttaagggttatgaaaactatgaattcactttttctgaagtggagattataggtttgaattgatttggacaaaagtactggtaatgattatttgccctacttataagcagtgtgttcctagaagttcccttcctgtgttctatgtgttgtcttcatctgcaaaggccttttcctataaaagggctaatgacagtgtgtgtagaattatcaaagctgattcaagggtccttagaaatgagacattttgaggaagagggagagatttgttaaaggattcaaaataattaccctgatttgatcactatacattatatgtattgaaatatcactatgtgccccataaatatgtataattattgtcaattaaaaaaagaaagaagattttttctaaactgtattatctataatcctgtatctgagtattaactgcatatccatggtcttttccagacttcatcaagattagtttttatgtagtcttttctggtggcatcactttttcctgtatctggtcttcctgtctatgatctgtgcatatagtatttaatcgcgttaaggaggcatattctgctgattcatttcctactgataaaacacttcacatggtttctggcattttgttagaaaaatgctgaatcgaacatcctgacacagtgttttcgttcttttgaatatttccttagtatagatttccaggagttggattattaggtcaaagggtatgaacacttttatgactgataattctgccagactgttggaaagaagggctgagcaaggtcataatgacattcactgtacttgtgtccctgctttccctagtctttttggtaggattatttttcttcttgctgtattaatggaaacaaaaagagccctatttctgttcattgctaaaaagtgaaaacgttttctacttcgaatgttgatttacttgtgtatatagtgcccaggtctgaagtctttattaggacttaactatgggttggtaaactttttcaataaagggccagttagtaaatatttttggctttgtagccattgtggtgtgtaaacagctacaggcaaatatgtgagtgaacgagcacggctgtgtcccagcaaaactttatctatgggcgctgaaagttgattccatatcattttcatgtggcatgaaataatattctttgatttaattttttcaaccaatttaaaatgtaaaaaccattcttagttcaagggccaaacagaaacagtcagggggatcccatgactgtgggctgggccatagtctgttgaattctggtccaaacaagaacctttcagcctgggcaacatagtgagaccctgtctctacaaaaaaatttttaaaaaatcagccaggtgtggtggcatacacctgtagtcccagctactcaggaggctgaggcaggaggattgcttgagcccagggagttgaggctgcagtgagccatgattgtaccaccgcactccagtctgggcaatagagtgagaccctgtctcaaaaaaaaaamaaaaacaaaagaaaagaaaaagaaaaagaactgcatgttgaatgaactccacggatgaggcagtgagctgctcccatcctaggcagagttgaaggacatcatctccccacttctctactggcttgcatacatatcctattttatgacagagaataggactaagggggctttcagaagccgtttgatctaacctccttatttttcagctgaggaaatggagggctgagagatgaagtggcacacagttgggagagtcagaaccagggcttggacactcttcccacgttattttctagtcttctaataaaacatgctgtcctggctcccccatctagtgctataatcactctccaaaatgtaactcttggccaggcatggtggctcatgcctgtaatcccagcactttgggaggccaaggcggccagatcacttgaggtcaagggtttgagaccagcctggctatcatggtgaaaccttgtctctactaaaaatacaaaaattagccgggcatggtgtggtgtgtgcctgtagtcccagctacttaagaggctgaggcaggagaatagcttgaacccgggaggcggaggttgcagtgagccgagatcatgccactgcactccagcctaggtgacagagcaagactctgtctcaaaaaaaaaaagaaagaaagaaaaaaaaggtaactcttgaaacacccaattgttagactccttgatgctctaccttcaggtctgtatatttagttgcatgtaaattatacctcgattttttaaaaactcatttttctccttttaaaaaagtttttaattttaaaaaatagagacggggtttctctttgttgcccaggctggtctttaactcctggcctccagcaatcctcctgcctcagcctcccaaagtgctgggattacaggcatgagtcactgtgtctggccttaaaaaagcttatactatctggaaagttagatagtagggcttgtctccttatagtgatgctattagttgattaattaactcattagacgatttttgaaaagcagggagaagtggcacagtgtgggtaagtcttaagtggggtgctttgaaaagtaagaaatgtagaatgaggagtggctaaagatggagggatcaggctcaggtgagaggggagccaggggaacactgaggaactaagttaatagacggttttaagactccaaaaataaactttattgttttgcttgtggctctcaactgagagcacaagagatgggaacataataaagcacaaagaaattcagacaaggttcagagctcattcagggatggccaacaacttgatagtgtctctaaaatattacaagaccctggccttaatttgcttggtcaagtcccagatgtgttgccaagacatccagcgagggaggcaagactttgtgttgaatgtggtttccaaaccaaactgccacctgctagaaagaacatgtttttcagaccatttcagttcacatgtttgaatactgcacaatctggtgtgtgtgaatttagtaggaatgctagccccaaacttatttatttatttctttattttagagacagggtttcactgtgttgtccaggctgaagggcagtggtgtgatcgtagctcgctgcagcctcaacctcctgggcccaagcagtcctcctgcctcagcctcctgagtagttgggactacagccacatgccaccacgcctggctaatttctaatttttttttttttttgagacagagtcttgctctgtcgcccaggctggagtgcagtggcatgatcttggctcactgcaacctccacctcccgggttcaagcaattctcctatctcagccacccgagtagctggagctacaggcgcccgccaccacgcctggctaatttttgtatttttagtagagacgggtttcaccatattggtcaggctggtctcaaacttctgacctcaggtgatccacccgcctcggcctcctgaagtactgagattacaggcatgagccactgtgcctggcctaaaatttttgtagagatgaggtctctttgttgcccaagctgatctgaaactcttggcctcaagagatcctcaatggccttttgtacactttttcaataagggaccagatagtaaatatctttggctttgcagccattgtggtgtgaaagcagctacagacaaatatgtgagtgaatgagcatggttgtgtcccaacagagttttatttatgggtgctgaaagttgatttcatatcattttcacgtggcatgaaatgttattcttcattttgtccagccatcaacctaatttaaagctcccaaattctctatgccctccaaaccagcacccaaacagttagggagcacttacccttagaagcaggggaatgccacaaggtggaagggtgcagagaagacccacaggctcgaggagagagaggagggaagaggtgggccttgagcacggggttgtactgtgggctccctatagggaggtgtatctggtccggttaagaatgcaacacaacacagggccgggcgcggtggctcacacctgtaatcccagcactttgggaggccgaggtgggcggatcacctgaggttgggagtttgagaccagcctgacttacctggagaaaccccatctctactaaaaatacaaaattagccaggcgtggtggcacatgcctgtaatcccagcaactcgggtggctgaggcaagagaattgctggaacccgggaggcagaggttgcagtgagccgagatcacaccactgcactccaacctgggcaacagagcaagactctgtgtcaaaaaaaaaaaaaaaaaaaaatacaacacaacaaacttgaaggaattaggagcccagggcagtgcagtttatacaactggagactaggacctggtgatttccggagttctgtgaagctggccctcatcctcagagcagatgacatgaggacagtgaggtttgatgcaggcagataacagctggcagaggaggccagggagagctcctcaggttgatgccggcaggagcatgacatgactctggcatacaagacacgagtgaagccttctggacctggcaggtggaaatggaatgctttaagaaaaggcttcattcctttcagggaccttctctgcatttcctcgtattaaagaagaagaacttgactaaaacgaccagttctgctttaatgtaagggaaaaagtgttttgtttggaaagaacagaggcacgaggcccattaaaaagatattgagtgagacccagtgctgggagtcccggtacagtttatggcattgcaaatgcagagtggttaagtctaaaatttgaaagagctgaaagaaatggggagaagttttcaggggctagaaaaatgrcttttgctttcttgtctcttatcaaagcattgatatggaaaaacagcttctggctcctggtgtgattagattaggaagtttaaaaattaaaaccaaaaccaacattgaatgttcgtgaaacattagagcaggggaaaaaaaagaaaaaccatgtaaaaaaaaaaaatcctcgactgagttaatgaggtaatttacataacagtttaaaagaggtcgcccgggatttagggaccctgagtccatgccatggtaatttgtcattgtgctgagacacaaattccagaggagcacggcagggcttcgtgagagctgcataccacttggcgagcctccccgcctgcccccagagcccaggtccacactgcagggtggctgtcttcttactgcttcttgccttttactggggaaaccattcgctaaagcgtgtttgttaatatggaggttcataggtctgggacatagcacctttcatcctaacaacagatggcattcctgccccctctctagacaagcacttgtcctcatcacttcaccgaagggaactagtggagtggttaagagcccagcctgtggagccactgctcaccagaggcccgttgggcctcagctctcagtctctggctatgtggagctacttacccgcaccacgcctcagtttctgcatctgaaagacagagataagagcgccgcctcatggggttcttgtgagggttaaataaatgatatgcgggagcccttagaacagtgcctggcacagaaaaggcactgtttaagtgtggctgatatttgagagcattgacctgtgatcttctcaaagcttggggcaaacgtcggttagtgacctggcattaagaatgaggtcccactaggggagtgggagggaagaataggctttcccttgctcttgcaaggttatttctattctgtctttcttggctgctagctccccacttgccaatgcataagatctaagaaaagagatgccaagaatgaggtaagaatactaaatggaaaacaaatgaaagtgatgaaaggtggggtgtggtggcttacgtctgtaatcccagcactttgggaggccgaggtgggtgaatcacttgaggtcaggactttgagaccagcctggccaacatggagaaaccccgtctctactaaaactacaaaaattagccaggcgtgatggtgcatgcctgtaatcccagctacttgagagactgagtcaggagaatcacttgaacccaggaagtggaggttgcagtgagccgagatcacaccactgcactccagcctgggcgacagagtgagactccgttttaaaaaacaaaacaaaaagaacaaaaaaagtgatgaaaaagaatgtaatgctataatatagagttaaaagcaaagacgcatttttcaactcagatgtattatactaaaaaattgagataaaagcagattaggaagataaaattagggaagggggaggagtttagatactaaaagaaatgaaatattttataaaaattggagaaatgacattctaaaattcaaaagtaagaaataaaggagaaatataggagaaagtaaaggagaaataaaggagccagctgtggctggctgcaactcggtgctttctgcacaccagtaattaagacattgctctcatcacccctaggacccagccaccattttgcacaaaagaaaggaatcttagcaaagttaagtcactcatccaggtcacttgttagaaagtcattgagctgactctttgaccacctcactgtaccaaacggctggaccttaatcaaagaagaggcagaaaaacccaaacagctcccagagctggatgctgccctcactgagaatcctgagaaaaggttttgcaggtttcgggggtgtctggtgggtggagagcagggggtgcagaaagcgaagaccctaccccaggcctcttctgaaagccagtctgaaaccgcgggtttagcttaaggatagacacaagcactgagtcagttttgcactgagcatctaggccagtagggcatgcagacaggcaggtgtgagaaatgccacagcttaagctcaacaatcagcagcagctacactgagccttagagttagagaggcagtaaggagtggtagggactgtggcaaatcagcaagcatgtgccccatcaaagaagtgacttccacagctggtagttgtatcaagaactgtggattcactgctgccagtcttctaaattttcaagaaaatctggaaatctggagttttatgtaaaatctcctgacgtttaaatgttggcaacttatttacatttttaaaatattgtgtgtttgccagcactctgcaagcgaaatacaacaaatatctgcaccctgggcagcctcttaggatctttgaattagataagcactgaattagataagcatcagcaaattcttgcacatacgagagggctctggtccttaaaatgcctaattagcagaaggcatggttgcaggtagtcttaaaagtgaagtaaattaagacactggtgcaaaaaggacatttgtgtaaaagcaaggcaattctaccaagaaaagaggtaatgaagcccagcaggtagtggttttacttttttattaagttggtgcaaaagtaattgcggtttttgccgtcgaaaataatggcaaaaactgcagttacttttgtaccaatgtattagatgctatgggtgattgcctttagccccctggaaataggagatatggcaccgggggaaagataaggatcagaaggtatagaatgggagtggacagctatgtgggtgatagcttccaggggagcgaatgtgggagaagaaaagagggtacagtcttgggcaggggtccccagttgaggatgatgaacaggtagatggggcaaaaagtgcctggaggagcagaggtcacagaaggggaagggtggcagctgaagacagacctgctggattttagagagcagttctgtaaagtcacaggaacaaaagccaggttgcaaagggtgggagtgggaggtttgaataaagggtgagtcagagcaagagggcatcatggacaagagtggggctggatgatttttgttttttattttaaaaatttttaattgtggtaaaatatacataacataaaatgtaccatcttaaccatttcctagtgtacagttcaattgtgttaagtacattgcattgttgtacagtctccagaactcttctcatcttgcaaaactagaaactatacccattaaatagcaactcccccttcccctggcccctggcaaccaccattctattttctttctttcttttttttgagacagagtctcactttgttgcccagattggagtgcagtggcatgatcttggctcagtgcaacctctgcctccaggttcaagcgattctcctgcctcagcctcctgagtagctgggattacaggtgtccaccaccacgcccagctaatttttgtatatttagtagagatggagtttcaccatgttggccagcctggtctcgatctcctgacctcaagtgatctgccccccttggtctcccaaagtgctgggattacaggcatgagccaccatgcctggcctctattttctgcctctttgggtttgactactctagatgatatggacaggagaccgggaaatactgggcagaagagggcgattctctggcaaaggcccgaccctcaagcctggaaacctgtggccctaaataagaacaagcattcctgttttcacccccaaatgttgccttttggcccgccatgccccctatcctgtactatataaaccccaaaccccaggctccatgagcagaagagtggtgtggcagagaaggagagaagagaaggagcatctgaacatggagaggagtccggctggggaccattggagaggagattggctgctggacggccaaactccaggggaagatcatcttcccactccatctccttcctccccatccatcccactgagagccacctccaccactcaataaaatccccgcattcaccatccttcaagcccatgtgtgacctgattctttctgaattccggacaagaacccaggcaccaagaaggcactgagctggttaacacttaagccatctatggacggcagagctaaaagagcactgtagcaagcccagtggagtttccggagtcacaggcacccactcctagacactactgtgtggctggagcccaaaagtgttcgccctggatcctgcacctgcccgtctgtgtgctccccctcccataagggatttgagtgcacacagtggctgaacagatgagccatacctctgttgcacgtcctgtgaggggggtcagggaactctctcgttttatcgatacctccttgaagtagaatcatacagtatttgtccttttatgagtggcttatttcacttaacatattgtcctcaaggttcatccatattgtagcatgggacaggatttccttcctttygaatgcagaataatattccattgtgtggatggatatgcacattttgtttatccattcatcyctcagtgaacatttgggttgcttccaccttttaacttgtgtagcttttttggggggatattttggctctcaaaaggacaaaggaaaaaattaggttcagttgctaggattactcacatgagggtaggcatgggcaggaccattaaacaggtaaaaatatattatgtatgaggcagtatcttacccagtmgcaaattagagaaagagatggtataatttggaaaggtggtttttgtttctgataacccttttatccacatttttggtgtctttctgcctgcattgggagtgctttataggtcctaagacttttgttggttttctttctctaaagctttgctgacatttacttcttaagtgaacattttattttgtctctaaaaagactaggacagaaagaaagactgagtcactttgttgttgagattttcccccattcctaggatcatttcatggcacctgtgacagaggactgctcttaggaacgtggtgtgtatacctctcagtttctgactctactcctagattttacattcaacagtatctagcattttgccttgtcgtggaatgttcttatactgcactttcaatgttggtgtagattagttgattctaaccagaaatgcatgtcagggtgacttgtggtgcatttttaaaacccacgtggccagacactctcctgagagtaatcaaatcagaatcgatggtactggggtacccgggctccagaatgagtattcttagttttattttgttttcgggatgttctcaaatagaatttcattggtagcattctgaactgattctcaacatagagtttttaaggaaattttaatttttcctttttcacaggtatagcaatggattaattttgtaaattcatttctgatagatttgtaagcaatgaagaaagattttgaatgcataaaatagaatttccaaagttctgaaaacatgtttcattgtatatcgtatctgttgtatgttgatttcattcaacaattcattattgagtacctgcttatctgctaggtgctggtcttaagaattgaggggatgggccaggcgcggtggctcacgcctgtaatcctaaggcgggtggatcacgaggtcaggagatagagaccatcctggctaacacggtgaaaccccgtctctactaaaaatacaaaaaattagccaggcatggtggcacacacctgtagtcccagctactcgggaggctgaggcaggagaattgcttgaacccgggaggcggaggttgcagtgagctgagattgcaccattgcactccagcctggcgacggagtgagactccgtctcagaaaaaaaaaaaaaaaaaaaaaaaaaaaaaaagaattgaggggatgactgctgggtatatacccgaaaggaaggaagtcagtatatcaaagagatatcgcagtcccatgtttattgcagcaccagtcacagtagccaagatttagaagcgacctaagtgtccatcaacagatgaatggataaagaaaatgtacttatacacaatggagtactattcagccatagcaaagaatgagatcctgtcatttgcacagcacagatggaactggagatcattatgttaagtgaaacaagccaggcacagaaagacaaacatcgcatgttctcacttatttgtgggatctaaaaaccaaaacaattgaacccatggagatagcagaaggatggttgccaggggctgggaagggtagtggggggctggtagggaggtggggattgttaatgggttcaaaaagtagaaagaatgaataagacctactatttgatagcacaacagggtgactatagtcagtaataatttaattgtacatttaaaaataactctaagagagagtaattggattgtttgtaactgaaaggataaatgcttgaggagatggataccccattcaccatcatgtgattattacacattgtatgcctgtatcaaaacatctcatgtaccccctaaatatatatacctactgtatacccacaaaaatttaaaataaaagatttaaaaaaataattgaagggtcaggtccctattttgtctgttacctcgtatagcttatgttctagttccattcatttggattttattgtctggagataacaatatcaatcactgaaatggttcgctttctgttctcagtgcttcccatattttgatttatttaatccttacaactctatgaagtaggaactatcataatccctattttatagatgaggaaactgaggtagagaggttaaataatatgcccaagccacacatccgttaaatagtacagtggaatttaaagccaggaagtctgacttcagagtcactacactcccctacccctttctgtcacctctgagatatcttagcaaatacagagtctgccttaagccaggcagcagtcagaaaccatgcagtttcaaacattctcatgatatcctgctagtccccttgactcgaagatacgattccttatatcctaatttggagatttgtgccattttccccatcatctcgagaaatgttggcagactctagtattggatttacaaatcacctattgtaatgaagggaacagaaaagaaattttggactataggaggaaaagatcaatgtcaaagtcagaggtcataggacacttaggatcctctgaggcaacttcctgatgcttctatgttttctttctttttctttttctttctttttttttttttgagacagcatctcgctctgtcaccaaggttggcaggttggagtgcagtggtgacatcctggcttactgcaacctccgccttccaggttcaagtgattctcgtgccccagcctcctgagtagctgggattacaggtgcgcaccaccacgctgggctaatttttgtttagtagagatggggtttcaccatgttggccaggctggtcttgaactcctgaccttaagtgatcctccccctctcagcttcccaaagtgctgggattacaggtgtgagccaccgcgcccggccttcctgatgcgtctgtgttttctaactgtatgttattgtgctttatttcccatttttattttaatttttatgaagcagttgttttagtttaggctgtcctgaatgacccctgccagtggtatgttcgcattctctcaaaggaactccctgcccccactattccccttttttctaaaatacataccttaaatattcactatcattcatatcgtcaccagggagctcagtctatatggacagaattgcaaatagaagttcagctgtgatcattgatcgtacaaagttatatgagaatacaacccatttgtgtttgcttgatccaagtcaaaagctcaaacaagatgcaaagaaagcatttatttggtttttcttggttgaaacatcctgttccagcctcatgatgtctttgagagtctgataattccctgcctgttgaactgagcatggcttctgattctgttggagtttcagcatgacttccagcactgttatcttcttaacccttggctgtgtacctgggatctgcgttttgagggctagtgctgtaggaagagtctctggtcctctcagactgctccagtgctggagcccacttggtccctggaccatcctgcttctccacatgctccagtaggggcattctttttattattattattattattattattattatactttaagttctagggtacatgtgcacaatgtgcaggtttgttacataggtatacatgtgccatgttggtgtgctgcacccatcaactcatcatttacattaggtattctcctaatgctatccctcccccaaccccctaccccccgacaagccccggtgtgtgatgttcccaatgggagcattcttgagaggtgtttggtgatggatccgactcctattcacctgacaatgaagtcactaggcagctcgttgatcgccgtgcccatcgccacactggtcatgcccagggtgctgtgcttagctgcagtgcctcagctacgtaggcatgtttaggcagctccccagatgattctcagccacacacccctggttaagagctgttggcatagatgtgctatcatttaatccaccagtttgtctattcttgatgctcagcttgcttccaattatttgctattaaataattcagcagtgcacatctttgtggttaagtctttgtcctcatttctattttctgggataaattctgagaagtccaactgtaggatcataggataggtacatttttaaggtggagtacattttgaatgtggccagtacggtgtgaaaatctggaggcagctggtggagtggagaaagcattgggccaggtgtgaggaagcctgggatcaagaacaggctccgctgcccagcaaggcagggctttgggcaagtctcttccctgcccccagttttgttttcttcctttgtaaatgaggctcattacaaatctgcactgaagcgatagtgcagacatggccgtctcttagtcctgcaggcaggtgtatataaggagggcagatctgctggattctgtggtggacttgtgtagcatctggcttccttttatgcaatggtgatggcttacttgagaagtgcttcaggttttcaaagaagctatcgccatcttctattagaaaagaagaaaatctagatgactatatggagtctattagttcatttttagtcctctgatagatagatagtgatccaggcacttgcctccacaaagcatcatggatgtgcttgtgaagctgcttactctaatattaatctcrctcttgtatctttacagggaaactttatggtgatgttccttttatagaagaaagacacagacatcggttcgaggtacggctttcatgctgaattactggggaatatggatgcttagtgtgaggaacccagtgattayaagctgagcctctggaaaaggtgtctagcctggtggtattcacagggctcagagaggaccaaatttcccacagtctcccacttccagaggagatgggcggcgaggggacaggggtggggagtggggggcggaggctctcatgtttttggctttccaaaggcaaaatctttatgtacctgcacatggggcctatcaatgccctttgttactctaactgccatcttctagatcatgataaggccatcatttcttatccttagcccccaccctttattttgccaattttgtggaaaagaggacttgaatcttctgagaaggaaccaagtgccttttgggatgggggtgcatccctgggtatcagggggtgattagtttgagaacctctttggaaatttacattaagcttgaggcttagcgtcacatgactaaaaggagttaattgttgaggttgccacatgagaaacatagatttctcgaaatgtagatcgtctatgccaggattaatgagtgtgtcaattacgatgcatttgactgtgaagaacagaaatccctgcttgttgtcactcaaatcaccctaaacattaaggaaatttgttatctcaggcaccaggttgtccagaggctggacaggctccaggcatggcacaaccagggctcctgttgtctctgtggttatctcagccctacccttgtctgtgtgtctgcttcgtcctttagctggtctcccatatagttcccaggtggctgccagcagcatctgggacaagaggcatctctccagacagggaaatcaacttagattacctgcccacctgtgaactagtagccatttttcagggcaatgctgaacatcagtgggcttaaacctgggttcttgcaatattcatcttccaagagggctgggtttattatgtttggcttagaccagttagaaccagtttctggaatgggacagatggagtttcctggttcatataggggtggagtggataccaggacaagcctagggctctgttttgaaggaggactcgtgggaatcaatgccaagtaggcaatgaacartgtcactatgaccaaggaacataatttggtacaygtaggacatttttggtcttatttccattgggaacgggcccaactggtgggataaaaattattgagctgctttggctaagtggcaatgagaaggtgcaagaactggtacgtacgcaatagcgtagccattcattcattcacacctattttgcatctggtatgcattggagatggaaaggggaaagacagacatggtctccctcttgttagggagcttacattctaatggagaggacaaaaaataagataacataataattacagattaaatcctgtattggataagggacttgtatctaaaatatatgaagagctcttacaactcaataatgaataattgcaaatgatatgaatagatatttcttcaaagaagatgtacaaatgactaataagcacatgaaaagatgcccaacaatcattagtgatcagggaaatgcgtattgaaaccacaaaaagataccacttcacacccactaagctggctataatcaagcacagacaataataacaagtagtggagaggatgtggggtaactggaaccttcatgcattgctggttggaatggaatatattgcagcccctttggaaaaccatctggaagtttttcaaaaagttagacataagaattaccatatgacccagcagttccactcctagatatatacccaagagaaatgaaaatgtatgtccacacaaaaacttttatctgaatgatcatagcagtaatattcataacagccaaaaaggcagaaacaactcaaatgtctaccaactggcgaatagataagcaaaatgtggtgtattcattcaatggagtattattcagtcatagaaggaaatgaagtactgatttatgctacaacatagataaaccttgaaaacatcatgctgagtgaaagaagccagatacagaagcccacatattgcatgattctattaatataaaatgaccagaataggcaaagctatagatgtgggatatagattagtgattgccaggggatcgggtcagggtgatggggggttgggggatgaggttaaagggtacagggtttgtttttcagttggttgtggtaatggttgtacacctctgaatatacgaaaaatcatttgtgtatttcaaatgggtgaattgtatggtatgtgaattatgtcttaaagctgttaaggaaggaaaaataatgacaatacgagaactggtataattttaaaatgtagaataaaagctctgaggttaagattgcaaagaataggtgagactccaccttaacttttgacagggaagcactttcactgaaggagaggctgaaaaggagtccttaggtttgggaaagggctaaggtgagatgggggccagaaagggccacaagccaggtcatcaagttgccatctattaggatattttagtagaaaacttgctccaagcttctctttagagcttttatgtaactgcatgtaaagaaagcattggggttagtcacaagggaaataggatagttttaatcttcaagcaaatttgtgattcggggagagatagggaagtacacataactcaagggaagaagcaaacatggaaatggctataaataactagtctcaaggttccaggtcagaatgtctgggttacagggcctactttttgaatctcacctttgggtaatagaaggcacctcctagatttaggtgctgtggttacattttatatctgaggttcatcattagtttaaaattggctttgagcattgaatatagacattaactactagttagaggatcactgaaatggaaaacccacccaactgatgaaggacctggtatggcagctggtattgcactgtggcccataaacacttaatttcttgttttgcaggtaaaccctaacctgatcaaacaatttgagcagaatgacttaagttttgtaggtcaggatgttgatggagacaggatggaaatcattgaactggcaagtaagtgggctcttcatttttgaaaaccttccaataacttgcctttttgtggaccacagactaatttgagacccagttttttttgcattctttcttttcttctctcctttgaaacaaatatgtaactacaaagtacatgaaaaaaacagactgctggctgggcatggtggctcacgcctgtaatcccagcactttgggaggctgaggttggygaatcacctgaggtcaggagttcgagaccaggttggccaacatggtgaaaccccatctctactaaaaatacaaaaattagccaggtgtggtggcgtgcacctgtagtcccagctactcaggagactgaggcaggagagtcgcttgaacccaggatgtggaggttgcagtgagccgagatcgcgtcactgcactccagcctgggtgacagagtgagactttgtctcagaaaaacagactgcttataatcctgatcattttggagcctattagtctgactccaccataaaatgatgtattattccaagtctaccagttctacaagtagtatgcttccttaccaactcctctctttctgaggctacttctttgtgccagcctctaggttaggtgctctgggaaaggcagagtggcactgttgagtggcaccctgcctgctctcctcttttgagaaagaatagccaagtgccacctcatttttggtgactgatgttgatttctgttgcttgagggacctggctcctctcctgcctttctccactgtgctgggtggtcaagcacgggtcagtcatttaacttctgaacactaatcactgcccccagagttgtttttaagagcaaacagaacagaaataaaggcatcagaattgaggaagaacaccgaagttgttgttagtaaccaggctggaacacccgtgagcacataggcacaaactacacatttactattgatgagacagaaggcagtgttcttctcagtcagctttgcaaggacatggtaagctcatggtcacagctggtctcagctctttgtcttgatgttctagcccaggggttggcaaactactgcctgtgcaccacgtccagcctgctgtttacagccagcttatgagctgagaatgatttttacattttttaatggttaaaaaaatttaaaaaagaatactgtctgtgacatgtgaaaagtgtatgccattcaaatttgcatccataaataaagttttattggaacacagtttaggggtagaaaggtgttatctgtgaccttcttacccatcataagggtcatgaccaacaaccctataacaagacaggttgacaagagaaaagcataacaaatttatttaatcaaagttttatgtgacactttagtcttcaggaatgaagacccaaagacttggggaaaacttcatttgtatgcttaggtttgatgaacagtggacagccatgtagcaatgtgattgggcaaaagggcatactctaatggtaatagactgacagggaaacccagaaaggcctgtctgctcagattcttcttggcctttctgtgtagcatcccattcccccaggtctagagcaggactcatctggaatgagggtcttatgacctactttcaggaaaggtaggtcagataatttatttatagccagctttcacatggaaaggcgggggaaacatcacagtgaccttcttgctttggaggtcttcccagtcaccttcagttcaaactactttagggtagtattttctgagctccgacaacagcaacactcattcatttatgtcttgtctatggctgcttttaatttttattttttttgagacagggtctagctctgtcacccaggctggagtgcagtgccatgatcatggcttactgcagccttgacctcttgggcacaagtaatcctcccacctcagcctcccaaggagctgggactgcaggtgtgcatcaccctgcctggctactttttttttttcttgagatgaagtcttactctgttgcccaagctggagtgcagtggcgcgatcttggctcactgtaaccaccacctctcaggttcaagcaattctcctgcctcaccctcccgagtagctgggactacaggcatgttccaccatgcccggctaatttttgtattttttagtagagatggggtttcactatgttggccaggctggtcttgaactcctgacctcgtgatccgcctgccttggcctcccaaagtgctgggattacaggcatgagccacgacgcgcagccaattttaaaattttttttgtagcggcaggtttttgccatgttgctcaggctggtctcacctgggctcaaggcctcttccttcctcagcctcccaaagtgctgggattacaggcatgagccaccatgcgcagccaatttttaaattttttttgtagcggcagggttttgccatgttgctcaggctggtctcacctgggctcaaggcctcttccctccttagcctcccaaagtgctgagattacaggcatgagcaactgcacctggcccatggctgttttttatgctaccatggcagagatgagtagttaagaaagagaccttatggctcacaaagcctgaaatatttaccttttatagaatattggccctttacagaaacatttgctaactcctgggctagactcacacatatacacttcatttaactaacttgaatttaacattttcacgtgcctccttgacctgtttgtgtatttggatgttgtgttgccacttccatctcaacttatttaaaactaaatttacatggtctcccaattagttcattctcctgtttctgttaagatatcatcaatatccttgtccagggtttctcagccttgccactattgattgacatttggagtggaataattctttgtcgtggaggctgtcctgtgcactgtatagcaagcttgtccaacccacagtccgtgggctgcatgcagcccagggtggatttgaatgtggcccaacacaatttcgtaaactttcttaaaacattatgagatttttttgcaatttttttttaagctcatcagctatcattagtgttagtgtattttatgtatggtccaagacaattcatcttcttccagtgtggcccagggaagccaaaagattggacacccctgttgtagagtgtttggcagcattcctagcctctactcactgccactatcatccctacctcccacgttgtgacaacccaaaatatctccagacatcatcaaatgcccctggagagccaggtgcagtggctcacgcctgtaatcccaacgctttgggaggcgaaggtcggaagatcacttgaagccagaagttcgagaccagcgtgggcaacatagtgagatcctgtctctacaaaaaactaaataattagctgggcatggtggttcgtgcctgtggtcccagctacttaggaggctgaggtaggaggttgagcctgggaagttgaggctgcagtgagccatgatcatgccactgcacttcagcctgggtgacagaacaagaccctatcttaaaaaaaaaaaggcaagtccctggggggcacatttggtggagaaccattctcctagactatcaggctagaaatttcacatattagctcttcttccccttcagatcccaactagcagtgtgttgtcaagtcctgcagattctgcctctggaaagaaagctggtgtttagaattgcactgccatccctagaacactagtcccagtgcatgccaactccagctcacacttgtcctcaatctccttcctgcttccaagccatcccttctccaatacctcctaacaagaacagaactctgcagtgtgtgacactaatttgttggataaaccactctcatatattgagtactaagggtgtgcaggatactgtaaaaatggtaccgtgatgttccagaacctgcatttccagcctatatgctttaggctccagataaattggattgcctgtgcgtcttctaacctccctcttctttctccgtcttagctcatatcactattctccatttcaaatgccttttctctgtctcttttcctttttgtctctaatctgttcaagtacttccagagtcccgagcagaggggagaattgaagtccaagaaggctcctttgaacgttgtagcattttacctagacctgaaagaaggaaagcaatggacattcagtgtgcacttactggatgcttgtcactagacctcttgctagggactttgcataccttatgtaactaacaaagcagatgatgctattcccactttacagaggacaccggagtgcaaagaggttaaatgacatgcccagggccatccagctagtcctttgcagcaagagcaaacccagttggttacctccttctgccaccactgctgtgggatttcattgtttctcttgttttcacgttctacctaagatgatcaattcatgcctagagttttgaattagaatagtaagtacgcatttccaggagtctttctgatggaaatgcccatcatttagaattaaagtgtggatcgctgttggtattgaagcctcttaaatcttcctagcatgtgagaaggcagaaaatttcttaagcaaattactatttgtttactttgtttaagtacttattcacttttaattcttctggttgtcattattgtcatcaaatacttagaaggttctttcatcataaggatttagattcccactggggctttcaaatttcatgtggattgaaaaggaaatgagagctgctataaaaccttgcagtttttaaaagcggactgcaagcagttattaaggaaaattccccagaagattttgatcttagataccccttggaaacatatccacgaatctccactgttcctgaagggttctgagaggaacaacaaagcttgagattaatattatataatgtcagaatttggtttaaagcaatcaacagcattattttaaagataattttatctaactgatagaacatcatcaaaataaaaactttttactttctcctcatattggcatagaggattttttggataaagtgattcagagcaatgatccattcattcacatagtctgtccctggctattacatgattacattgctcagcatctgtctgtagtgatacaaaagcacagttactgtctgcttttttttcaaagatgtccctagatgttatgcagtaagatttattgtctcttaaattttaagctacattgcttaatttcttctctaagtgcggatgatttctctgcgtttcttgagggaatacattcctgggagaaggtggcattccccttatcaggctttcttacctgcatattcctctaattcaaggaggtttcttcttagatgtagaggatttctacactggatttttctgggatcagagctgtcctatagaactcactggatttttctgggatcagagctgtcctatagaactcactgcaatgatagaactagtccaccctatccaatatggtagccactagccacatgtaactttgaacatgtttcaaatgctgaattaatgttaatgaatttaagtagctacatatggctagtggctaccattttctatagcagagctttttttttttttttttaataatttcaactttcattttggatgcagggagtacatgcgcagttttttttgtttgtttgtttttgtttttgagatagggtctcaccctgtcacccaggctggagtgcagtggtattatcatggctcatggcaacctccacctcctgggctgaagcgatcctcccatctcagcctcccaagtagctggaaccacaggtgcacgccaccacgcccagctaatttttgtattttttgtacagacagggtttcaccatattgccccggctggtctcgagctcctaggctcaagaaatctgcccaccttggcctcccagagtgctgggattacaggcatgagttactgtgcttggcccacgtgcagatttgttacatggttatattgtgtgatgctaaggtttagggtatggatcccatcacccaagtactgactagagtacccaacagatagtttttcaactcttgcactcccctttccttcctccctctggtagttcccagtgtctattgttcccatctttatgtccataagtacccaatgtttagctcccatttataagtgagaacatgcagtatttggttttctgtttccgtgttaattcgtttagaataatggcccccagctgcatccatgttgctgcaaaggacatggtttcgtttttatggctgcatactattccatggtatatatgtgccacattttctttatccattccaccattgataggcatctagttgattccatggctttgctattgtgaatactgctgccatgaacatgtaagtgcatgtgtcttttttgtagaatgatttattttcctttgggtatatacccagtaatgggattactgagttgaatggtaattctggtttaagttctttgagaaatctccaaactgctttccacagtggctgaaataacttacattcccaccaacagtatgttttcttttctccacagccttgccagcatctgctgttttttgacttttttaataatagctgttctagcagggctttaaatgattaccttaagaaagtagacatttgcattcaatcatcatttccttattactgtagtagtagctttggatctttgctggtaagtgatgggaatttgtgattwygaattccatactagattttagatcatttgataaagcacctcattgaaagctttaaagttatatttacttccccctcttaaacttattatattttattatctttagtttgagtcatagccagggacaggatatttgaatgaatggatcattgctctgaatcactttgttcaaaaaatgctcagttttgtggtgctatgagtaatacccaacttaaagctgtgactagaaaagcaattgtcctcgttgggttcccaagggtagcccaatgggttgatattgtgctggtttatcccaggggacacttaccctgggaaaggagaagaccttgcaggaaatggcctgaagccacctaaagaaagaaagacccagggttagcctaaagtccaagggaaattgaaccaacataaatctacaaagtgccttcaaaaagcaggcagatttggggaaagtggaattcttcttgccattcaaaaatttttgcttgactttgctcactctgacaccttccgcacataaaatttccaagatgtgttttacaatttgaaattccacgaaggaatggatggatagtgaaagtaactggctgtaatgataacaggttaaagaatcatcttaccatttaatgagttttcatattcaaagataagaagatctttaaagcagttctcctgtttgtctgctttaatcgcatcgtgattgttctcatttcagatcatccttattttgttggtgtccagttccatcctgagttttcttctaggccratgaagccttcccctccgtatctggggctgttacttgcagcaactgggaacctgaatgcctacttgcaacagggttgcaaactgtcttccaggtaaccagcttactgctcttagcaataaaccaagatgcatagttattaatatcttagggtttcttacaaaaattaataccactatagaatttttaaatgtgaagaatcagtttttttctcttaaacataattttcttctctttgtgaaaatgatttaatcacacctacggtagtaatgtgtcagctttccaaatcgtgatgacactgggtattattttagaaatttttttcattttgataagtgaaaagattgtcttttgttgattctttgattaatatatatgaatttttatatgtttattggctgtttgttttatgaatagtttgttcatatcttttcttcattttggtattgtattattttccttactgattggtaagctctttatgtataaaggtcattaatcctttgttaggctgcaaatatttttcaaagtgattttgctttccttctaaattgttaatggtagttttgttctccctaaagagtttagtccttttttatgttttttaaaaatgtatgtagtcaaatattttacttttgtggcttctgcctttactctcatgcctaacatctttccttatggaaagattatataaataataacccctgtgttttcctctagcatttttctggtttcaatttcatagtttaaatctataatctatatggattttattttcagtgaaacctgtgaggttgggatttggctccctacttccctgccaaattgtcaacgagttgagtaatttgactttgtttcagggatttctattttgttccattgatgattttatctcttacacctgaacctttgccatccttttcattttcatagcattattataaatcaggaccttatcgatcctactcccaccattattaacatgtttagtgtgttttgctattcctccaggcaaactgttatttatttattattttcttagagataaggtctggctctgtcacccaggctggagtgcagtagcacaatcatagctcactgcagccttgaactcctaggctcaagaaatcctcctgcctcagtctcccaattagctgggactacaggcacacaccaccatgcctggctaatttttttaatttattatttttgtagagacaaggtctcactatattgtccaggctggtcttgaattcttgacctcaagcaatcctcctgccttgacctcccaaagtgctggcattataggtatgagccactgtgcccagcctgtacaatgctttttaaaaatcaagtttgaataaaaaattccttagggattttaaaattaaattaaattaaattaatttatttatttatttagggacagggtcttgctctgttgctcaggctggagtgcagtggagcaatctcagctcactgcaacctccacctcccaggttcaagagattctcctgcctcagcctcccaagtagccgggactacaggtgtgtgccaccatgcctggctaatttttgtattttttagtagagacagggtttcaccatgttggccaggctggtctcgaactcctgaccttaaagtgatttgcttgctttggcctcccaaagtgctgggattgtaggcgtgagcctccgtgtcccgccaaaatttcattacatttcaatactagtttggggagagtttatttttctttcttctcatccaaggatatcgtacctaataacttgaaaagcagaagcaaccatccagaatatcatagactttggtaggggttattaccacaataaccagatatatgttgttcagaagattaccactgccaaccctcattctggcaaacaaccctcgcagtgttgctgttgagggctggcaggatctgtgtgtggtgtgcacgtgtgtgcttgttacacaaccctacttatttgtgtcattacctgctaggagaagctcacagctctctagcatttcctttcaccatgtgttcatatgggaacagcttcacataatttgcactttgggcatcttactgtattgatgttcacccctttcagtgcactgactttcaaactgtgctctcggagctggagtctgggctgctgcgggagcaggccatgggggctctgggctccttcctgcttcagctgagcagctccactttatctggctcatgtgccatggttctgcaagagagatttcatctgaagaagagcttcctgtgttctgagactgcacagcttatgccactgattggacatcctaatgtggtcccatgtcagatgtgggctgtgaccctttgcagccgttttacaattcccgttattttagattctcacactgaaaggaaggtgatagtgggacaagttagatggctgggagaaataactcacttataactatctggctgtttgcaaataccaactaatatacaaatcctgtctggctcgtgtggactgcccacctgtgtgttgtatggcctgccaattcccgcatggcgggtggtggtctctgggtagagcttccagcggggtgtggtggctcacgcctgtaatcccagcattttgggaggccgaggtgggcagatcacctgaggtcaggagttcgagaccagcctggcgaacatggtgaaaccccgtatctactaaatgtacaaaaattagccagacgtggtggcacacgctgctgctagggaggctgaggcaggaggagcgtttgaacccgggaggcagaggttgcagtgagctgagattgcaccactgcactccagcttgggcgacagagggagaccctgtctcaaaaaaaaaaaaggcttcctagtagtttctgaaaaaactgactgattgctagtgactcctgagtgagatatagtatgtctcagagagaaggaaagacctcttaaccaagctctgatgctggcattggaattatagctgactagtaggcttccatgacactgagggaattcctacgtgtatcaaccacaaattggtacattccttaaggacagccagcatcttatttatctttatctccctggctcccttacacacaggggttgtttattacccattaaagtaatgaatgcaggtagcaggggagtcaaatcttgacacatttcagagagttttctgacagagggtggtgactatgaattaatccagtgacagacaccaggattccagaggaaccttgcacttcaactcctctctgcccagctccatgagattagtgagctttgaaaagcaaatgactactctgatgccaggctctaatgtgagctgagttggggctgtatttctgacaaacaagattactgcttgtaatcaaccctaaacaatgtgacaaggaatatgaacactagaataatgacttcctttcccagaagttggcgctgatgatattcaattgtatggcacgtgtacggccaatgtctttaaagcatggagtgtaaaaatccttgcctttgagttaagcgtacctgaggtgtaacctccgcattctgcctagcggagaatatttatcttttagggcctgggaagttgcagtaagactattattttgggatttacagctagtgagctaaattctcagctacttcattatctacagaatggcagcagttaggaagaccaatttcacctggttttaggcttgtagtgggcagttcaagggcacaatagcttcaggacagtattttttaggtttttatgagctatttaaaaatacatgcaaaatcaaaataagagtcttgtttagggggtccccccaagactgcccacactttggtgatttgctgaaagtaatcagaatatagctgtactcatagctaatatttatttatttatttatttagagatggagtttcactcttgttgcccaggctggagtgcaatcatgtggtcttggctcactgcaacctccacctcccgggttcaagcaattcttatgcctcagcctcccgagtagctgggattacaggcacccgccaccatgcccagctaatttttgtatttttagtagagatggggtttcaccatgttggccaagctgggcttgaactcctgacctctggtgatccgtgtgcctcgggctcccaaagtgctgggattacaggtgtgagccaccgcgaccggccttatagctaatatttattatggtggcaaagtaaacatgcacagcaagatcagtaatgggaaagataagtggagtctggagaaattcatttgcacgtttcctatgatctctctcctgtgataagtcacgtcgagttcgccttccttccagcagtgaaaatgcaactatgcctatgtgatgtttctgcccagatgagccagtttgaggctcagagtttagggatatttcgagggctggtcacataggcattttctacctagcaaccaccaaaattccagatgccagagggaaagcaggtgttcaccatagatcacattgtataaacagcctaagcccagcaaaatgaccttatcagttagtaatggagcacacattccgaaagccatgttcccggacaccagccaagaactaaccctgcaagcaggccctttgaaagatagcagcctcaagcctgctgttaactctttttttacacgagtctaactaacaaaccattttgaaaataaaaaaatcaaatgggaaataatggtccattaaataaatcattgcaattctttgctgatctctctcctctggtgtctaaacaatttgtctcacgtataaaaggcaaccacaaatttgcatggtcttgctgacacataatgtaaaagaatgagactgcttcatgtaattataagaaatacatttcaggagaatatgaaggtgcttgtaattgcaagttttctttgtttgtttgcttgtttaaatctagaaacagagcatctaatctctttctggaattcctttttttttttttttgtttctcaggctggtctcaagctcctgggcgcaagcaatccgcccaccttggcctcccaaagtgctgagattacaggcatgggccaatgtgcctggcctgaggcctagaattccatttttaagtaaggagagaaggatcagagtctaaagttcatagattgttttctagcatgtgtgtctctgtggctgcctgcaaggctcttgggagcaatcactacacaccaagtttaggcacaacttccagtttttatttgtcagatcagagtaaaactctcttccttggacagtgcttgatgtatatcagaaagcaaaaacttagatggggttcagtttgcagttcacagaaatgcagctttttgggaaacatatttttaagtataaaaccagaatcttgagtcatttgagtagcattttattctagttttggaactttggattccatgtctccatccagcaattactgtctcttgtgcagataaatcatctttttgtggcaaaacaggaagcagcgtggtacaaaaacaacaggagggaaaggtactcagtgattcactgtatttgcttgactgtttcagaccaaacccaaaagccgaaactactttgtaataagagagtctttaaaggaagtacacacctgaagccagttccttccgtttcctctttcctttgtgtgcccctaggatctaagtccattctctcctctgtgcttagcccttccctctatatttgttgagtcctggcaacagtcagggtgagaaggaacccatttcattcaccattgtctctggtctctcttctgtgacaatatatcggggttttttcctgctaagtaacatgctgacttctagcctgggatggttttgttttctgttaacttctacatgtagcattacagaaaatttagaaaagagagagagagaaaaaaaaagcacccacaaacccaccagcctaacataattactgtgctcattttcaaatatttcctatgagcctatacctgtatatgattctttctgtggctgtaataatagtgagtgtatctatctatctatatagatatatatacacacacacccacactcttttattttgaaaacttgcaaacctacagaaaagatgaaagagtgatacagtgacggtctggagatctcctttgcaaaggaacatttttctccattttggttttatttatttatttatttatttatttatttatttatttatttatttatttttgagacaagtctcactctgttgcccaggctggagtgcagtgtcatgatctcggctcactgcaatctctgcctcccgggttcaagcaattctctgcctcagcctcccgagtggctgggattacaggtgcccgccaccatgcccggctaatttttttgtatttttagtagagatggggtttcaccatcttggccaggctggtcttgaactcctgacctcgtgatccacccgcctcggcctcccgaagtgctgggattacaggtgtgagccaccgcgccaggccattttggtttttaaataccaaaaatttgaaatgaactagggctcctggaagtaatggttgattccaggactggggcrggaaaagtacaagatgagcctggaacatattgctgtatttaaagcaaggaacagctgaaaatgaaaggggtatgagttttccaaggtcaaagaagccagcttgaaagggcacccactggccttattttggacaatttgaacatcaaaaagaacaatgacagtattagattataacacatttcattttctgaaattccatgagtccataataatactaagaaaatacaaaagcaaagaaaaaagaaaagccaattaaaaatgtagatgtcatctctgatgtaataatggattcaaataaggatcatcagtggatgctaaagccactgggtgaaatttgtaagaaacagaatattcatatgttttcagaatagcaccataaattctttattaattacagaagtttgtattttgaacttaacacttcatatgcatttttccaagttgcatgaagttcatttttaatggctgcacacttcaccattcactcaacacaccccctatgttaaagcttattctatcccagccactgtgctgggtgcttgaataagtgcttaaataagaacatgttccctgacctggggactcatcaggtagtataactgttctctaaattttgggaggtgacagacttccaagattgtgatcaaagctgtgggcccacttcctggaaaactgcccaaacataccactttgtagtttccttacattcatacccccaatgctacccccgtcccctgcatccatagactttcttctaggggtcttcagctacagaccttcccatccaggaaagggcacagacctgcaagcgcacagtcccagcagtgtgggaaatgctggcattagagcttgttctctctttcgtggttgtacccagggaatgctcccaggttgccaggattaactaacattaagattaatatcttcctgcaagtggtaccatcacccacacagtgtgacctggctggactcccctggggaagctcagattcctcctccctcatccccattgctcatagtcagcaggtgctggcaattcctgttgttggaattcactccatcttttgtctattttctgccatgctgcaagggagtatggcccggagtcaggactctagctgtcaaccgagttcaaactggctcttttacttcccagctggctgtgaccttgctcttctgtgcattgctttctttataaaaaggggatggtaatagtccccacttgacatggcagaaatgaagattaagtttcacactaaatgtaaagcactgagcgtagtgcctggtctatggtaggaacttaaatgggaattattatgatgatgctattattattacttttcctttagttccagtatctatctcttgcctactgcaaagcctcctacttggtttctctgcctccagcttgcttcctcccaatccgtcttctgcggttggaatgatctccccacattattttggaacttaaacccccccccccccgatggcttcccttggtttataggataaaatgcacacaaatccatatggaacagcttgcagttccctgaactccccagagggttttgcctgttgtgtcttgatacacattcctgacctgcttagtgagaggggaatagggatctatatcctattagaatggttgttcacggactcgttaggtgaacaaggtgaatcggaggtgacaaggtggcgaatcggaggtgaattattaggtgaattgcaggtgagagtggctccctccattgttcacagagggtgcatttcactctcccaggcatgcttctcttacgttgcgtggctctgctctctcttggacttggagagcaaggtactcttttcccttgcacaaatccgacattctgtttccagcactgcttgaaacttggaatcgctttgtttcaaacttggaatcactttgctttttgactttgagttgcatggttgatgttgccaggggccattcttgcaccatgtggtgcaaaaatattttacttctgtggggacactattgacaagtagggtagatgctatggattttacttctgcgtctgctgcttattgagtaattttgtccaagtcactactcctaaacttgctgattctcctccttagggccgctgtgagggacagttgaggtggtgctttataaactcaactgctatcaaaatgccactttccccgctttgttacacttcaagcaaaagtgaactgaaattaacaaaagattctattttgctttcttttgaactgttcttttaaacattttagaaaaccattcacccctgtgattgtttgacttcaactccataccttgagatattttttagggtaaattattgttaatgaaccacatttgagtacaccttcccttggggtgggataaacgttggttaaaaggtgcttttaaccagatcacggtgcactgcagtgtggatggtgtggtgccagacacgaatggaattaatagtactacagactaccgtgtgcttttaccaccctgcctgggtggtattctactgtttactatgaaatataaaactcattcaaagcagactaagtttttgttccattgttcttatattttatggcttccaggggccctttatgaaggaaataagtatagtagtaatactgctttggggaaaactgtgttcatgacaatctgtttttaaaacatgctgtttcacaggaaacggattttaatataaagtattgtaaggaactcatgcatgctgggaatcctaactatgccattaaaatctttaaattccaaccacctctttctgttaatggagaagaaatggtttaacagctgccttggggtagcgtaaaggtgggctatatgaggcattgctataccctttccctagcaccttggaatatctgttttcttatgttgggaatttattgggagccagaagtccttgacaagcaaacttcactatgacaaacctttcgtttgtcaagagccacatgttggctgggcacagtgggtctgtaatcccagcactttgggaagccgaggcgggcggatcacttgaggtcaggagttcaagaccagcctggccaacatggcgaaaccctgtctctactaaaaatacaaaaattagctgggcatggtggtgcattcctgtaatcccagctacttgggtggctgaggcacaagaatcttgaacctgggaggcagaggttgcagtgagccaaggtcacaccactgtgctctagcctgggtgccagagtgagactgtgtgtcaaaagaaaaaaaaagggggggggtgccgggtgcggtggctcacgcctgttattccagcgctttgggaggccgaggtgggcggatcacctgagtttgggagtttgagaccagcctgaccaacatggagaaaccctgtctctactaaaaatacaaaattagccagacgtggtggcacatgcctgtaatcccagctactcgggaggctgaggcaggagaatcgcttgaacccaggaggtgaagattgtggtgagctgagattgcgccattgcactccagcctgggcaacaagagcaaaacactgtctcaaaaaaaaaaaaaaaaagaaaaaaaagaaaaagaaaaagaaaagaactacatgttgaccattgtggtaaagtcttgtcagtatagtgattcctctgtgttgctgctggtgattttggttttgtcttgcaagaaatggtaccataaaatactttttaaaaagagagttttcatgatttgggaggcacacgcatgcataagagatatttgctgtgattttcattaatggtagatagacctttaaaaaaaacttttggccctttatttccttctcctgtctaattgccctggcaagaacttccaacactatgttgaataggagtgatgagagagggcatccctatcttatgccagttttcaaagggaatgcttccagtttttgcccattcagtatgatattggctgtcggtttgtcatagatagctcttattattttgagatacgtcccatcaatacctaatttattgagagtttttagcatgaagggttgttgaattctgtcaaaggccttttctgcatctattgagataatcatgtggtttttgtctttggttctgtttatatgctggattacatttattgatttgcgtatattgaatcagccttgcatcccagggatgaagcccacttgatcatggtggataagctttttgatgtgctgctggattcrgtttgctagtattttactgaggatttttgcatcaatgttcatcaaggatattggtctaaaattctcttttttggttgtgtctctgcccggctttggtatcaggatgatgctggcctcataaaatgagttagggaggattccctctttttctattgattggaatagtttcagaaggaatggtaccaattcctccttgtacctctggtagaattcggctgtgaatccatctggtcttgtactctttttggttggtaagctattgattattgccacaatttcagctcctgttattggtctattcagagattcaacttcttcctggtttagtcttgggagggtgtatgtgtcgaggaatttatccatttcttctagattttctagtttatttgggtagaggtgtttgtagtaatctctgatggtagtttgtatttctgtgggatcggtggtgatatcccctttatcattttttattgcgtccatttgattcttctctctttttttctttattaatcttgctagtggtctatcaattttgttgatcctttcaaaaaaccagctcctggattcattaattttttgaaggattttttgtgtctctatttccttcagttctgctctgattttagttatttcttgtcttctgctagcttttgaatgtgtttgctcttgcttttctagttcttttaattgtgatgttagggtgtcagttttggatctttcctgctttctcagcccaaaatctccttaagctgataagcaacttcagcaaagtctcaggatacaaaatcaatgtacaaaaatcacaagcattcttatacaccaataacagacaaacagagagccaaatcatgagtgaactcccattcacaattgcttcaaagagaataaaatacctaggaatccaccttacaagggacgtgaaggacctcttcaaggagaactacaaaccactgctcaatgaaataaaagaggatacaaacaaatggaagaacattccatgctcatgggtaggaagaatcaatatcgtgaaaatggccatactgcccaaggtaatttatagattcaatgccatcccaatcaagctaccaatgactttcttcacagaattggaaaaaactactttaaagttcatatggaaccaaaaaagagccctcattgccaagtcaatcctaagccaaaagaacaaagctggaggcatcacactacctgacttcaaactatactgcaaggctacagtaaccaaaacarcatggtactggtaccaaaacagagatatagatcaatggaacagaacagagccctcagaaataacaccgcatatctgcaactatctgatctttgacaaacctgagaaaaacaaggaatggggaaaggattccctatttaataaatggtgctgggaaaactggctagccatatgtaaaaggctgaaactggatcccttccttacaccttataccaaaatcaattcaagatggattaaagacttaaacgttagacctaaaaccataaaaaccctagaagaaaacctaggcattaccattcaggacataggcatgggcaaggacttcatgtgtaaaacaccgaaagcaatggcaacaaaagccaaaattgacaaatgggatctaattaaactaaagagcttctgcacagcaaaagaaactaccattagagtgaacaggcaacccacaaaatgggagaaaattttcgcaacctactcatctgacaaagggctaatatccagaatctacaatgaactcaaacaaatttacaagaaaaaacaaacaaccccatcaaaaagtgggcgaaggacatgaacagacacttctcaaaagaagacatttatgcagccaaaaaacacatgaaaaaatgctcaccatcactggccatcagagaaatgcaaatcaaaaccacaatgagatatcatctcacaccagttagaatggcaatcattaaaaagtcaggaaacaacaggtgctggagaggatgtggagaaataggaacacttttacaccgttggtgggactgtcaactagttcaaccattgtggaagtcagtgtggcgattcctcagggatctagaactagaaataccatttgacccagccatcccattactgggtatatacccaaaggactataaatcatgctgctataaagacacatgcacacgtatgtttattgcggcactattcacagtagcaaagacttggaaccaacccaagatgtccaacaatgatagactggattaagaaaatgtggcacatatacaccatggaatactatgcagccataaaaaatgatgagttcatgtcctttgtagggacatggatgaaattggaaatcatcattctcagtaaactatcacaagaacaaaaaaccaaacaccacatattctcactcataggtgggaaattgaacaatgagaacacatggacacaggaaggggaacatcacactctggggactgttgtgggttagggggaggggggagggatagcattgggagatatacctaatgctagacgacgagttagtgggtgcagcgcaccagcatggcacatgtatacatatgtaactaacctgcacattgtgcacatgtaccctaaaacttaaaagtataataataaaaaaaaaaacaaaaaaaaacttttggcgaggcatggtggctcacacctgtaatcccagtactttgagaggctgaggcgggagtattgcttcagtccaggagttctaggccagcctgggcaacatagtgagaccccattcctacaaaaaataaaaataaaaggttagatgggcacggtggcatgtgcctgtagtcccagctactcgggaggctgaggtgggaggatctcttgagcccagaggtggaggctgcagtaagctgtgatcgtgccactgcactccagcctgggtgacagagcaagaccctgtctcaaaaaaaattttttttaaggaaatgacaaggaccattgcatggtgactgtagtttgctttttaaaaatcattattcatttgtttttagatcagtactatccaatataactttctacgctggtagaaatgttctataatctgcactaccatatatggtaggcactaggcgcacatggctactgagcacttgaagtgtgacaggtgcaaatgaggaatggaattttaaattttatttcattttaactgatttaaatttagatagccactgtggcttgtggctaccatattggacagtgcagtttaaaaattttcccctcttcttgggaggccgaagcgggcagatcacttgaggtcaggagtttgagaccagcctggccaacatggagaccctgtctctactaaaaatataaaaaattagctgggcgtggtgatgggtgtctgtaatcctagttactcaggaggctgagacaggagaattgctttaacctgggaggtggaggttgcagtgagcccaaatcactgcactccagcctgggtgacagagcgagacacactatcttaaataaataaattaattaaaaatttcctctcttcaaatgtaacaagacacatagggacatgtctgtattttataccacttcataaaatttaacatgcaagactctaatatatgataattcttccctgtgagaaacgtgtgtgtgtgtgtgtgtgtgtgtgtgtgtaaaagattgctgaaaaagataggttagtcctaagatagagctggatatcttgaattaaatgaaaatatacccagacacatctagcttatgacttaagtttgttctgtgtgaaacagaaatgaacccggcatagagtagcgctcacggcgcatatgcagcacagagtgcactcacattttattgcatgtgcaagagccactgttggtctgcattcagatgacccacattttatttctagcagttgttttttattggcagatgaacgtcctaaaatcagcaagttcagcagtaacgtatattttgataattgtgttcttgagtgtcatggtttgttttattgtcctaccgccagtctctgaacatatgaaagacaattagtgaacccagtcattaagcttggagatgaataaattcaagctgaacttcattttgttaaactcagcctgtgccatttggatgtgttggcagagcttggggcagacagccatcagataggaaatgagagctgttagattagaaacaggcccgcccaagtccacttgctaatgtgggtaggaaattatacttggcataggaaacaatcctgaaaatcatacacttagcagtttttattggttctttatgtttccatgactgtttgaggagataccaagttatgaatatataacccctatcaatagcaacatcttatgtttttatatagttttcagagcaagtttatacagtttcttttgactctcaaaacattttggtgagtttggaggtattattgccattttttctagactcagaagtcaatgacttgtccaaaggtacgtggctcataaatagtataaccaggagtgtggggggaagatatgagcccactgtattcttccccaggcttagagatggggaaggaagtgggtgtaaaatctggcacgcaaggaaatgaagttccctcagtcctttggcccttgtcacttgcgttaggggacatgccctagtgggtcctgctgccctacctgtggcacagcttaaaccctaccctgtgccccgagctagtataatggggattctggcttcaccttgaaggatctatgtgccaagtaagtcacttgaacgtccttgaccttcatgtcatctcagataggaagttgagtgcaacttccaaatcccctttcttggctaattctatgacacaaaatgttgcatagaacgaggaaggagtctccatttgagcagggagagtgcatgaataggatgtatcagcttttttggctgttgttttttttttcctccaaatattcttcagttattcctatgtaccagtagaagggatttctctgaactaaagtctaagtaggaggtatctttctacttgattggttttaaggatatgttgttttatatgtttatctaacatatgttgtcttttctgccagttctgaatcttctatctcctctccttattctagtgctccccccacccccgccaccacctacgctgtttttgttcaaaagccagagaaggaagtgagcatgcaaatcaggaaacagattgtctttttgcctatgcagatttgtctgtgattttgtttatttattaatattcacttagcatgtttagagtaaaatcttccttttctagtctatcagcatagggtttctccaattgttccctttcctcaaaaaaaaaaaaaaaagtaaaatttcacctgttagggaattcagactttttttttttttttttttgagacagagtcttgctctgtcgcccaggctggagtgcagtggcgcgatcttggctcgttgcaagctccgcctcccgggttcacgccattctcctgcctcagcctcccgagtagctgggactacaggcgcccgccaccacaccyggctaattttttgtatttttagtagagwyggggtttcaccgtgttagccaggatgatctcgatctcctgacctcgtgatccgcccaccttggcctcccaacgtgctgggattacaggcgtgagccaccgcacctggctgggaattcagacttttattgctataaatcagcaaaagtttggccaagactggggatgggtcaggcatgaaacatttccttgtaatatcatctccatagatcagtagaactctagtggagtagatcagtgtgctgatttatttggaactgagtaaaaggaaccacaaacagaccccacagctcagagtgaaagttgagttgcagagctatctcatggggaaggggtatttctaaggcaacccaacctggcgatatttgtcaataattggtcctattttgaatactttctgtgactcaaggtaatcagggcattccatatatttctaattttgaaatttgcataattgtgaaaattatttctccaactcttggacctatgagaatgttggaagggaaaactttcacgctgctgacctaaaatcataatgaaaacatgatctgaaggagataacatttcaaggcaagtgtagagagtgcgttaacattttttatgtcactgcagggtgttttctgggtcttgagccaatatgcacgtcttagtcctcatgaccaccaagttcaagctcctgtgcaatttgctgatcgtagatgactagttcctccgtaatgaggaggtgctgtgattctcaagcacggaggccagcacagatctggatctagggaggtgctgtggtccttaaaacacagagccaaaagccaaactgcagctgaaaagaattacagcatttcgctaatgtaatcagggatacrcagctgtgttcactgttctctagtcctttcatgttgctagaggggagaaaagatagtttttcctctacccatcataggttcatggccaaggccctgataacaaaaaaacagattaacaagcaaaaagcatacagttgggcacagcagcaggtgcctataatccctgttatagcaggtgcctataattccagttacttggaaggctgaggtgggaggatcccttgaggccagtagttggagactagcctgggcaacagtgaggcaccacctccccacactcacacacacacacactccagccccatttcttaaaaaaaaaaaagagacagagaaaagcatacaaatttatttaatgtaagtattatgggaaccttcataaggaaatgaagattcaaagaaacaggtaaactctggtctttctaaaacagacctgatgaagagtagagagtcatggagagttataatagagcaaaaagagtgtgatctcatggtaatatagtaggggaacttagcaaggcctgtttattcagattcttccctgggatcctgtgtcttcagagataaggatactcgtttcctctgggtatgggggttgggggtacctctcacctgagggccttttgacctgcttggagaaggtcagaaaatccttccggggtgttatgacctgcttcagtgggggaaggtcagaggaaggtcagagagaacttcttgcacatgctgtctcaaattccttccgcttcatgcaatgtatatgtgggggctgttatggttagagtcataatagtctaggtcaggggttgacagactttttctgtaaggttagagagtaaatatgttaggcttatgagccatacgcaatatgccaagatgccatattttggggtagtgtgtcctgaactccctcattgccaaaggaaacagttgtcatcagaagaatgaagaatgaaaaaaacaaactgaagatccaggtaatatcgtatgctatgttattacattgaagaacaaattgacatcagtaggagtaggactaagtgatgctcaacctcagatggactgaggtttagtccctagtatgacaagagtagattcacagaaaataaatgggtccatcaactcaggctttcattttaaatcagtttgttaatataacacctctagtagaaagcaagcaatagttaaggtggcaggaaggcaatctactttcaaggcttttattaaagtttagaaatgatcagtggtcttcagaagattataaatttcagtctaaactgaaatgcgtttttaattttctgaataagtaacttccagtttacgatgaaaataagtgatcagtttctctgaccaaagaaagaggccattgcatgtgattggactgacctcttcctgtggtgactagaaagtgctaaaagaatattctttagtattttctctcatactaaggggttaatatggaatgtgtttgaaattgcaaattgaataattgtccaggttttttttttataccttgctaaattagttcctcttttaatctagtgatagatacagtgatgccagtgatgacagcttttcagagccaaggatagctgagttggaaataagctgaaatgaatacatgactgggaataatggggactgcctgtgagggtaagatggaatcttcgaggattgttcatttctctcatggacaagctgtcatcttggtatagaggcgggtattataggactygcctcacaggatcttgcccctttgagatactcccatttgactggcacagttagcaggacacgcatgacagcccatgacagagttagtgtttggggaaaatggaatgcaccttgggccaggaaaaaaaaaatataagtacacctataaatgtatatgtgggggctgttgtggttagagtcatcatagtctaggccaggggttgacagactttctgtaaggtcagagagtaaatatcttaggcttatgagccatgcagttcctgcggcaactactcaattctgctgttgtagcaggaaagcaaccatagacaatatgtaagtgaacaagcatggctgtgttccaataaaattttatttacaaaaacagtttgctgatccctggtctaggccactcatagaagagcagatttccttggatttgtataaaataaaattaaaataaaataaaacataaaataaaataaaataaaatagtatttgatttctttgtagggagatgcaagagacaggcttagtgtccaagggcagcttatttttccattgctctattatgcactattagagagaataccagcctggatagcttcagtaaatttatgctcagtggcagatagtgcctggattgccctaggcattatggcaggccttgacttgtataagctgttctttagcagagacagcagcttttggaagacttgtaaagtgttcattgctttcctgtgaggtctcttcatgtttatcagggaagatgcaaagctgtgtctatttagttttgcctcaaacatggagaccctttggagcaagccaaaatggtgcaaaggttagctggagatattgaaagacttgtattattcagttcctggtgttgctaatatttatattcttttcttttaagcctctgaaataattgaaggcaagatgaaggaactatctgaagaaatcactacactcttagagaatccctctgttctccagcaaacatgggatgtaaagcctcacagggaatctgataatacatacttctgtcaaccagaaccagaggggtagttttcttttccctccagaggcagcctttggtacttaaaatatctgtagctgattaaatttttcycaacaacctcactggggagaaagtgtgttcatgttttgtccagcggatcaggatgttaggatgacgagcaagagtccaggtcactgtgcctttgctgtgttgtatggaaaggatggcagggaacatgctgtaagtaattttgagtaagaaaatgagtcactgtgttacctggaactcagccacagatttgtgtgtggtccaagatcattgcagtttctcaccctgtttatttcctggtaaaagtaaaattgaataggtccaagacttgggggtggcaagtaaggctttgcctcaggcacaaaatttaagggggctccaaaaaactcaggaatcaagatcagcaatacagtctgagtatcccttatgtgaaatgcttggggctagaagtgttttgaatttcagattttggaatatttgcatatacatgcgatatcttggggatgagactcaagactaaacatgaaattcatttatgcttcatatacaccttatatacatagcctaaaggtaatttgatacaatattttaaataattttgtgcatgaaacaaagtttcgactgcattttgactgtgatttcwggcatgagatcagttatggaattttccacttctagcgtcatgttggcattcagaaattttgaaattttggagcattttggattttcagattagggatgctcaacctgtatatatattttttaatcgacgtgaaattcacgtaacatagaattaaccattttgaagtgaacaatttggttgcattcactgatgttgagcaaccaccacctttaactatttccaaaacattttcatcactccaaaataaatgcctgtacacactagcagtcactccctatcttcccctccacctgtccgctggcaaccactgatctcctttttatttctgtggctttttctattctggatatttcatataagtggaattacacaatatatgtggtcttttgtgtctggcttcttctgagacagtaggaagggggcttggctttggctcacccccactagagcattttttcatgcattcccactgatcacaaaacccatactactacctcattgacaccatacctgctaacctcgaggctttagtcatacaaagaaaatggcctttctgtattgttcttctgtgctctcataatgcttaaccatgtcttttacttaaacaattccaggaactggccttaggagatccaaatagggaaccaagattgcagagtgtcccatcttgggagggaatgctgaataattaattgatttacagccttgttgccgctggccagaccaccaggtggcccattactcgagatgatcatcacaaccagatgatgctaacctatatcctctacccttcgcgtgctttgtctgggaagtcttttggccccatgtcagtttctattgcattgagagcccaagagcccctggtcagtcaggcttccatttagcatggcgtttgcaaggtttacccatgttgtagcatgtgtcagaatttcattcctttctatggctgaataaaattccattgtatgaatataccacaatttgtttcaccttttggttattgtgactaatactatgaacaatcacatgcaaatgtttgttggaatgcctgtttttaattcttttggggtgtatgcctaggagtggaattgctgtgtcatatgtaattctctttaacttctgaagaaggatcagtaatattttaatgtagtattattttaaaaaatcaaaattaggccaggtgcggtggctcacacctgtaatcccagcactttgggaggccaaggcgggcggatcatgaagtcaggaattcgagaccagcctggccaacatggtgaaaccccgtctctacctaaaatacaaaaattagctgggcatggtggcccgtgcctgtaatcccagctacttgggaggatgaagcaggagaattgcttgagcccgggaggcggaggttgcagtgagctgagattgcaccattgcactccagcctgagcgacaagagcaagactccgtctcaaaaaaaaaaaaaaaaaaaatcaaaatgaaataattcacatttgaacacaaaatcaaattttcaaataaagacaggatccagctctgcacctccttcacctcccccagtccttgccccattctctgacgttcttatctagtatgttttctactttttcctgttgaatgtgcttgagatgacttagttgttgcctacatttaagctttctaatactaatttaaatattttaattgttcagttaatttttttgtggtggttttgctccccccccaacttttttttaatgccataaggtattatggccttattttgtaagatgccacagaaaattcatctaccaagcacatacaaaaatgaaatgagtaattctggtaaacaaaaaaattaaagagctttagggccctgcttgcgaaaattacagcttgaagatcacaagaggctccaaatgaaaagcccgcacccacggtaggttaaaagctggaataggcctcatagagagggggttggaagctcagaggcaacacttttaacatcacaaaggggtagtctggcttaaatggaagttttcaattttaatgattgtgatttctaaagtcatttgtaacagagtgctttcctgtgggctaatgatgcatgtaaacaggaccagaaagacaagcacttaagaaacaataaaccatcctgtccccttgaacttggaatgtagggaagcacagaaggacagtagcatggctgcttagcatacaggtactggaacaagagtgagacatgagcacatagaaagtcactataaatcattactcaacaaatgtttcttgagccaggcatggtgataggggtcccagtccagaccccaaaagagggttcttggatcttgcgcaagaaagaatttgggggcaaattcatagaataaagtttattagagaagtaaaagagacaaaagaatggctactccatagacacagcagcggcacgcgctgctgactgggtatacttatggttatttcttgatcatatgctaaataaagggtagatcattcatgagttttctgggaaaggggtggggaattcctggaactgagggttcctcccctttttagactatatagggtaacttctgaacactgccatggcatttgtaagctgtcatggtgctagtggaaatttctttaagcatgctaatgcattataatttgagtataatgagcagtgaggatgactagaggtcacttttctcaccatcttggttttggctggcttctataccacatcttgttttatggtcagagtttttatgacctgtatcttgtgataccagtcctgccaacctcctatctcatcctgtgactaagaatgcctaacctcctgggaatgcagcccagtaggtctcagattcattttacccagcccctattcaagatggagtcactctggttcaaatgcctctcacaatgtcaggtgccgggggtgcagtggggagtaacctcagatagaatagaaaaggaactcagttcctttttcacgtttttttttttcttcttgtctcactgatcacaagacccacacccctgccttgctgacaattggttttagataaggcttcaggcttacaaagaaaatagccattcttctgtgctctcataatgtttaatcatgccttttacttaaaagaattccaggaactggccttaggaaatctaaacatcaaaccgaggtttcagaatgtcccatcatgggaagggaaggaaccctgaacaattgatttgcagccttgttacagctggccagacccccaggtggcccattactcaagataaccatcacaactagatacgctaaccagcatcccctacccgtcacgtgctttgcccaggccagcctgcataccctacccatgataccaattcctgtgtttgcctaataaaaaaaatccctaccaccttttcagggagtcagcttgagggtccttgtacctctggtgtctcccctgcactcgagcacaagccccaagataaaagccttttctggaaatctgcttgtccccatgttaacttttattacatgatgagcccaagagcctgtcatctgtaacaaacctgccttcagacctgaccatctcttgggggaaggcaggctttaaacaaatctatagggaaataagtatttaattatattaataattgtgatatgtttagaggctatgacactatcaaagaacaaggacaagggggcttgagagtttaaaatggggtcctatcagaaactagagagccaaggacagcctcctgaacaaagcaggtaaatactttacctggttttgtgtgtggtcacacagtgcaaagacaacgggccgagagctctgagacccagtggggatgtgcttttcctgactgacaggacagttgggtgagtggtggcactgtttcaatggtatcttcatctgcttgttgtcagcctataaatgtcaatgaagtgaaagtgtaggctaagtgacaattaagaatggagttagggctgggcatggtagctcatgactataatcccaacattttgggaggctgaggcaggaggatcgcttcagcccaggaattcaagactggcttgggcaatatagtgagaccctgtctccatgaaaaataaaaaaaaattagctgggcatggtggtacatgcctatacttccagctacttgagaggctaaggtgggaggatcacttgagcctgggaggtcaaggctgaggtgagctgtgatggcaccactgcactccagcctgggagacagtgagaccgtctcacaaaaaaaaaaaaaaaagctagatggcttatggagaaaacaagcaaacaagaatgggtctcttccaatctaattgtcacttttgttgctgtatttctttcttgaactttctattttgttaaaataagtactatttacatacacatctgtactctgttaaagtcagtgccagacattggccgtcaccaccatttctcctacagctaaggttctgcaacccaaaggtgccatagaaaatcaggtaagatacttagaaatgtgtaggggagggccaggtgtggtggctcacgcctgtaatctcagcactttgcgaggccgaggcgggcggatcatgaggtcaggagttcaagaccagcctggccaacatgatgaaacccgatctctactaaaaatacaaaaaaattagccaggtgtggtggcacgcgcctgtagtcccagctagtcaggaggctgaggcaggataattgcttaaactgggaggcagaggttgcagtgagccaagaccacgccattgcacttgagcctggtcaacagactgagactccgtctcaaaaaaaaaaaaaaaaatgtgtaggggaggaaaaatattttttttaatctacccattctaagttcatggctgaggccctataacagaagacagattaatgagagaaaagtgtacaaattttttaaagttttatgtgacacatgaaccttcataagaaaatgaagacccgaagaaacagttaaagctgagaagctgagggttttttattgtaggtttggtgaagagtggagattgtgaatcccgaaaatctgagacacgtctcagttaatttagaaagcttattttgccaaggttgaggacgtgcacccataatatggcctcaggagatcctgatgacaagtgcctaaggtggtcagagcacagcttggttttatacattttagagagacattagacatcaatcagtatgtgttaagatgtacattggttcagtccggaaaggtgggacaactcgaggcaaaggcgtgtgaacccagataatttgaggtaggtcccagttaatttagaaagtttattttgccagggtagaggatgtgcccatgacacagcctcaggaagtcctgacgacatgtgcccaaggtggtaggggcacagtttagttttatacattttagggagacatgagacatgagacatcaatatatgtaagaagtacattggtttggtctggaaaggcgggacagcttgaagcaaaggcaggaagactcaaagcagggactgggcttccaggtcacagataggtgagagatggaaagttgcattcttttgagtttctgcttagcctttccaaaggaggcaatcagatagcatctatctcagtgagcagaggggtgactgtgaatagaatgagaggatggttggccctaagcagttctcagcttgacttttccctttagcttagtgatttgggggccccaagatttattttcctttcacaggtgggacaactcaaagtgcggagggggtttccaggtcataggtagataagagacaaatggttgcattcttttgagtttctgattagcctctccaaatgaggcagtcagatatacacttatctcagtgagcagagaggtgactttgaatagaatgggaggcaggttggccctaagcagttcccagcttgacttttccctttagcttagtgatgttggggccccaagatttattttccattcatattttcccccttttctttttaaaaatcttttggagaaagcattttaggagaaaatgagtctctggtctc

SEQ ID NO: 93378 - DNA, 38839 bp, Homo sapiens
agcgcggggacccgttggtccctcggtccccagcacccacctgcactcatctcagcagccgctcggagtcggggcggcccggcgctgcgacagccagaccctcgggcccgcaggtgccgcgcccgcgctatcctccgcccgcccgccggctccgcgcccgctccttgcgcacacgccaggcagcgccgccgcagccccacggcgcgcaggccacgcccgtgccacgcccactctcacgcccctcctggcggccccgccccgcgcccccgctgccgcccgggagcaccctgggaagtgtaggcacctcgacgccaccgctccgcctggctccccagctgcggggcgatcggactacaagtcccagcacgcttcgcggccagcgcaggcgcagacgggcgacggcggctgaggcctttcgcaatcgttcttagatctctgcagagctgtcgccacggcctgaggggcgacgtggggactgccgctcacggaatccgggagtcgctaggagagcggcgcagggaaaagcgagcttggtgcagctcttcttgagtagtcgagctacaaggcgcctgaagaccttctgggccaactcttctttaccagtttacagagagggaaactgaggcgggggcggtgctcgggcaggattagcccgcatccgtcggcgaggcttgcactggtggggattcgtgcgcaggtttcctgcctccgggcttgggctgtccgcgcctcgccacccaccccaggctcccgtcgctcctcgccggctggcgcccagctggggggtgcaccgggagaggtggcgcggctcacttcggcgcagtccccggccccagcctccacggtgaccggctaccctgtgacatcaggcgcccagcacagggcctggacgcgggtgcaggagagggagtcagggaacggggaggagcaggggtccccactgtgtgcctggtgcgacaaaaggcgagctgcagagaggtcgggaggagccggcaaacacaaggatgcccaccaggcgcggagggcctgggctggaggagcatttaggatgcagaatcgcgggaacctggcatggagagagaggccaaggacttttggcttgggccagggctgtttggagatgctttcaacaagtggaagaagattgggcacagaaaatgtagactgaatggaacactgaggcaggagcaggtactcctccccctccctcagcagcagccatctcccccaagaggggccaggatgggaggccaggagtacagtggctcagtgggggagctgaagtcctggggaaccagccaagccccacacaccctagaaatccaggaggcccagctaggtgattctgcccgcagccgcagggttcccatgccagtccactgggatcttgtgccatgtaattgagggggcgccagatctaaggatcagtgaactaatgtgtgccatgacccagtgtgagttgagatcaataaatgtctttgctttgctattattattctctgtggctaacatagggcctggcacagagcaggcagtctgcaaatatctgttgaataaacggagagaaggatagaggggaggggagagtgctggcacctggcactcctggatcatagcctgagaggtaggccaggcacccacctgccgtaggtacaccctgctgccacttgccctctaaggagctctcggtcaggctcccccgcagcctctgtttcctccctctgtttccaaaggctcctgagaacctcccaggggtgccatgatttcccccacacagcctggtgaggacggcagggagccctcacacctctctgccaagaccctgtgagccagagggtggatgtgggtgccccattccagactggttccagagcccaggacaaggggctggggagccttaacagttctcaacctggaagggcctcggggccatgtggttccaacatcttctttcacaagggcagaaaccaaggcccaaagacatactgcctcaagtcacccagcaagttagtgacagggtggggcttgagccaggtcttttctttccttcctgctccgtgtctgctgaactgggacttcagcgaatctgctggttgaattgaatcgattgaaacagacttggttctctgtccatggtactacaggccaggtgtgacctcaggcaacttgcttgccctctgtgtgcctcagtttctatatccttcaactcacagtgcatacataccccttaggattctcaaacaccttcagtgtgctgggctttctagtcctagtgaagaagatagacaagaaatcatttcacatgccacaagattcattctagaaaaatgctgcccctcttattttttagcaggcctggtggggtgtcagggggtcttcaaggggctcatggacacagggaggccccaaatatgtcaaaccaaggtcctttaaaggtttattaaaaggggaccgggcgcggtggctcgcgcctgtaatcccagcactttgtgaggccaaggtgggaggattgcttgtgctcaggaatttgagaccagcctgagcaacatggcaaaaccctgtttctataaaaaatacaaaaattagctgggtatagtggtgtgtgcctgtggtcccagctactctggaggctgagctgggatgattgattgaacctgggaggcggaggttgcaatgagccatgatcggaccactgtactccagcctgggtgacagaccctatctcatgaaaaaaaaaaatcattaaacgtgcatttagaggagggccttggtgggtaccttggagggtaccaacatggaagcaggagcccctgccctcctcctccagcctcagctcacatgcccttcaccacacagggaagccctgcagtgacccatgcctccttccagcaggcagcgggtagagacctgaactccgggggctcccttctacctccagtgcttatccaggttccctgggggctcccatcccatttcagtggggatcctatcaagcccctgataggcgggtgccccaggcagtgaccttgaaggccccaggccccatttgcccatttccacacccacacttggagcacggcccttggctgcaccgctcctgcctgagaatctgcctgcttcactggactgtggacttctctgctctgcagagaggagtcttatacaggggaagaaacttggcccaggcttctcaktccgggaagcactagggggaaagctagagttttccaaggcaccagcgtaaagggcaggatttccttcacccctcctggtgcccctggctggaggcttcaggaggcacccctggcctggcctccctgggacgcgctttcaggcactctgctttcttttgagattaggagacacttagaggtgatgtgtccacctttcccctgctctatgatggggtgctctgggcttcggggaggacagcagtgttatgggggtctgccaggtgccggcccagggccagcaggaaggtgacaggcccacaggaggccagaagacaatggtcagaacccccagtaggaccctgggggaaacaagagcacccccctccttctgagtgtcctaaccactattatgggatgttggttgttccagcgatggagggagcagaatgcagagagggcagccccaggtccgtggcctatcacaccccaggtcaaaccatccgaagccaaatgctgcttccctggggctccaggtttacatgtggggtcccggacccgctgatagaggcagccataaaaaaacaaaaaggcagccaggtgcggtggctcattcctgtaatcccagcactttgggaggccgaggctggcagatcacgaggtcaggagttcgagaccagcctggccaacatggagaaaccccatctctactaaaaacacaaaaattagccgggcgtggtggtgcacgcctggaatctcagctactggggaggctgaggctggagaattgcttgaacctgggaggcagaggttgcagtgagccgagatcgtgccattgcactccagcctgggtgacagagcgagactctgtccaaaaaaaaaaaaaaaaaaaaaagaaataacaaaaaggcaattcaacacaaacacgcactttcacaaatgtctattgaaaacaaagccaggtgctcgagtgaagagctgcgccatggcgtgtctggggaatacttttcctgcatggctgagctgggtgaggcttcctaaaatgtgagtcctgtgaccgcaggtggagacttgttctcttcatgataaatgcccccaccacaagcacaggcacctgtcactgctctatgacctttaaattgcttcaaaattaggatcatttgtcctgaaaaagctattgccctttcagagagtgtgaagctctcagaaagtgtagaaggacacatgctgggtggggttgggggctgaggcagaccccacagtgccggcctcgcatggactgggacaggtggggctgtgggtttcttcaggctgggccaggaggggccaggagggagaggggccagcaccccatgggctggcagctgctttagggggcaggggagccttgatggaggggtcctgtctaagtcccagtgggagcaactccgggctggctcagaggtggagggatgtgtgacactgcacccgagagctcccaggggccaggccagatgagtcaaacagtgacagccaggactgctgtgtccttagggctctgcgccaaggctcagaggaccctatcattgtcatcgtatcatcatcatcccgatgtcacagatggggaaactgagggattcacttacccaattgaaaactacgaccaagtggagcaggtaggacgcacacccaggccctgctgaagagagagcccgtgggcttggcttcagccccatggccctccggaatctgtcatcccctccagggggcattcaagaagtcaagggatgaagctgggagttgtggggtccagtgtgaggtgcatggccaggggacctgctccacttggcccaagcaatgccaggcctgctgcccccaccctgggctgctgggagtgccgcatcttctcccggacagctcatgctcaccctctgaaccttgttttgagatcctctccttggataagcctccctggccctctagtgaagttgggggccacctccactcccccagggggtctccagcacagaggagagtgcccactgaactgtgggatcagcaggtacccgcactgcggctgccactctcactcagcaatggaaagaggtcagacccgcctgagcccctttcccaccgtcctgacctctccctgggtctgctggggtttcccacaaattgcttctatggagagcagcaccgtgtggctgcgctcacctggggcctgagctagaaagaaggtgcctgctctggaaacccagcggtacggaaacgttgcaagtcagagacgcagggcagcagacagagcagacggcgtcctgagcccatcaggggctctgctcagtaagggagcctccaggctttctctcaccaaagcggcaggattccttgtcctttcttcatctctaaatacagtccaggaattgattgacttcacagccaaatggagaaacaaatgaaatatgatttcattgtgggatctttccagccgctcaataatttaaaaccacgccatacgaaaccaggagtaaaaatagcatgtgactcatggcttggagcctatctctcaagcacgggtccacacacctggattctcgctaagtcaggcccagcctcaccctcgcatgcccatggcttgcctgatgcctccgggtgggtcaggaggggaagcgcagccctgggttacacaggtatctgttctccctaacaccggatctatgccacagttccagctgcccagttaactctgagtggtttgtagacttggcaatgctttgccatcacagaaaactcacaaaagatggttcattacaagtgatggaaggaagtagaatgtataggcctgatttgggaatatgacccacaccgtgcaaggcttggatgtggctggtcttctgaaagcacttcctcccattaaacttcattcctgttcagcagaaacagacgaggaccgtcaggaacacctgggaaggaacgagaatggaagagcagagcaaggggcaaggtctgagatgaggtgccgcctctattcagcacctactgcatgtcagcctctgtgctggaagtgagatgaagaagctcagctagagcaggcaggtgcatgagtcagccgcgctgcggaacagaggaccgcaggctttgctgaaggggcttgtaaaagggtagggcatctctcccagtgccggaggccgatctcttcattctgcctctgctgtcacacagcattcttctgtgaatgttccccttctgttctcataaggacactggtcctaggatggagggcccaccttaatccaatactgtctgacttcatcttaaccagtcatgtctttgaagacctgatttccaaataagatcatattcctgggggctaaatcttggggttaggacttcaacatatctttctggaaggtacagtgcaccccaccagaggggaccaccattattggaccccacaaggggcatggtcttccagatctgtggtctgtgggacctgggaggaaaactgcaggtctgagggctcccagttggggagaagaaatggaagcccagagagacaaagtcacatgcagccaggtccccaggaggccagaagccacagtgctctcccagccacctgacccttggttgacaaccacacaggcatacagccctgcagggaacccagaaggcagccatccctgacagtgagagcagctcttgtcctgggaaggcagatgggtcctgccagaagcctgggcctggccttgttggcctcaccggcaagctcaagcttgccccccagctgctgatcaagcaagacatcgtgtcccttcttagcaactttgtcaccaggctgtgcttcccagagctgctgtgtgggcatggaagggataaggtttcgaagaagcttaatcaggagcccttgcctgcataacttacaaagtgcttgttctgtgggcctcccaatcgggtgttcccttgaggtcatggtgctgagtgttactcagtctgacagacgagacactgtaggctcaccaaggctaagaaatgtgcagtcagctgggaggggctggacccggctccctgagatgaccagagcagagcagtctccactagaatttcttctttggctatggccaagctgcttggagcaggaattgcatggtttgatgataacactagtggtttgataataataaaatgactttaagtaaaggagatcaccctcatccaatctgttgaaggcattaagagcaaaaacagtttccagtggagaagatctgcctcaagactatagcaccgactcctgcctgagttgcctgcctgccctgcagattttgaacttgtcagcccccacaataccatgagaacattccttaaaatagaaccctgtttatctatcagttgccctttgtacctgtctgcttacctacctacacactcattcattcatccgttcatccatccactcccatccatccatccacccaccatccatccatctaccacccttcacccatacattcatatatctacccatctatctacccacccatccacccatccatctatccattcatccagtcacccaaccatccatccacccatccatccaccacccatccacctatccatccatttacctatctgttcatgcactcacccatccagccatccatcacccaaccatccatccatccattcacccaccatccaccacccatccacccatccgtccatttacccatccattcatccactcacccgtacagccatccatccaccactcatccacccatgtatccattcagccatctatctatcacccattcacccatccatgcatccatctatctacctacccatccaccactcatccacccatccattcaccacccatccacccattcatccgtcagtctgtccatccacccatccatctaccacccatccacccatccatccgtctacctatctgttcatccactcacacatacggccatccatctcccacccattcacccatctatccaccactgatccactcatccctccatccatctgtccatccacctatacatccaccactcgtccacccgtttatccaccactcatctacccatccatctacccatccatccacctaccatccatccatccacccacccattcaccatccattcacctatccatccttccaccacccatccacccatccatccatctgccacccatccaccatccacccaccatccatctgtttctatcagtactatttctctggagaagccagactgatatactttccaaatctataattccctgggctccctggcaccatgacttgaaggcccctggctgagctcagcctgtcctaagctcctcccagctccagaaacggcacctgctgccaccctattgctctccctgactcctgagaacccctctgggagacttctcttcctgctccatcacattagtccaaccccaggtcctgcctccaagtccttccacagcgtagttagacacaagtgcaggcaccttctcctgctctctttgctcctactccccccacccccattccttctcctgcagccagagggatttgctaaatgaaagctaattccactccatcacacccctgcctgccaggggcctccctctcctcctctgcctggccaaattctcttcactctttaaggatcagcccaggcatcgtctcctcctagaagtcctccctggcccctggctaaattgtgcaaacccccggtttccatgagtcctgggacttcctcttttacaggctggtcacttgggattgtcattgattgtttccttgtctgtgtccctaactaaacagtgagctttgagtactatgagcttctctgaggaaagctgagatttaaaagggccaaggtaatgggacaggtaaaggatgggtcgagaaaatccaggaaggcctgcgtgttttacttgactttttgattgcagtacctggaacattaaaaattgaatgcttttatcctatcttgttctaaagagtatatggggcttcttacaaaggaagccttactatagaaagatctttttaaaagctggtaagaaaactagagttaaggaaaactacatagattaggaggaagttggggctgaggtcaagccctggaatctctgccgtgggtggtgacacagcccagggcagcccctccttcctctctgtactgcccagcagccccagcagagagaggaacagggtcagttacataattctctgtgtccacaggattagaagaattgctgagaagaagcatgcttcccaactctgagacttgaagaacctgcctctctaggtcctgtggggtgaggccagtctggcttcccccacagcccacagccaacacagcgtgcatctcagagcactccttctcctaaccatcccttccttcctgtccctttttgtcactggatgcagagaccaggggacttactgtgcatacagtaggtgatgagcaaccatctaaaaggaacctagttgtataatgaagtggtatttttaacataaaagttacctataatttcatggagaaaatatgtgatcatctacatttctcaggatgccaaggcaaatgagctttttttttttgattttgctgccccctgatggcagagtaccctaattgcaggcatactatcaaggatcagaagtcccctccatcccaccagtgacacccagactgtgaaaagtgggcagacactgccctcatcaaagatcacccaaacatctgccttcggccaacacaaagagacagacgggaaggggtagtttcatgtaagatctttaaccaccctcccttcctgatttctgaggtcttgggtccagaggctgtgcaggcttataactgtgatcgcattaagcatatgagtgtggagaaggtgaggcagccagtcagacacgctgtagtctctgtttttgggtgggttgtttacttcactcccatttcccctgctccctgctttcttgtagcaccgcagttttttgtgcaggagccacaacacctacccatgcagtccatggacttctcagtaagtgagagtaagtgagctggactccacatccagctcagaaggttttaatgagtctaaggatgaccccatctctggagacagacaggctacattagtcaacatccctggacacaaagatttgctccaggaaaggcatatgacccaattcggctcaatggggtgtggtaggtggcttgctaagaaaggctggaaagggcatctcctgaccttcaggagagagtttggaagctgccctctctcctgctctgcatattgcagtgtgggatgtatgccagggacagcttgggcaattttgtctccatgtgggaagtgagcctgagagtgaacccaattgtaaagaagtggtctcagagcccctggatcaagccagtcctgaggcccacctacctatggacttcccagtccatgagccaaggaagactttttcatttgagccacgtggacttgagtactttattatttataacactccacgaagccccaagtcatcagtgtttgtgatgtcactgaaatgaatgccagtgggcttaagtgtccttggcatggtctccctcaaaataccatggcatttggtttgcttttggtttagaacactgcagggggccctcacccctcacctgctccctggtctggcggtttgtgctcgggggattcctgagagcctctggcttccctgacccctcttcagaggtggaaggaaagatgacacctctcaactctacttcaggcaagactcaggaagaaaggtatctccgccttgtgtgagggagcctccttagcatccgcctcgctgaaagatggaggagaaatatgtccagtacygaatgttcccaaggccccccattcctcacacaatgcaggctggcaaaaagtcttgcaggccatgatcaggacttatttactaatgaaaattgatagtattgtctatgcagcctcctggggagggggctcataccaaatgtcccattttgcagcaaagatagtgagataatgagctcctgaccatggggctcacttgtccttccacacaccccatctcaggacagctgccgggtgctagaatgacccacccaaggctcagccttctgagctgtgtgctgagggctgggtcctatttcccaggactcagcacgtgcaccaagccaacaggcagtgcacagggcctggaagcaaagggcagaagctctgtcctttgcagggacctccttgtaagctttgtgcttcagtcttgagctctgttgcatcagaggtctgggttcagggtaggagggtggcgatgtttctgccaagggaaggaataaagtctctgttgaatctgttgaacccgttgaacctgaaactgactattaatggactactcatcccaatggatgggaacgcaatgaagagttcttctactgggagggagggggcagaagactgcaaatgacccttattaccacgagagctgggggtgcgccttcaccatgagagcctcagcccggaagcttcactggggcatttctaggttcttccatgcccagcgataatggtaaataggcaattgcaacactactgaccggcagacacaaaggactcagggctcggataccttagagctgagggtgtgggtcaccaagcctgactgacaggctgtccagggtgcacggcgggagtggctggtggaggagatggtggcgtccaccatagccccgggatcacccgcagccacggggccgggacttgtctggctaaccctcctggaggagtctgcagagatggtgggcagctggtggccccatggtgggctggcctttctgaggcagtagtgggggagccacatgggggtggactgtgggggcacctgaggggcggccttcccatagccctggccaggtaggggaaaacagtggggcagaattagaatgtgactgcactgctgccttggccacttgcagacgtctctctctgattctgcccctggcttcactgacatctgacatgggatggtcttggggcttcctggcatgccagcccagtcttgagagggaactggcagccacaggcacagtgacccatggggcatgggagcctatgaatgcacggccccctcttccaagctgcaagtggacaatttttttttttttttgagacagcatctcactctgtcgctcaggctggagtgcagtggcgagatctcaactcaccacaacctccgcctcccaggttaaagcgattctcctgcctcagcctcccaaatagctgggactacaggcacccaccaccacgcccagctaatttttatatttttagtagagactgggttttgccatgttggccaggctgatctcgaactcctgatgtcaggtgatccacccacctcggcctcccaaaatgctgggattacaggcgtgagccaccacgcccggcctgcaagtggacaaatctaagccatgttctgcttggttcctctgacgatcccagccatccagccccaggtgcccgcaggggagaagtccatggacaatgcccccgtatgggccgcctccctcctggctccctctccccagccccactcctgttgccctgggccctttagaaattaacttcctcttctggaactgggtctccagctctgctttccagagaggggtgtgggtgggggaaccagcttgaggcagggaaggagcagggagcaggaacccaggctggcgggcaggtacccaggagcctcgaatgccaggcgcagacactgggctccttgggctctcagcaaatgaaagtggctaagtctttgtgcctgaggtgtctgaataacagcaattgcagacttgacccaggagagagagggagagaccgacagagaccacaggcacccacacatacacaaccggagagagagagggagggaaggagagagacccagagaggaagaaacagggagacgccgggaaatgacaggggaagagactggggtggaagggagggaaaacagagttgctggatgtggaagatcagccctgccacccctccagcctgggattctgtctcataggaccttctgttcacagttctcccaggaacatttgggaccggacccttctggataccaggggcgggatggtggcttcattctgaggatggatgcctgagggcattgggactccgtgttctcagggagtccttgaagagaaaggctgaagggaaggaaaaaatcaagagatgtttcgctcacattagcctcctgccctgaggattctgagctcatcccagctgctgtgagggagccgtgggayggcatgcaggggttcttgctgatgctgagttatctgacctactctccaaatagccaactatctgctttcttgcacagaaggaaagggaagtgggaggagagaagacgcagacaccagtgggctctgaactttcgtcagggagaggtccccatgtaggtttctgagcagaaacgcccaggacccgcaggaccagcgtcgccattgtcccactgccactccctctccggcctcactcttctcgtctttgcagtgggcatgttcacacgcaacccgcaggctggcggtgacggtttcgtggggcgatgtgcatgagcaggtgctcatgaagccggccccgcccacacatgcagatggcgcgaagaggggctcccccagctctctgactctgacagctcagtttcctgggagtcctgcacctccctgctcccctgatgtgttaactgtcctccagtgctgggaggccacgcaggcaggcagctgagaactcccagctcacccccaagctaagtatgcttcaaggtctgaccctaatgagggtcccaagcagtgtacccacggggcactcctgacctcgccacagaggaatcaaagctgaacagacacgagaaccccagtgcacacaaaccagatggcacaaggaccagacgtctgagccgtttagccagctccgccgcccgctgggaaagacactgaattcacagagacctgtttttaggccgggcgcggtggttcacacctgtaatcccggcactttgggaggctgaggtggggggatcacgaggtcaggagatcaagaccatcctggctaacacggtgaaacgcagtctctattaaaaatacaaaaaaattagccagtcgtggtggcgggcgcctgtagtcccagctactcgggaggctgaggcaggaggatggcgtgaacctgggaggcagagcttgcagtgagccgagatcgcaccactgcactccagcctgggtgacagcaagactctgtctcaaaaaaaaaaaaaggccggcgcggtggctcaggctggtggatcacaaggtcaggagatcgagaccatcctggctaatgtgctgaaaccctgtctctactaaaaacacaaaaaaattagccaggcgtggtggcgggcgcctgtagtcccagctacctgggaggctgcagcaagagaatagcgtgaacctgggaggtggagcttgcagtgagctgagagcatgccactgcactccagcctgggcaactgagcaagactccatctcaaaaaaaaaaaaaaaaaaaagacctgtttttaagaagtgatgaaattaccttttatttttgcaggggtgggtgagtaaatgaatggatgcacaggataaaactcagaatggtgagaacccaaacaaggtaactgttactgtatataaaagtttaaaaaataatagtactgaaacaacaccaccactagataagcaccctcctatgctgggcacacagcattcccttatgctacctagaagccctcactgagcctgcaccaccatcgcccttgcacagatgaggaaaccgaggctgactcagcagaggggagttcccagggtcatggaaccggaggtggcagtgccaggactgaagaccaggcccgcagtgcactgtgaagtcacacagtaggttgaagttgttctgccagggtgagtctggattctggaatgttcgtccactacaccagggtcagtgcctgcccacttgtgcccttcctcctgggaaatcactccccatagcttattaacccccagggggaactgaaggtacctgctgctgcccatggccaaggtggccacacctgcccctcggggctggaggccaggagcagaggcgccagccagcctggcagaagggactctgggggcagggccagaggcgatgaagagtggccatcacagcccaaggcttagccatgccctgcctcccctctctcccgcctttctcagggtctctggggccccctcctggctgtggcctcccccgggctgggtttcctggtggccctctggagtgcaagagacctggactgggccgactggaccgtcccacaccctgaccaactgtgagacccaggtgtttcctgagccctcgctgctcctcctccataaaagggagctggcactggccttgcagggctagcgaggggcagaatggcataggagaagggacttcagggagatgtgcaataagcatcttcaggccaggagctggaggttttagatcgatcgatggattgatttggtaaagtctggaacttgggtgaaaaggcagactaggctgcattcactcaatggcttcttgctgccaattaaaactgtaagtgtgcagggtgactgtcgttcctacagttacgtgtgtggcatctccagtaaagatgaacctgactaggaatcacttatttttctggctaggcttatgcctcgcatgtgtcacaacgttaacagagttatttgtatatttggcccaccagttaaagaacctcctacagatgttactcccactttcttgacaacaggggtgctcagtactttacgccaagctgattttgaggcccataacattctcagggagtctgggtatgctgggaaaatcagccagatgccggtgattttgacaccattacattttgatagggacccacttcaaaagcagccttcatgccagagatctgtggttattcgaacctttattactagtgactccctgactggtatacctgcaacacctggcaatgagatccctgtagaggtggtattaaagatggtcmctgagattaagaagattcctggtatttctcgaattatgtatgacttaacatcaaagcccccaggaactactgagtgggagtaataaacttcttgttctattaaaaaaaaaaaaaaaaacagaaagaaaagaaaaggcagactaggaaaactgaggactccaggagtcagaggtgggcaggagaggagacagcggcacagggccaccacaagtttgtgtcatccggtccaccctgacccacttcacagctggggacacccaggctcagagaggttgagtgctctgcccaaggtcacacagccagcttttggtagagccaggaacaccaaggtgaagtacattctaatcccagtgtctttagtgaattggacggaccaagggggactgccagagcattttatcagatcactgtcatccttgtcttttcagaaagtcaggctctgtttattatttgctctctcaaggtacaaacagacctgggaccttcctgtgttttcttatccagaagagacactgcctttccgggggccataggggaagggagtggacgctaatgcaccgacagctacacgacaaaggcctgacgccagagcaaccctcaagtgactgagtgtccttggcrcttcacctgcgtgatctcctcccaacagagccggaggctgctacctgcatttcacaggtgagaaaaccaaggcacacgaggccatgccctccccagtagccagcaaatggcagagtagaagcacagaccgtaagtctgcttggcacacagcacagtcacagctggaatcatgaacctcaccttgccttccttcgtttaatcacaaacggtgcttccgtgtgggctggggaggaagagaggttgaatcctgtatttttagtggcttaaaacagcatttatttttgcagtttctgtgggtcaggaatcaggtgcctctggctgaaggccactcatgaggttgcagtcagcgctggcagggtctgtggtctcatctgaaagttcactgggggaggatccacctctgaacctgctcatgcatgagcctcatttgtgagatgarcaaactgagtcttagagaggttaagggtctcactccagaaaatacagctggaaggatcagggccaggtgaattcatcagcctgtgcggagacgggctccaggtggatgcagctcctggggcttcccagggcatggaacccactgtcttctgtctttgctggcagctgccaccgtgggcacccacagcacactcctcagacatccatccacaaatcccagccaggccaggccyttctgtaatcccgtcctgacttcatagatgtctccgaggctcaggtggggcagctgcccagggtcacacactgggggtttggtggaggtgggatgcaaaccaggtcttctggccgaaagcccctgttcttgctccatcaaacagcttcctgtgtccagtggcagagacacctgagccccagtgcagggcctcaccttgatacaatcaactcgtgacctggtcatcacaagcatggtgccacrggcatggccgaagacacccccagggaggcaagtatgatggtggagtccaggctgaggggccagagtgcctgggccgtccccacgttcatcccactccccagcaggagatgttgggagctccccacccctgcatcatctctcagctcgtcactctaaagagtgaagccagaagctcccacctcacaggctacactggtgatcagatggggcagcccagtggagcggtagctgagtcagcacatgcaggatacatgcacgggacactgtccctccactgcagagatccatgcacgttctctgccgttcagtgcagtactactgtatgcctaagggctggggatctcacaactggagagagccagatgaagcccagcccaccacttcctgggcaagccatgcccctctcccatccatggaaggggttggtttaggaacgtgcactcagggtgctcccactgaggggaagcacaggagggtctcagcctagcgcctgtccaagaccagagctcaatcctgggtgctgctgttgttcttctgattttccgctagaggacagcggcgggtcagggccgtcctctccaggctgacactaactgggcctgtaaatgtcaggggagctgtagaggttggtgctctgtctacacacgaggagggacttgctcaaagctaccagggagagctgcccccggctcccaggacccatcacacgcttgttcacaatgggcacttgtggagagacacaccacagacaggtattgcaaacttgtcgggggagcctaaaggactgcaaacttgtgggaggagtcggggcccccgtgtcaggggctgctgaagacygaggccctaggagccccctgtgcaaggtgtgctgtccttgggctgggccrgggactctgggcccctgaagagggacacctcttttgtctataaactttctcagaaacaccatcctccatacacttgcaccaacaaatggcttttattatcacactaatgacatttcttctgattgcaaaaataatcatcttctgattttaaaagtaatgcacatgaaaaatacagaaagaggataatgaacatttattcactccaacctgtcactctgatgaccacagcaaatgtttccacattcttctgtccaacttttttcttcttaagagcatttttagaagcacgatgttttgagatctcgcctgcctgggggaatacattgagactgtctcccacgcagtcactgttctactggaacattgccagtcactctcagtggctcctgactccctgctgggctgggcagacccctggtgtcagggaccaagctggctttggggagggtgggtcccggggaggggtgaggtccagctcctgttgccaggtcagaagggcgcagttcaggtcctgtgtggcctcagtgttacccaccccactggcctcagccgttcatttgtgaagctgggattcccccactcagggggtccaactgtccctgctctgccagagcacccacctttcctttgcctctctctgtgtcttgctctggcctcagggtatactgcttatcccagagagaaacaacggaaccagccactggctgctgcggggcctctgcttctgctgcttggggtctgggwccagcagtgtccatcgttatgtgggatcttccagcctatcgtgggcggcctccacgcagggggccatgcctgcccttcaaggccacctttcacccttcactccctcactcgccctgcgaacccctcctagctgtgggagactcgcctcacggggaccctgtcaaatctccatcccttttagggtagcagggtggcctggccggcacttttaggatcaagactgaccaaaagaaggtgaattggctttatttatttctagaaaagtcttatagagtaagacaatacataggtaagtcgtgtttctctctctctctctttttttttttgtttgtttgttttagacagagtatcactctgtcgcccaggctggagtgcagtggtgcaatctcagctcactgcaacctccgcctcccgggttcaagcgattctcctgcctcagcctcccaagtagctgggactacaggtgcataccaccacacccagctaatttttgtatttttagtagagacggggtttcaccatgttggccaggattgtctggatctcttgaccttatgatctgtccatcttggcctcccaaagtgctgggattacaggcgtgagccaccgcgtccagccatgtgttcttaaatgaattctggctccatagtgccagttcccaaggcacaaggaattatgcatatttttgtttgtttgtttgttttagagacagggtcccactctgttgcccaggctggagtgcagtggcaccatcatagcccactgcagcctctacctcctggacttaagggagcctcccacctcagtctcccaactagctgggactgcaggtgtgtgccaccatgcccggctaatttttcgtagagacaagstctcactacattgctcaggctggtctcaaactcttgggctcaagcaatcctcttccctcagcctcccaaagtgctgggattacaggcgtgagccaccgtgcctggcctcacacacatcttgtacacatcagtgaagccccttctcatgtgaattctgagtccaccatcttagaataaaaggaggcggcagggaggctgccacagtgtggacgctcctgtcgttagggagttcttgacaatgagaagggagcagaggtgtcttgctccagctctcacacaatcccggcctccctcagcctgccggagctgtgggggtgtcggtggagaaggaaaatgcctccccacagtctggcaggtggggaggtgcctgctcggtaactcagccccatgccctcgctggaaggtgcacagagcrtgcccagctaagcccttccagatgcagatggggagactgaggctgggattttaaatgcagcctcttgacacagctcagccccgggaggggacctgacgggctggggagagcagaggtcagaacctctagcacagaagagctccaagtctctgcaactttagccatgggaggtgcctgggtgcagacccagcttggggcttccagagtaagaatgtgtccaagctgctgggctgcgcagacccggtctctgcccttggaaatggggaaggctgcacagacctcactaaggggtggggggcgggggtgacacccaagtcagaggcacaaagagaagcacccagagaagcccctggtccccgccaggctcctgacctgcagagggtccatggtagagagtggcctgggactaatctcttctcagccccagggcctggcctccctggtctagtggccagggcacacacctgtggccaccaggagcttgcggccctccaggaattccagggctctggccaggttcctgaggatggagccgctggaggctcagtcacagctcagctccggcagggtgtcagtcagcagggacctccgtgtggctgtggggtcagagagctcaccccatgaacagcggactcttagcgcctgctgtgggcaggctgaaagtgtcgccccatgtggccaggcttcctgggttttcaagaacagcaggatgtctggctttcgggggaatctccaccagctttattgctggaaacacactgggaagtctttaaatctcaccccagcgcactgagggccactgacaagggtgatgctcgggcaatgtgagctcccaaggtggggcctgtccgaaatccctggtcctggagcagtgcccagtgaatgtgggggaaggaagcctctagtgggagggacagggcagagacccagtgactattgttaccagattgcaacgagcagggcattatagaggtaaatttggtgttttcctaattaaaagcaaagaaaaatgtcaaacaattcacacctcattcattcattcacatagataacaagaaatgcttgggaagttcctgcccagccccgaggaccagctcaggccccaagtccagcactttccccgtccccactgagtcacagcgtaagtcacctgacagggctgggtcaggatcacctgggtgcccgataaaaatacacatcaggggtgtgtgtgtgtgtgcatgaatgtacatatgtctctgtgtgtgtgagagtgtatatatgtgtacatatgtgagtgcacctgtgtatatgtgcatgtgtgtatgtatgtgcacacatgtgtatgtgcatatgtgtatatatgtgtatctgtgtgcatgtatgtgtatgcatgtgtgcatgtgtgtgtacatgcatctgtgtgcatgtgtgtgtatatatgtgaatgcacccgcatgtatgtgtatgtgtgtaggtatgtgcacatgtgtgtatgtgtatatgtgtgtgcatgcatgtatgtgtatgtatatgtgcacatgtatctgtgtgtccatgtgtctgtgtgcacatgtgtatgtgtatatatgtgtgtgagtgcacttgtgtttatgtgtatgtgtgtgcttgtatgtgtatgcatgtgtgcatgtgtctctgtgtgtacatatgtctctgtgtgtatgtgtatacgtgtgtgtgtgagtgcacctgtgtgtatgtgtatatgggtatatgtatgtgcacacgtgtgtgtatgtgtgcatatgtgtgtgcgtgcatgtatgtgtatgcatgtgcgcacatgtgtgtctgtgtgtgtgtgtctctgtgtgtaggtcattgttttaagccctgaatgttgattaactcgtttattcctcataaatacccgatgaagtaggccaactacctattgttcttccagcacaaacaccaggaaagggaggcacagagaggttaagaaacttgccctgtgtcacacagccagtcacaaaggcggtgcccagctcctgggggttcagggtgcctgtgtctgtcaaggcccctggtgagcatctgaaggtaagagtgctgtttggaacagaggttcccagagtcacctgatgacaagcatcgcttaggagcttgttaaaaatccagatttctgggccccactctgggagatcctgatacagggggtcccgagtcaagaatctgaatctttaaggacatcccaggtgactctatcttgagcgagtttggggaccagtccctctgggcaccacatgagaggtcctgcccatctttgctggccttgcactgggccctatggcacaaaataggtgctcagtaaatgtttactggactcccagctagctgccgtgacggcccagctgcagaaaccggcttgggtgagactggtcaggttctcctcatcccagcagagcagggcctggaatctgttcctagggcccagcctctctcctctctgagcagggaacagggaggtggtctgaaacccccaaagccctgggcagactggaccggcccaggagcgcctcagccaagctccctgcggtggctcctccccaccctgcttgggaattctggcccaggagagctaacagttctgacagctgataaggaggaggaaggtcagggaggagaaagcccttcccagggtggggtggggcaggcaggccacagcagcacagccaatgacccaggccggccgcccaggtcatctgattggagcccagaggccaggctcactaaaaatgtgcaccttcttgcctggacagggtgctgggctgtgtggctgtcctgaggaactgtgatagcaacagctgtggccctgcagcaggtggtgggcccgggatccagcctcccctcttcccttccctggcagggtaagttccagagcattttgctgggtctgcgcttggaaagccctccctgccgaggctaaagccctcagccccatgctcagtgtcacctgtcgagacaggtgaggccggagagggttttcatggggagggtgcacccaaaactcgaaactcacctggccagaagcagcagggcgggtgctgcctcgaatggggtttcaggcgaagggccagcctggtgttcccatgtatgagaaatgggccaatagcctgatgggtggagctggatgctgtcagggtggcaggatgaggtgggagtgctgtctccccaggatcccgacgactgggcgggcagggtgcctggtggaaaggtgaggtgccaagaggctgtggccaggggttctgatcccagcttgccactgagtgattccaccctccgtgcctcagtttccccatctgtaagatgaggcattggtgttggtgcccagggcagtgtccgcatgtggccagcagccatagttgatggaaacagtgcaatgctggtgaccctggaggacgcaggagccctgggcgggcccagagtcagtcttcccctgcaccctgtgtctttcatgctgcccctgccctcctgctacaccagtgccaggggtctcagaggggttccagtggctctctgcatctccgaagcctcagtccccctcatggggccagggttcccacctgccactggggatgagaccgccttctctcagggctggacttgggagtgggttttgaaggaggcagggactggacgcagaggctgttggggcagtggggaggcgcaggggcctgacccagaggagggcagaggagaggctgccctgggggtgagggggatccatggcccctggcaaggggtggggcctctgtgagcctcagtttctcagcatgccatccgcctggcgaccttgcctccctctcccgctggggctatagaatggtctggagccctctgtggcagcagcagccccaggcgagttctgttcactacgaaggagcccgtcctcatcctccccctcgtttacagaggaaggccggcgctcaaggtggcaggactggctgaggaccacggcaggtcacgcctggggctaggatgcccttccaaagccctgcctcggtttcctggtgctgtgggaacaatgaccagaaaccggccctgccccacgcatctctgtgattaactcactccctgtacagtagagggaggcgtggcccagggaggctcccgggctggcctgaggcccatggcaagcagccccacccaagcaggcggctccaggcttggctgggatcccgcagtgacgcttgggtgtctttgggccttaaaagttcatcaaacttgttccaccctacagggactttttgtttgtttttcttttaatagactgaattctttggaatcctcttagatttacaaaacagtcaggaagacagttcagagagttctcgtaaaaccccacccagcggcctctatgattagcatctcaccttggtatggtacatttgtcataactaatgagccaataccaccaatgcctgattaccagctgcagcccacacctgactcagatttccttcgtctttacctaacgccttcgcctgccccgggatcccacccaggaccccactttgtatttagtcctcctatgcaagtccatggtggtgggcattcaccaccatgcccaactaatttttgtatttttagtagatacggggtttcaccatgttggccaggctggtctcgaactcctgacctcatgatccgcccacctcagcctcccaaagtgctgtattacaggcatgagccactgcgcctggccgtgtgtcttttcttttaggccctctcagctgacagagcatgaaggcatatatgtgtacaccaaccatgtatatatgcatgtctctaagtatgcctagatgcaatatctgtatctctattaggttaaatgtgagttcatactgacgtctccaactcaaatccattattactaagtggattccagctctgccccaccagcaatctgtaaccgcccactccaacattgagacacctggctttcaccattagccatccattgacttaacagttctgttccagtctacatgtacggaagtatcagaatggctgacccatacccctgtgggaggcaactttattcattaattttttgagacaggctgttgctctgtgccccggctggagtgcagtggtgtgagcatggctcactgcagcctcgacctccctggctcaaataatcctcctggcttagtctcctgagtagctgggactacaggcacatgccaccacacccagctaattttttattttttctagagacagggtctcatcatgttgctcaggctggtctcgaacccctgggctcacgtgatcctcccgcctcagcctcccaaagtactgggattacaggtatgagccactgtggccggctggaaagcaactttatcagccagagtggaatgcatctgtggggctccttttgccttcagtttcacagacttagtggaactttcttcctctcacttcagtgagattgtcgtatacatttgtgatacagttattaattsttttgtcaatctcaygagattgtcgtatacatttgtgatacagttaattsttttgtcaatctcatgagattgtcgtatacatttgtgatacagttaattgttttgtcacatttcacattcatcctgggagtcccctgtctgcctaggtttgttcttttttttttttttctttaaaatatgatttgcgtacatagggtgcggtggctcacacctgtaatcctagcactttgggaggctgaggcgggtggatcacttgaggtcaggagttcgacaccagtctgaccaacatgatcaaaccccatctctactaaaaatacaaaaattagccaggagtgtttgcgggtgcctgtagtcgcagctactcaggaggctgaagcaggagaatcacttgaacccgggatgcggaggttgtggggagccgagattgagcagttacactacagcctgggcaacaagagcgaaactccgtctcaaaaaaaacaaaaaaagcgcacacattaaggctccctgtgctgtaaagttcaatgtcttttgggaaatggagtcatgtatctgtcatcacagcatcatccagaatagtttcagcaccgagaactcccctgtggctcaccgactcagctccccactgttgccaatgcattcatcctcctgcggtttcttttcacaagtgcaaacagatgcgaacgcatcctaaccccactttcagacagaaaatggagcagacactctgaagcttgcttttttctgcttaatacgtctcagggatctttccttgttggcactcagagaaagccttgcttctgtatcacagctgctggctacctgttgtgtggctgcagtgtggtttatckgacacccaggttacctccaaggcattgctgttagaaataagctgtatggacaaccacgtaccctgctgtttcagaagtcgacagtcatctgcagggtgaactcccaggagtggggttgctgggcaaagggtcagcacagtcgtggttttatgagcgttggtcatttgccctcagatgggccccactggcaccatgctctctgcagcctgcccagggtctgctcctggatgcccagtgctgccactccaggaggtgccacagggtccccttggggtctttttgcactccctgacagggggacattgagcaacatttcctacattttacggtgataggcaggagctgtccgcgcgggcccctcgctgttttactgtggagttgtcgattttttcctctggtgcttgaagtggaggtcagcttctcaagcggggtttaattaacagcagctgctggcggaggggctggggccagcctgactccgaaccaagaccagcagcaaaatttgcttgttgcacattaaaagtaatgggagtgaggaacatcagacaaaccccagtgcaagcacaatcacaaagatacctgccagttctccccagaactgtcaaggtcaggaaaacagggacatctgaaaaaccttcccggccaaaaggcaccccaaaagacgaggtgatgaaaccagacgtggtgtcccccatgggcttctgcgtggagcagaagacggatgttaggggaaactaaggaagtcgagtcgagtgtgaattgtgagtaaaaatagcaggtccacgttggtttactgaatgtgacaggttacgcaggtgtgagatggtcatcacgggggaggctgatgggagtttatgccaatgccctgcactggcttcccaacttatctatctaaaactttaaaataaagtttaggttaaaaaaacacttttaaaaagccccttgaggctgggtgcggtggctcacgcctgtaatcccagcactttgggagatggaggtgggtagatcacttgaggtcaaaagttcaagaccagcccggccaacatggtgaaaccccatctctactaaaaatacaaaaattagctgggcgtggtggcgggcacctgtaatcccagctactcgggaggctgaggtgggagaatcgcttgaacccagaaggtggaggttgcagtgagccgagatcataccactgcactccagcctgggtgacagggcaagactacgtctcaaaaaaaaaaaaaaaaaaggacatgctcctgtaggcacattgctgtgcctttgcccattctgggactcctgcccgacttcccttgccctctctgacacctgccatccttcaaagccctgctcaaatgtcactgcctccaggaagccttccctgactgccaggcacagttaatatcctcactcgtaccctctgccacccaacgccactcctgttccacactatcagttggatttgtctgacgtgtttctcatattagacaggggatatgggtttgggggaggaagaccacgacagcaaagtgcactcctgctcccatcttagcaaggacacctgctatcaacaggctttgtcattgatgctgttgaccctggtcacctggctgaagggtgttggttgggtttccccatttccacactatcctctgtggaaggacgccaccatgcgcatcccacaataaaggagtgggggtcatgctccgcccaccagcctaagttagttggaattcttttgcccgggggggtctgtctgtctcttctcccccatttacccagctatcccatgacttatttgtactggtgtggactcatacatatttgttttcttttcttttctttttttttttttttggagatggagtcttgctctatcaccaggctggagtgcagtggcgtgatctcagctcactgcaacttccgccttctgggttcaagcaattcttctgtggcagctgcccgagtagctgggattacaggcacgtgccaccgcgcccatctaatttttgtatttttagtagagacggggtttcaccatattggccaggctgctcttgaactcctgaccttgtgatccacttgtctccgcctcccaaagtgctgggattacaggcgtgagccaccgcatccggcctacatatttgttttctacatgggattgacattaccactgctttacctgtgttttgttgctcactttgtcccagttttggccactgggagctctttcagttgattcctgtctccctttgtcacagttccatcatttcggggatctattgatccatttaactatyggtcggttgatggatcacacttcgttacttcctgatgcgayaagacactccacgcccactgtgtttatttcctgccagggaatgtatttcacaaatatttcacgtgtggaggctggcgcagagcccctcctccaggcagcctccccagctctctacgggcaggactggggctgtgcagtgctcccctttcccracccctctgcaatggctgctctggccgagctgtcccatctggctccatggctgtctccaccatgaggccgagtctgggctctctagagggcagtaggcatctgactcatccatgtcggatgctgagccaggcccagcatcgggcaggcaggttggatctgggcaacaccgcctgctgaccctgccccactgaataataatgacgacgactgctctcctttgtgggacccctcccctacgctggcaggtgttgggcctgggcagggccgtaaagcagctccccaaggkgcttcaaacctaggcttcagaatctgctctccatcattgggttgcaccccagcatgagctatgtgggccagtgggggagtttcccggtcccccctctgtggtacctggaccgctacgctacccttggtgagcaggggagggctatgccagggtagaaggggtgagggatatatccatcctgcagcaagcaagtgaggggagaccccgggacccacacctggctggacaccaaagtggtgggccacgcccctgtgacgccacctgggagacaccccagcgggttagcaggcatgtgaggtagcagctgtggatgttggcccaacaaggggctgctgcctggagcctgcactgggtacccgtcacgaggcagccacctcctccctgtctctccggtgtcccagggggaggtgcagccagtgctgtagccagatcctgccgggcactgctcacaggcacacgtggctcgacacatgaggcgggagagctcaaacctcacctagggcaagyccgtgcctgctgcaagccggtggttccctcccacccagctgcccacacagctttgcctcagcagaagtgcacttgactgggctctgcccccttctgcgtgtctggcagaggtgaacccsgctcrgaatacatggggctgttggctcccacctggcttgggcagcccggccccctgtcactggcacttggtttgttagtcattcagcaaacgcttgcagagtgtggtgctgtgctgggcacgtggcccacagagagcaaggcccgccagtctcctcgctggaggagcccgcagtgcaggggacctgcctaggaagcaagtggtggtgacagatgatggccccagtcccaggaggggcggagcatgctgagtctttccagggcgcagggcaagggctggccgggccggcggccggggtaggcctctttgaggaggcaacacaccgccgtcacagcctggaggagaaggggtgccaggaaggagtggtgtgcagaagccagggcaggcattgggggtgtgggacagcacagggtggccagggccccgccaggggtgggagaggggagagcagggtgaggctggcaaggatggcttggatgtaaccaggtggggaaagagaggggtcatgcgccaagtgccctgtggtgccatctgctaagattcagggccggcggggggcagtaggtgtccagttctggctgggtggtgtctgggctggctactggccatcagagaggcagacggtggcactggcacaggccctcattctgagctgcagcctggggacctcagtgaaagcagatggctctgaagaccccgccggcgtgagctccccgcacagagtgtggcccttagagaaggcatgacctttagggaggaggaggctgggaaacgggaggtgtccaaagggtgtggtcagcgggtggaccagtggcccagagagacatggaagagggagccgggaagggactgctgggcttggccacgtggaaaacactggtgacctgtgcctgggtagttttggggagcgcggcgtgggtgcgttgatgcgaggccaggaagtagggcctggaaagtagcacttgaggttttgctgggaggcggcagcactggccgcaggtgcctgcgatcaccagtgtgctccccgtgacatctggcccagtccaggtgggtagcagggagtctgcaggaatcccccttggagccctcctcccctctgcctgctgtgacctcagcctcggagcctcgagctcccaggagatggctcccagctgggaggacttcactccttcggcggagttgggggactgtgtgcttgggttgggttaatgactgtgtaagccaaggtcaggatcaacccccatcactgggctctgcagaatgccaaaattccagctggggtcccacccctgattcaggaaagttggggctctgaggagttcgggcctatgggattggaggtcctggggggactcatctgtaagctgggatctgatgtccccgggctcttgggagaatggcagccttgcagcccctgctgtgtgccctcatctgggaccttctcctctgtgcactctctcggtcacccacaccccaccagccggctggtccacagggtgtttctgaggcttggcctcttctggctctgtgatctttttttggagacagagcctggctctgtcgcccaggctggagtgcartagtgtggttatcgctcgctgcagcctccaactcctgggctcaagcaatgctcccacctcagcctcccgagcagctgggactacaggcacgcaccaccatgcccagctaatttttttgtattttttgtagagacgggtttcaccatgttgcccaggctggtcttgaactcctggactcaagcgatcctcctgcctcggcctcctaaagtgctaggattacaggcgtaatccactgcgcccagccctggctctgtgattttaccctctccgcacctctgttccttgtggttttaaaggtggagatgctgaggactggcgggagctgcagggctgctgtgggggctcctatgtaggcagtgagggctctttggtcagcttcctccaaggaaggaaggtccctcttctgaaatctcctctggggaaacagctcgcttccctcaccacccccagatgaggagcactgtgctaaggagtctcaggcacctggtcagcaggtcaggcagacccagggagaaggaaggactgtggacctgctgggccgcagagtcagcgattccctgggctccaggctgacgcctgccccgacaaatcaggacattccggccagttcgggggtgggtgtcttcagttccagcccaggcacgagaactgctgaccacttcctgcaggcctccgacccggcggcccagccacccatccggctggggtggccatcagtcatctggaaagcctatgagccccgtgtcctcgttttgcaaagagcagttcctgaaatcatggggcctagagctctgctcttctgatcaggggccggtttcagcagcaaaggccagaaataacacatggtgtgagcgctgctgaatagggcaccgtcctagccctttccgggggatgactcatcatgctaccattccagcaccagctggtacggggctccaggctagcggcttatcatgccggcccggatacacccgtccttaaacttgggtgcgcagaggaatcaactcaggaaggaacctcaggagagatttgtgcaggtccttccccccattcttgggtctgagtagggcttgataatgccttgggaggtgtgcggggccatctttgcttgtttgtgtttctgggaaacactgcgttcagcagagacagcattttatacaggaggaatcggaggccgggaaagatgacggggctgctcagcgtggagctggggtccggccgggctgtgttttccaggggcaggagctgatctctgagttacatttatttatttatttatttatttattatttttgagacggagtcttgctctgtcacccaggctggagtgcaatggcgcgatctcggctcactgccacctcggcctcccaggttcaagtgattctctcacctctgcctcccaagtagctaagattacaggcacctgccaccacactcagctaatttttgtatttttttttattagagatgggatttcaccatgtgggccaggctggtcccgaactcctgacctcaagtgatctgcacccccctcggcctcccaaagtgctgggattacaggcgtgagccactgcgcccggccctcagtcacctttaaaatgaaagggccacggaatcaccaggaactctccttcctgtgaccttgggtaaaggtcattttcgccctgcccctcagtctccccatttgtaagcctgaaggttgtaaattacaatcttcttatccaaccacttgtctttattttattttattttattttattttattttattttattttattttatttcattttatttttgagatggagtctcactctgttgcccaggctggagtgccgtggcatgatctcagctcactgcaacctctgcctactgggttcaagcaattctcccgcctcagcctcctgagtagctgggatcacaggcgtgtgccacaacgcccagctaatttttgtatttttagtagaggtggggtttcactgtgttggtcaggctggtctcaaactcctgacctcgtgatccacctgccttggtctccctaagtgctgggattacaggcgtgagccacggtgcccggcccacttgtctttatttgttgccttctcttctgctccgagtttaggttcatgtcgccacctggtgattggcttctctgtgcatatatttgcacagttgcaggcatgaccagggtggagcagtgaagcggggcctgacgtgatgtaccatgtttcaagcctgtttcacagcacaagacagcctcagctctgtggtccacaaaccacatgaccacatctggccccctgtcttgtataatagatagttttcttggcatatggccacacccgttcacttactgctatctgtctgctttcctgctgtaagggcagggttgtgacggacctgatggctggcaaagccaaatacgcatcccccggccctacccagagcacgtttgcctcccctcttctagaacgaccttggaggctcctgcgcgcctgtttctgctggacagggccaatgggagaaccagcagcctgcgaaagtggggagagtatgggtagcctctagcccctggcctccgcattcctgagagtcacttttatggcattgtagattaaccccttggggtgcaagcctgctggcctctccttggctaccagtgtccatagtcccctgaagtggctgtgggagccacttcactgcctgccaggagcacaattgtttgagctggccctgacccctgagaaaccctttacgcccctgctttgcctggttcctctccctccaagtctcagcccagatgcctcctctttcaggaagccttccttgatttcatcctcctctctttcctcccaggcctccctttgctgctgcaccaatcatgctttgccatcctgatctgtttcccagtcagtttcctccacttgtctgtaagctcctcctgtgagcagccaaaccatgggacaggtagggtcccacaaagcagagctgagatgggggtgctgccatcgccagtggcaggtggggctccaagctgcaaaaagcagcattacctggaggtggggagtgggaccgaccctcagaagtgcagtttcctgtgagggatgcagtccccaggacccctgctggtatgggggcaggtccggatcaccttctgagcccaagatgattcactgcagagaactgaagatgctctgagacagtgtgatgaagccagaaactgcctgtgccttcctatgactgcagctgtcatcatttgctgcaggaggctgaaaaacgcaaagacaaaagccaccacccgtgcgggaggtagaaggcagggcccctgctccccagccagcacccctggcttgagttgcagcctggggctcgggcctcagggagcctggtcagcactcagggtgtgcctccgaggctctggctaggagctgtcctgggaccttcgagatggataattaaaaggggcggcggggggtgttggtggtggcgctaaaaagccacagctgaagggtgtggctgggggcttcacgctgctctgtcccaggtgggccagatttgggctttcctgaaggaaggacacaggaacagatttggtagcttctttgagcgacctgggagagtcacagaaaaagtctgaaggcacactcgcgtttcccaggccatcgtggccatgcctgccgcttctagtgctggctagaaatcgtgtcctggcaccttgtctgcccagactcctgagcagccagaccctgggatgggaagcacttgctgaaaatgagcttgttccgccctcagggaaagcctctggtcagggtggcttgttttgttttctctctaactctaacatacctgttcagcagcttcccagcccggagcaggccagaaacggggaacaatctggtgtaaaaggcaggtggggagatggagaaactctaagactatcccctcaccctggcgatgggtcaccttgccttataattcagtaaaacaccagctggtcccagagatcaggaaagggacagaggacggtcgttgctttccagagcaccattgcaaagattaactctggagcttggtgctcgaaggagtgggtgttaggttccctggaaaaccccagactcctgggcaggacttgcttcccggggtttccggcaattgagggcaccactgcctttgtctccggctgctccactcacaccttagaaagccccagagggcagttgagggaggggtgaggaacacaggtttggtgctggaaggactgggatctgggctggttctgccacataggagctgtgtggccctgggcaggtcatgcctcctctagaccctctgtgaatcagtccagcgggcatcaggagactctcaccagcaggcatcaggagatactcaccagcaggcatcaggagacagtcaagctggtggcgccatcagcaagccccatgtgatgacaatccttgtgaaggactgagcatcttcttggcaagtgacaatttgaatttattacaaccacatcagggagcagaactggagggcacttagaaatctccaagcccaactctaccatttgcaagatggagagactgaggcccagaggagtgacagattgtcccgggagaattgaagcctgagctggggttcggacaggtcctctggcaggcagggctgtgtgtgcttctgccccagtgtctgcagcctccagttgggcgtgcttggaaagcccccagccctgaaggctcaggcaccttcctctaggaggctgctgggtgtgctgtgtggagtcggggtgctctgtgcagttggggaggctcttggaaaattcccccggccttgggccagaagtacagctgcagagacaaacaggatacggggtctccagccacagcaggggacaatggccaggagaggaaatgtctccagacccgtgtgtggatgtggagcccgtctgggggcttttttcaacgtagcttccagaaaaacaaacacaggggaagccaagcatctctggccaggagatgaaatgtgttctgcctactctggagaaggggtggaggtgtgagcaggctggagaactgggggcacccgctttgagtctcaggtcacagatgggaaactgaggcccagagaaggaggtgccacaggcaggcagcaagttgacacaggtggtcttgggcgccaactccccacttctccccacagccccttggggccatcatctgagcaggggcacagggcagccccatcccgtgatgggggtgacgaggccagggcactggtaggaggcgctaacctcccagggacgtcggttcttccccacctgcctgtcgagcgcagcccctctgtgctcctcgctgggccaaggctgcggagaggacccggcacgggcatttgttacatgcacagaatctcagtgcaactgaggtgtgcacctgtgcttggcttgttagaaaagtccttgagtctaatttaatctttacgatgactcagggcctggccacagatctcacgtccccacccgcctgacacccagggctacttggaggaagtgaccactccatgaggttgtgttgatggatgtgttggacccgaggcacgaatgtgaccctcggtggagaagactcgctgagcaggggagggagcctcagaggctacaggtggcactggtggggacgtggggagaggaagacctggaggggtggggtggggtgatgttgggtgcttctgtgggcatccacaggtcctgggcactggggtggcagatgcctcgggggtggccactcacccaggaaagcagcccacatggaggagaggtgggtgcccagagttgcacccattccacagggaagctgccagtagaatccagctcccaaagtgctctgggcttcagcagtgggacctttgtcaagggtggaagcattacccagtcccctgagacaggggaggcagagggagctggacagaggcctccagctggtgggggctgggcaggaagaaagttgagccctgatgggagaaggaaggtgggagatggggctggcaggtgtctgcaaggaagggtggggtgctgagggctggagtccaggaggggcttcaggatggggtccctggaccttgtatcgtccatccccaaggcccaaggagggggctgagaggacagcaggctgcagggactgcaggctgttggggttgaggggctgtgattgggggccaatgtttctaaccactgtcccaggcctgcttcacagcttatgtaccgagctgacaccaaaaggtaggaccaccctgaacctgtgaacctgaccttatttgggaaaggaatctttgcagatataatttccttaagggtctccagatgagatcatcttgggttatttaggtggaccccaaatccagtgacagggcgcttaagggagactgaagaggagacacagacacagaggaggaggctgggtggagacaagggcaaagactggagcgatgccacctctagccggagcatacctggagccccagaggctggagcaggcaggaagaggcctcccctggagcttctggagggagcatggcccttccgacagcttgattttggacttttggcctccagaactgtaagagatgacatttctgctgtctggagaccccagtttgtggcacgcagttgtggcagccccatgaaactgatagagtgactgcccctcgacgaggccagagagaacaccatcttcctcctcagacgcagccggggctggggagccgtgtccccgcagggaagaagagctggtctgggagctgcggcccctctg

SEQ ID NO: 93379 - DNA, 15975 bp, Homo sapiens
aatagcatctcactgctggcgagtacgtcaaattcagtacctcttattttgacacatcagaataaaggtccagaagggtaaaacaaaatgttctgggtcatgccataaattggtggaaaagttgggacaagaacccaggtttgccttttatgtcctacactggttctacgacaacctggtatatgtgattcaggctagcagtaagcatagtgacccttgagtcaggctgtcaagaacccaggctgccatggagggggttccttcccctccaggaaaaacagaaggaacctggaaagctagaaagaaacaaaaaggagccatacataagccctaagtgaaacgattattacctgctctaaaggcagggtgaaataatttctcccctgtatttccatttcaatggtactacttactgctgggggcgaggcagtgagcaagaggtggcacatactgggggagcagtcaatatcatccagaattagaaaaaggggcaaacaagactcagggaagagctagtgcatccggactagagaacccacagcggagaaccccagtaaaggaaccacagcagataaatagaatcctcaggtcagtgcccagttgctcaaaattctgggccatatatagaatgagaagtcatgacatcagacaggaacatggaactactagggcccagtgtaaaaaactcaatccactgtcctgcccaccatggaatgtgcaaatgaggttagcaataaaggagctaacccccaaaaccccccaggacaaccaaaatgatgctcttgccgggcttatgccgtgaaaactgccaggggcgtgggccgaggggtagtggtgggttcagcgcgcgagtcggaaacagctgcggtggggaaggaagaaagcagcgccatcagcacgtcctcccgttggcccggaaccacgcccttactgggggctcagccgccgaactgacactcaccgctcctgagcacaaagaaggtgcgaagtgccgcagagcgaccgccagaggtcagcaacacactgcctactccccgccgcgcctcccggagactccctcgctgaggcttcgggggccggaagtgcacccgcccctttcccgagcgcccgcgggccctctggctgtcccggaggccgcctccgtgtgtctttggtcctacctggccccctagcccaccatcgtaaccccgccccggcccctgacagttcccggaccgaaggggcgaggaggggacgtgccgcccgctcccggtgttggcttgagttgctggtccccagcccctcgggagggagaggagggcagtcccgtgggctgacttcccaggggcaagccagtctcctcccgaggaagagcccgtattccctgcctgtccatccggcagccctgcgtggcccccgtgggctggccccggacacaagcgtggctgggccggctggcgtgagaggggttcagtgccaccgatgtgtcaaagtcctaacccgcacagagcctgccggttctgcaccctgtggagattcttcccccttctccgagtgccctgggctcattggccccagggtggatatgctctcggtaccttgggaccaccctgctgcatcccctgaccagcacccctcttcggccgctagcacctccaccacacacaacacacattgactgggtcttgtggtcctccaggcctccgctgaatcagtgtggcccaatcagtgtggccttcctgactgccacctcccttcatgctctgctcttctttgcagcatttgtcacaattacagccataccgcgaagatattgcgggttgggtttcaaacctccatagtaaaatgagtcgcacgaattttgtttccggggaatataaaaattatgtttagactatacaccattaagtgtgcaaaagcattatatctaaaatacatatatataccttaatttttaaaaaaaactttattgctaaaaaatgctaatgatcatctgagccttcagtgattcctgtcttcaccctggactgatcagggtggtggttgctgagggctggggtggctgtgacaatttcttaaaataagacaacaatcaaggttgccgcaccagttgactcttccttttaggaaagatttctctgtagcatggaatgctgtttgatagcattttacccacaatagaactttttttcaaaattggagtcaatgctctcaaactctactgctgctttactaactttatgtaatattctaaattctttattgtcatttcaacagtgttcccagcatcctcgccaggattagtttccatctcaagaaaccactttcttagctcatccgtaagaagttactcctcatccattcaagttcaatcaggcgattgcagcaattcagtcacatcctctggcactacttctaattctaattctctatttccacccatctgcagcgacttcctccactgaagccttgaacccctcaaagtcattcatgagggttggaatcaacttctttcaaactcttgttcatgttgatatgttaacctcctcccatgaatcacaattgttcttagtggctctaaaatggtgagttctttccataaggttttcaatttactttgcccagatccattagaggaatcgccatctacagcagctatagccttacgaaatgtatttctgaatactaagactgaaaagttgaaattactccttgatccatgggttgcagaatggatgttgtgttagcaggcatgaaaacaacattcatctcttcgaacatcttcctcagagatctcaggtgcattgttaatgagtagtaatacattgaaaagaatcttttttgtgagcagtaagtctcagcagtgggcctaagtaaaccatgctgcaaacagatgagctgccatccaggctttgttttgtttgttttgagacagggtctcactctgtcgtccaggctgaagtacagtgacatgatcttggctcactgcagcctcaacctcccaggctcaggtgatcctcccacctcagcctcccaagtagctgggaccacaggcatgcaccaccatacctggctaatttttgtagagacagggtttcaccatgttacccaggctgggctccaagctctgggctcaagcaatccacttgccttagccttcaaaattgctgggattgcaggcgcgagccaccacacctagccttgctacttatagagtacaggcagagtagatttagcataattctgaagggccctaggattttcagaatggtcgtgagctttggcttcaactgaaagtcaccagctaccttagctcctaaaaagagagtcatcctacccttagaggctttgaagcagggcattgactttgctctaggaaagtccttagatggtctcttcttccaatataaggccgtttcatctacattaaaaatctgttgcttagtgtagccatcttcatcaattatcttagctacatcttttagataacttgctgcaacttcttcatcaacacttgctgcttcacgttgcacttctatgttatagagatggcttctttccttaaacctaatgaaccaacctatgctaccttcaaacttttctccaactgcttcctcatcactttcagccttcatagaattgaagagagttaaaacattgctctggattaggctttggctaagggaatgttgtagctggtttgatctatgcaggccactaaaactttcttcatatcagcaataaagctgtttttcttattattcatgtattcactagagtagcacttctaatttccttcaagaaattttttcttttgcatttacaacttggataactgtgtagtgcaacaaacctagattgcagcctatcttggccttcctcactaagcttaatcatttctggcttgtgatttaaagtgaaatttaaagtgatttaaagcgcagctcttccttacacttgaacacttagatgccattgtagggttattaattggcctaatttcaaaatagctgtgtcttgggaaacaggaaagcccaaggagagatagaaagaggggagaacagctggtcagtggaacagtcagaatacacacaacatttaccaattaagtttgcatcatatatgggcccagttcatggtgccccaaaacaattacagtactaacatatcacagatcgccataacagctgtaatgataataatgaaaaaatttgaaatattgtgagaattacaaaatgtgacacagagacacaaagttagcacacactgttggaaaaatggtgccaatagttttcctcaatgcagggttgccacaaaccttcaatttgtaaaaaacatagtatctgtgaagtgcaataaagcaaagcacattaaatgagaaatatgtgtataattactttgggcagtgatttaatatctttctccctccattagaccataaactgcaagagagcagggactgtgtctatctcattcatgattataatcccagatcgtagcaacatttctgccagtaagtgcccaataaatatctagtgaatggatagatggggcttctccaaggaaggagggaatgaatagatgagtgtgggttaatgaatgaggtaagaatgaatgtgaaataatggttcatccattaaaaactaggggacacggttcagttcattggatttggcccagtttcagaccgaattctaaggttgaggagagttgatgatgccaagtactgtggtggtcctgaacaattaaagagggattctgggaagcagagtgtggacagttccaactccctgccaaggggaagctcataggcaaaggaagctcactccagaggggatatggaagttccataccctcttttgtctgaagagccgaagtccctgttctcaggtcgttaggaagttaaaaagtaatttggaggttatcagaactgattgaattgagtttgaacctcacctatagcaacaatgggccaggctgcttgactaatgccttggcgtcaatggtacagttttctccctcttgagctgctggcagggacctgggctgacatgtctcagaaggcccttagtcaatgattagcttatctcaaggccccaagccagggcagctgtcaaagagggtccccactgcgttctgcacctagatcctcattgtgaaatgaagtatgaagtgattgagtgaggtctctattgtctctgacattttacaattccaggattctgccttcttgtcagagaagtgtataggcaagcagttgggcaggtgagagggctccgggtgagaggctcagagactgagggctcagcctctgcttgaagagtcatcatctgggaggctctgtggcctcctcagatgagttcattcacactcataccccaagatggagtcaacaccccctccaccatctcagccttctcagcatctaaagccccagcatcaatgcctctttttttgggttaggggtcagagctgttgtggaagggcatacagtcattcttcacttgcctttgactgtgtactctgtgcacatggaggtaggagcagacatgacttcaacaaggtcatgcccccttggcaagcatctttgagaccagagaggaagacagactagggaaagaatgaggagataagcacgggctgctgtgaggtccaggggagcaggcaaaggtaagagaaaaggctttaggatactaactaacatatatggagcactagcatgagccaggcactattctaagtgcttttcaggtgttatctctttttgcctcacaacagcacctacaaggcactgtaattatccctacttcacagatgagggagtggagccacagtgaggttaacttacttgaccaagggggccaagtaggaatggaggcatttgttgagtcttctaaagatgaggaaagagtggaagtgagattttgtaagtgcttgattcatttctaccaactgaactggcaaataaataaaagcatgagtaaatgggggtataaatagtctgtcagctatgggggtgggagtgggctcaaggcaggcttagagagaaggtgcaagagctgtctgaaaaggtcagagcaaagcatgaagctggtgagcagctgtgaccatagctggaagcttctctctgagctttctcctggttacctcctcctcccctacgtgaccagtcagccaagtgttaagtccaggggaacattttgctgcttccaagtactgtctcactagtgttatttgccataacttgcggccacagggcaaggtccaggtgctcagacctttacatcctggactttccaaggcctcccaaagctctctggcacccagggaacagtgtgcgtgtcgagagcttaatccgcaggagcatagccatggttctctggggtccagtgctgggagctctgctggtggtcattgctggatacctgtgcctgccagggatgctccgacaacgcaggccatgggagccccctctggacaagggtaccgtgccctggcttggccatgccatggctttccggaagaatatgtttgaatttctgaagcgcatgaggaccaagcatggggatgtgttcacagtgcagctagggggccagtacttcaccttcgtcatggaccccctctcctttggcyccatcctcaaggacacacagagaaaactagactttgggcaatatgcaaaaaaactggtgctgaaggtatttggataccgttcagtgcaaggggaccatgagatgatacactcagccagcaccaagcatctgaggggggatggcttgaaggatcttaatgagaccatgctggacagcctgtcctttgtaatgctgacgtccaaaggctggagtctggatgccagttgctggcatgaggacagcctctttcgcttctgctattacatcttgttcacagctggctacctgagcttgttcggctacacgaaggacaaggagcaggacctgctacaggcaggagagttattcatggagttccgcaagtttgaccttcttttcccaaggtttgtctactccctgctgtggccccgggagtggctagaagtgggccgactccagcgtctctttcacargatgctctccgtgagccacagccaggagaaggagggcatcagcaactggctgggcaacatgcttcagtttctgagggagcagggkgtaccctcagctatgcaggacaagttcaacttcatgatgctctgggcctcccaggggaacacggggcctacctctttctgggccctcttgtacctcctgaagyacccagaagctattcgggctgtgagggaggaagctacccaggtcctgggtgaggccaggctggagaccaagcagtcctttgccttcaaactcggtgccctgcaacacaccccagttctagacagcgtggtggaggagacgctgcggctgagggctgcacccaccctcytyaggttggttcatgaagactataccctgaagatgtccagtgggcaggagtatctgttccgccatggagacatcctggccctctttccctacctctcagtgcacatggaccctgacatccaccctgagcccaccgtcttcaagtacgatcgcttcctcaaccctaatggcagccggaaagtggacttcttcaagacaggcaagaagatccaccactacaccatgccctggggttcgggcgtttccatctgccctgggaggttctttgcactcagtgaggtgaagctctttatcctgcttatggtcacacactttgacttagagttggtggaccctgacacaccactaccccatgttgacccrcagcgctggggttttggcaccatgcagcccagccacgatgtgcgcttccgctaccgcctgcatcctacagagtgagcttggccaagccagctgcaaacctggccagaggagttctattgcatctctcacctgttctcacccctctgcagccccaagaccccactggccacccctccctctggtcctgtggcaccccctacctctgttctgcctgtcctcgctctctccccgcctagtcatctgacaggcttatcattctctttaaaataccatctctcagagtgggttctgccgaaccctcctctcacaggaagtccagaggaagggggagtatctgtgggcaacttggtttgggagatgatgcctgccttgagaagtcctgagtacagagactggttccccccagacacgagtaacatggcatcttgcaaacatcagcctccactctcccagcttgctttagttttttcagcaacacttatcccacatcctatggaattcaggttctagaacagtgtcatccaacataaatatgaagcaagctacatgagtagtggggttttttggttttgtttgtttgttttgagacagagtcttgctctgtcgccgaggctgcagtgcagcggtgcgatctctgctcactgcaacctctgcctcctgggtttaagcaattctcctgcctcagcctccccagtagctgggattacaggcacctaccaccttgcccagctaatttagtttcctggtaaacacatttttaaaaagtaaaatgaaacaattcatttttataatatactttacttaatccaatatatccaaaatattggcatttcaacgtgatcactattaaaaattttaacgtaatagtttttaccttccctttttcatcctgtcttcaaagtctggtatgtactgtacttttgcagttcttcccagttcagactagccacattccaagtgcttaattgccgtgtgtggcaggtggctgccctattggatascmacaggtctagagaaatgatacctttttttttttttgagacagagtctcactctgttgcccaggctgcagtgcagtggtgtgatcttggctcactacaacctctgcctcccgggttcaagtaattctcctgcctcaggcttctgagtagctgggattataggtgcgcaccaccacacccggctagtttctgtatttttagtagagacggcgtttcaccattttggccggcctcctcggcctcccaaagttctgggattacaggcatgagccactgtgcccagtcaggatgtctttaatgtaggaatcattcaagatccctcctcagtgcccatgtctcccccacctcagggtgctgtcaaccctcccttggtttccatgatcattgctgaactcagagctttcttctatccccagacccacatgggagtctcccagcacctctgactcagcttggccaatgcagaacttggcatctgaacccctgcctcttccctgaaccactcctcctcctgatttccctgctctctctgctcagaacactaccattcacyccatctcccagagacactctccctcctcctctttcaccttcatacaagcaggcccccgtcctatcagtacacccccctgtgatgcctctgaaatatgtaccctcctcccctctcctactgtcattcttatacctgtgatctctgcgtttctcttctacactgctgccagaggcctttttgccaaaagcactgctgattgtcactcttttactttcctggttcccctttgacttcacacacttgacgtttacattttgtcacagttggtcccccttgccttcacatacctgatgtttaaattttgtcacggttrgtctccaaacttctcaactttgccagctttctccaatgaaaccatcagtagagacattgctgttcctgcccatcccagtgccagctactccttcctggaagccttcctggatttcacgcatcccatcctctggccagaaatggcctccgaactgtgcagctcctgcrgcaccatttgtatcatagcatatctgttatgtgtcgttgctttctgtgtcttggtttctgcctgctgcccacttccctagactggagcctactggggcatggtattttattcatttctgacctccaattccctaagtggagattaaatgttagaaacctgacttccagtctcggctaatttactttcagtcctcaaatcatttcctggcctcagccctccaatctatgaaatgaggacaatcccccttcccagcgtgcttatcagtgctacaagagggtgagggggtggctgccatagctgcagctggctgatggcagggctccagctggagctgggacaggaggaagaatgactgtgggagctggatagagtgtcttggaggaggtgggcccaggctgcatggaccccccgacccagcgaccagccagtggaacttctctctgctacttttatcttacatctctggcagcctcacatttctcctgaggctggctgcctgttctgctctgccaggagagtaggcaagggcctgagctggggtgacagtctgtctccaactagctatgtgaccctggtccagggcctgcatttctctgaggtcagctgcccgcaaatgctgatgtctgcctagggcttgatagagctctgcctggttaggagaagctgagatatcccatcctattctacaaggaccaggagcacaaggagaagagttgagtagggggcatagaaggaggagaaatgggctggaaggtggaagactatccatgggaaatgtaccaatgacatctctgcccagccaggccctgtgcccagtacaatggggctggggctgtggggaagcaggaacagagccttaacacacctccttggccctccctagaccttggtgctgtgtctccttttgtgcctcacacccaaaggaatatgggccaggagagtggcctatggattggctggggtgaggctgagggctggagttccctgagtcaggaccagaaggtctcaactgagagtgaccatgtgcagataggaacttaatggaccctgtggcctgtctgagagctccagaggagatgcttgggacctagagaagcctcagcgggtgaggtgtgaggtgaatgcaagtgtaccatcccacagtcagggatatccagcataacaacaggcctcccaggaagcaagagccccccaggattggagtgtgggcagggatcccaatgccccatgcccgcctgcttgcatgggaggggcccatgggccatatagctctctgccccctgcatgaggactgctgcagccaaccctggcagaggccttgaggcaggaggaagactgcgaccgccaaggatgcctctagtcaccacccacccaacctggtcattctgtccccaattcctcatttctatgccaaatattttcttcctctcatccttttcctcatcaggacctcagaggaaagcccactaaatgcgttctctctgaagatagtttataataaagcaagatcggggtggctttccaatggtggaatttcaggcacctgggaaagaaaagagatgcttttctcatagagaattaactggagtcaaaacatcacatttcgtggcgttcagcacaggcagcagccctgcccacaggcaaagcaacttctacacttctccctaggttggcccatgggaagagtccaccttgcctcagagcctgagggtcagaggaattctgattgctttcctgagacccctgggaaaggtttgagcagtgcagtcagggagccagactttgtcaggcctctgggaagacagagagcaacaggagggaccaaggcccaaacccggaagtaaggctggggtggagagggctttatcctggcctgggctgtgagagctgctgagctgctctcaaactatattgcacctaagacagtgacagagaaccaggtacctgcagctagctcttgccctctcctttggacataggcttcagggcactacttgttatattcctgccttttgcggcaagtacacactcacacatacacagagaaaggcatgaaagacaaataggactgggcgaagtggctcatgcctgtaatcccagcactttgggaggccgaggtgggcagatcactttagctcagaagtttgagaccagcctggccaacatggcgaaaccctgtctctattaaaaatacaaaaatacaaaagttagctcatgcctgtaatcccagctactctggaggctgaggcacaggaattgcttgaacctgggaggcagaggttgcagtgagctgggatcatgtcactgcactccagcaagactccgtctcaaaaaaagaaagaataggaaagttgcaggcacataaccagacccacttggacacagtgatacagctgcatcataaccacatacacaaccatatatactacacacagcccacatagcacacgtacttcccagacagatagacacacacacacacacacaaatccaccaatgctggtgtgacaagccctgctgggtgtcccttgcttgacatcctatctgtgcatcatgggcacaaagtcagggcctctgagcacctagaccctgttggtgcagctcaggctgtatctcaccagccaggctggcatacgaacagaagttccttgtaggacaagatttccggagctctaaagtagaattccatcctccgcgtcctcaaacaaacatccaccttcagatctagagcttcatttcccagggaactaggaagctcagagtccttcctcatggtggggaattgggggccttgaggagagagaactaaaggcagagctgagagagattggatgtggggaaggcacagggcaactggtgctacatcaagagactgccagatagcatgtgacacatgtgctataactatgccatcaaaagctcaggggaagagaagaaatagcgggcagaatactgcttgcctgctcaatcctctatcagccattcgctccaaaaaacaaaacaaaacgaaacaaaaaaacttatccattcattccaaaaaaagtctactatgctctgagcatgtgttgaagcacaggggatgcagagtttacacatggcaaagtccctgctctcatggagcttacattcacccagccgtctgttctcctaccctccattccatccaccaaaaagtttcctttcctgtgtgccaggttccacgttcaattgtgcagggcagacatgctgggacgtgggcaggttgcaccaggtagttctatgaggtgggaagagcagtgggtgctttagaagctcgggagagagagatgccatgtgggcaggcagctccctggggaaaggcttctcagtggatgtgtcagggggcagggagaatgccaagcattagagatatgaagagaaaagcactgggcacagtatatcagtcaggaatctttaggttgcaagtaacaaaacaacatgactccacaaggaaaggaatttattggttcttgtaactgtcgaatccaagattgggactagcttcagaagtgctttgattctgaggctcaaacagtgccctcgggatctgctcactcacatgcactatctccttcaccttctgaagtttgggtggaggaaggagtagctccagatctcaaaccctctcagcttcggtttcatgcctctcttctcacatgttctagtgatattgcacttcattggctctacctaggtcatgtgcccacccctaaaaaaatcaccgtgaccagggaaatgtgaaggcagtaaatggcccatgtcccatgctccacccaacctcctctcaaagcacagggcagagtgaccaagcagtggagtcccagagaaagtgggattcagttgtaaaacaagggtgagggaatacctggctggaaattatcctaattacatgagggagcccacaagagcaaaggcatagaagttggaatgttcaggaaatgaaaagggagtggaggagtatgagggctggaagatgtatgggatcctatttgcaaaagccctagccttgacatcagacaaagattttggacttgattgtgcaggtcccagggagatgtgaaggctcctgagatggggcctaggccaagtgtgttcactgcctccttctgcagactgtatatggtcctgggacattccctaggcagagtacttcaaggccctcctgattgccagatgctgggtccaccatcaaggctacgagaatggtccttttaatagcatttcccagctggactacagagaatgtggaaccctggtgagtggagggccttaggttctttttccccagcagtgccagaaggaaaatgctccctcctccacccatgcattttacagatactttctgaaaacctacacaccaggccctgtgttagggggttgggtacagcagtgagcctaaccaagatccctaccttgtggaattcacctgggacaatgtgggtggggacagtagccactgaacatcacaaataggagaaacatatacaatgtctgaaagaaataagcactattgaaaaaatttaaaaatagagcatcaggaagatcaggagcgtcagagatgggccagtttgtgttaaataggttggacaggtgagtgaaaggtggtatctgagctaagacctcagaaggtgagagagtgagccaagcagacagctgagaggagagcaatccaggaagaggaatccccagggggatgtgtcaggagtatttgagatcagttgtgtctggagcactggaggctggtggacataagggcaaagagtgtagccagggtgggggcagatcacataggccttaaaggattaccgtaaggagttgggcttgttaagtaaaaactatggaaggccattgttttggactaacctcctgcactaggtcccagctgaccagaccaaaccaaaatggaatctgtcgtattaaagttccatgtcctcaaaccaaaactaagttgttatctgacctttgagactcctggagacagagttaacagccaaattcccaaacatgacagtttcagttggcgtaataatgcagacagtaaccatgctcatgataatgaagttccccgttttaatcattattaaaaagtaacctgaagaaaactgatgtcaaccaccctgttccggccgcatatagaaagtaactttgaaatgatgaatctggccctgtgcagtggctcacgcctgtaatcccagcactttgggaggctgaggcaggcaaattgcttgagccaagggtttccagtccaacctgggtaacatactgagaccctgtctccacaaaaaatacaaaaattagccaggtgtggtggtgtgctcctgtagtcctagctacttgggggcttagatgggaggatcacttgagctcaggaggtggtggctgcagtgagccatgattgtgggattggacttcagcctggatgacagagtgagatcctgtctcaaaaaaaaaaaaatcaatctttttttttgttcttcatttctttctgcctttgacagccccttcctgtctataaaactaacctcttctacccagctcattgcagcactctctgtattttatggagtgaatctgttcctgattcaatgagtctgttgcctgattctagaattgccaataacgctaattgagacctttaaactaaatttgttgtaatctggtgttttgacaggctgctgctctgagggaggcggaagtaaaggccgagagtatcaggatcactctggctgctaggtgcagatgagatgggaggagagcaagagagaggaaggacaggggccagttggaaaactattacagcaattctccagcctggccaacatggtgaaactctgtttctaataaaaacacaaaaattagggccaggcatggtggctcacacctgtaatcccagcactttgggaggccaaggcgggtggatcccaaggtcaagagatcgagatcatcctggccaacgcagtgaaaccccatctctactaaaattataaaaattagctgtgcgtggtggcacgcgcatgtagttccagctactcaggaggctgaggcaggagaatcgcttgaatccgggaggtggaggttgcagtgagccgagatcgcgccattgttgtccagcctgggcaacaagagtgagactccgtctca

SEQ ID NO: 93380 - DNA, 51562 bp, Homo sapiens
aatgaacatttttcattccttatcctagtggacccctatgacgttattgccattggctgtccttcccctactagtgttttcttttggctcccgtgtcagttctccgagattttaaacctccgcgactgttctctcttggtgggttcttctccttttattctcccctgtaaaatgctgtcattctcattccactcaatgagtctgggtctctaacccaggtccattctccacatttcacaccaagtagccatttagaatccctatctggataacctacaggaatctcaattcaccatgtctaaaactgaaatcccgccccttcctcctggattcacaacctcaactggtggtaccacaatctaccttatcacccatgccaggaacctaagatcactgttcctacccattccccaactgatcaataatcgggtcctgctaacttaatgcctaaacattttgggcactccctcctcttcatccttacaactactgcctttcatcgtcttttccatgaactatcatgatgaaatttctaacatgcaaatttgtttacgcatttcttcatctatttaaaattcttcagtggctctccagggtctttagagcctgcttctcaccatgttttcaagatcttccacaatttggctcctgtctacttcttgagaaaagacttgcttcacaatttatccacatgaatcaaactcctgatccttttttcacatttgctttatcaataggctgtctcatctcagtggatggtgactccatccttccagttgcttagaccaaaaacttcagaagctgtcttggactcctctttttccccacatctggctcatcagcaaatcttgttggtgctactttcaaaatattacatcccaaatgtggccacttcttattacctgctttgctaccaccagccaccatcatcatttcttgcccagattactgcaattggtctccttggttttacctttgcccctgcagcaatccccttctgtccttccctaccaatctactgttaacatagcagctagtatatttttgtttgtttttgagacggaggctcactttgtcacccaggctggagtgcagtggggtgattttggcttacctcaacctctgtctctccggttccagtgattctcctgcctcagcctcccgagtagctgagattacaggcatacgccaccatgcctggctaattttttttgtatttttagtagagatggggtttcaccatgttggtcaggctgctggaactcctgacttcaaatgatctgcctgccttggcctcctaaagtgctgggattacagggtgagccaccgggcctggcctagtatacttttaaaatgtaagttagatcatatactttacttaaaaccttcctcatcttcactcactcaccccagtccagttacgctggtttccttgctctttcttgatgccttcccacacattcctgccataaggccactgcactggattttctctgcttcaaacactcttcttccaggtattctcatagctaactccctcatttcactcaaatctttgatcagatgtcatctcaacaaagcctagaattctattcattacgcaacttttctctgcaactccttccccgccttacactcccttacctggcttttacttttctcgttccactgcacgtaccaccttctagaatactaaaatttattgtgtttgcttcccctgccctcccatcccaataatgtgtactccacgagggcagggatctttgttttttttcactagtatttttcaagagcctggaatagtgcctggcacatgacaggcattacacagattatttgttgaataaatgaggtaacactcaacttcttatatttctctgcatcaattgtgctattttttgcctccatgcctttactcaggtggctcttagatccaaccctagattgctctaggaagagcttttttctgacacctctccttggttagacgcctcgcttctgtgttctatctccatcttatcacatatcttaactatctgctcatgtgtctgtctcataattaaactgaagaactccatgagtcagggatttttgtcctggttcgtctttgctgttccagctcctagcccagagtttggaccatattaagtattcaaatggtttgttgagagaattaatatatcaaaaactaaccattctcacaggaccattctcacatggttcccccttcagtgttcaagatctttcctttttcagtgttcaagatcccagaccttctggtcacttttgccctgagtatttactcccaatcaaaagttatttctccttccctcaactccagagtggtttctaaacctcttatgtatctcaacttacatgatatgaaagctacttctcacaatcacagacttttggtgtgagaaggatcttatatgcactttgttcaacccactcaccttaagtttgagtctcctttataacatcctcaccaagtgctcacatatgcctggtacttttgtctgggaatgtactgccttcccaagtggccatttagttttgggagctctcccaatataagattcctcctcacattaattggaaatgttttccttgtaactttgaactatctccattttgcctctcccatgtcaactctttaaaacttaaaatgatttattttttccttccctgtaaggtttctctgtgaattcctccaatgatgagtttctagaatagattccttcaactaggatagtttccacttctctaactagctaggtcacttctctccaaatgatcaacttcctccaaacctgttcagaagtgactgcagtgctcccggtaggaagtctgctcccggaaacgagcagttctctccttgtcctggttctgggctgtatcagccttgaactcagtcacatcaaacgtctgtctcacggaagtccacacaacattcaccgaaacccctgaggcttttttttttttctttcaaatcttgtgggcttctgagaggtataactgcagttgtctcgcctggtaacctgggtacccggtttgtgggtccaaatgtagaccatttgggtagatctgatttttaatttaaaaaaagggtttttttttgtttttgtttttaaagaggcaggacctctctgtcgcctaggcttgtgtgcagtggtgcgatcaacgttcactgcagcctcgaactcctgggatcaagcgatcctcccgtcccggcctcccaaagtgctgggaccacaggtgtgcgccacggcgccccgccctctctggttttcatgaatgagtgtgtccctaaaccctcctaaggggaggacagtgccgtatctctctccttcttccccaaggaggccatgccttgcctttcaatcttgatcaaagcgaggttgaaaagcaaacaggcgttcagctttgcacttcacacccacatctcccgccccccagcagcttcatcagcctcccgccctccgcggcccggcctcaccagccgcagcatcttcacgtggcctttcacactgaagcagaaggggcgatgttttattttcggctgcacgttatccatcgcgtctgcmgacccagcagcagcactttccctcaactcttctcagctggctgcctgagtaggttctgcgaagcgatagcaaccgccaccgcggcggagcaccgccctcccctacttctcgcccagctcggcttcccgctctcttgcgcgcatgcgcacggcgccgcgttcgctctcgcgcatgcgccccaacgggatcccgcggccgtccgctctggcttgtgctgtctttcagttatcgcgtagcacattagcggacctagagctgggcacatattagcggacctagaggtgggcacgcaggccagcgccctgttagcccgccgtgttctggcctggcgttaatgacggcagcactccagctctcctgaggagtcttcctgtcgggaaatcctcccagggttgggagcagaggagagggagggggctgtagaaatggcggccccatctcccaacaacttgggcattgtgaatatcacctccttaaaggggatctcctttggtcatcccgtctagagcagccaccataacttctgagcgtttattgctagctgatatatatcagaaaaatacaaattccacaaaagcagggactggtctgcttctctccctgcagggcccaggttctggcacatagttggtgcagaaagtgtgcagcctcaggtcctatccaagcccccagggcatcacactcgggacttgttctgcatatttttacttttgcctcccactggtactagttcttccgtggaacagcctgagtcccttcagatacttaatgttttttctcaagtgctgccatgaagccagatctccaccgtcttggggcattcctttttagggatgggaagtatatgtcgctccttttatgtgatttacattctatcttggataatttggccatcaccgtagttcattcagatctgtttggatcctgcccatctcagcttcagtccatttcattcttttaaatctgatcgacagttacctccaacagcttcatcacaaatcactcacaaaaatggccttaatcctgaagtttatttacggagagcacacttgctaggtgtgtggcagatatacaggaagcacaagatgaggcagcagatctagaggcaaatgacttccttctccctgcctagtggtgactgccagcatcacgccctcccgggagaggtgagaaacccctccacgcaagcactggaaccttcacagtcaagagtggcaacagctccggttactggacttgggcctgttgaattctaatactctgtgactccacatctgggctgaatttttgctgagtatgatggaatttacatgcttcctccctagcccctacttgtctgtatagttggaatatttggttgcctcctctggagggatctagtacgtttagagtctagacgctggaactgtcaaagttcagaggaaagagctccagctgcaaagcaagagaaatgggctggaattctagcttcaccccttaatgaatgcttctgatttttttttttttttttttttttgagacgtagtctcactctatcgcccaggctggattgcagtggccacgatctcagctcactgcaacctccgcctcccagactcaagcgattctcgtgcctgagcctcctgagtagctgggattacaggcgtgcgctaccacgcccggctaatttttgtatttttagtagagacagtttttggccatgttggtcaggctggtcttgaactcatgacctcaagtgatctaccttcctcggcctccgaaagtgctgggattacaggcccgagccaccgcgcccagccgcttctgatcattaaaaaaaaattttttttttggcggggggaacgaagtgtccctctgttgctcaggctggagtgcagtgcagtgatctcggctcactgcaatctctgcctcccaggttcaagcgattttcctgcctcagcctcctgagtagctgggaatacgggtgccccccaccacacccagctaatttttgcatttttagtagcgatggggtttcgccatgttggccaaggctggtctcgaacttctggcctcaggtgatctgccttccttggcctcccaaagtgctgggattacaggcgtgagccaccgtgcctggccaaaaaatttatgttttaaaaagactagtcaagtgcagtagtgagaaggggggaaagagtagagcaaggagttatatctgttgcttctgaccattttgaacaagttacctaattctctgaggacaagctcggagaatgggagagacagttatctatttgcagggttgttgggaggaataagtgacatcatgagtgtgtgccaggtgtctgattacagaaggtgttcaattaatctgcaatcattaattaacccttcagtcgctggtattatttgccatccatcctccgagtgttgccaagttatgggtgcgttctgccagcgtcctagcagtggtaaggcttctggctgccagcggcgaacctctcccttcgagtatttctcctcttgctgagatgaaatgcgaccgggtctctttaagggccaggcgccgggatccaggcggcgcccaacggctggactagcagtcgtccgcgccgactcgcacargaaggaascccgggcctctggatccgctcgcccggctatgctgctgtggccgctgcggggctgggccgcccgggcgctgcgctgctttgggccgggaagtcgcgggagcccggcctcaggccccgggccgcggagggtgcagcgccgggcctggcctcccggtaacgcgcgtcttggtcccgcctcccaggagcccctatgcgcccacctactcccggcccctcggcttccggaacccgcccgagcccgaagcgcctcttccgaggcgcgggatttcctccccggctgcggctgggrcgggggcggccatcggccgttacccgggcgcgagaccgcagcgagcgctgggggcgctcggctttggttctgggatggagagagggcctttaaagagcaggacggacacgctctgaacattccggcccaaactcggtcccccgacccatttcctgtcccgattctttcgaccttgggggcgatggggactgggagctgccttaagccgattctgctcacactctggtgccagcgtgggggaggggggttacgcccccggcgctctcctgccctccctgggagtggggacccacacagaaacgggtcactgttacacccgggttctggtgtccgccatatggctgttgagagacgcctcagaaccacctgtgggacggatgggcagcgatgcccgccctgggcctagaggaacacctgggtcccaggcccaaaaccacgtccgccgcccactcttccccgtgcaccgcgagtggaggctgttctgcctttccacttgcttaacatccagtctgtgaagatctaaataaataacgtggaaaatgcaaagtataatgtactaagtgaaagaactcgagcacactgggggtccacgaagctgcagctgcagcccagggtggcacatcggcgagacggtggtgcgcgcctccaatctcggagggcgcccaaaatggaaaatrtttttaggccagggagtgagcataaacattagtgtttttgtggtcatgtagcaaattagggcagaggagagttatttaaaagtgagtttaaaaactgatttcctttcttttgtagataaagaacaggaaaaagagaaaaaatcagtggtaagtccctctttyatgtgtactctctaggataatttggttttttgaagaggagagagaaaaaagcagagtaaaaagcaaaaatacattccatagtaaaaagcaaaaatacaagaggatctccagggagaaggaagtctgtcaccctcctagaaggccacctctgttaccaatttcttgtrtctttccccagagtctgcacagataggagcacacaagtatttgtatccttcaggtagatttgggctgttaaagcttaagggatgattgtgaaaggatttgaaaaacgctcattgtgttgtggggaaggtcagtttcatcttgggttgggcagctcagatgtgagggaagctctgtccaccaccaccctctccccccagtgttgagactggtgggtgggcaggggatcagagagaaaccattagggtccacagatgtgggttcagttatcagggtggctttgagatgctggctctgggctggggctgtgactagtgtgaggctgaaggtcaaagaagggtcaggttggtgtccatggggatattgggtgctttagctggctggggtagggagtgatattttggtcacaaaccaaggctcaattccttaaaagaactgaaagtccctagctccagtggctgggaagggggtggcttggcaagtggtggcaggagtaccgtggctgggatctgcagagggtagacagtgcgggcaggcccccagcgtactcagggtggtggaragctcttgggaagtagtgaaaccacatagagaggattgaaatgcttgagatttgtggaagtttgttgaaattaggagaaggatatgccagcggrtgccatagaaggggagggaaatgcaaagttgagctggatggtaattaatgtatttttgtttgtttatacatttaagagacggcgtcttgctgtgttgcccaggctggcctccaactcctgggctcaagtgatcctctggcatcagcctcctgagtagctgtgatgacaagtgtgagccactgtgcctggctatttattagttattgagctagcattgatgtgagctgggcctgttctttgtgctttttgggtgtggtttgatgtgcccccagacacacaatagctagttcatagaaagtggtatggagcctgcattcaggctcaggactgtttgtaaacattcaagtcctgtgagctcctgtgtgggatgcactgggctaggacctgggcacctggcaaacagccctgacatttgggagtctgcggtctgtctgatgggggaggtytgtctgatgggggaggtytgtctgatgggggagacagcagtaactaggagaatggtggaactagaacagcagtgagtatggtggctgtgagtaggggggctgatgactgagaggagctttgggaagccttattgcctgctgggagatggagcagagtttgaggcaggagtgttggaacaggtacaagtcacagaagaatgagaacctgcaggcctgggcttgtggccagtccctagagaggtggctggggagggctgggggataggtgcagagggactgagaataggtcctaaaacccagagtcactgaagggcctcacccccacccagcacgatccgggttgcctctcagggagcgatgtggggaaccatgagtggagggcctaactgggtgagactggaaggggagagaccttaactaaactagagatggcacagagcccgcagctgagtgggaaagcagggcccaggggagttgctggttggttgactggtgttggtgggtgaggagagatgtccagagtgttaaaggtgtctgggtggatggtgcagccattacatggcacagtttacaatattagataattgagtatcacaacaaagttttttaataaaataactggacagaacttaacatccaacagggccatacctaatggctcatgcctataatcccagcacttcgggaggcaaaggtgggaggattgcttgagctcaggagtctgagaccagcctgggcaacatggcaaaatgctgtttctacaaaaaatacaaaaaattagctgggcatggtggcatgcaccagtagtcctagctactcgggaggctgaggtgggagggttgcttgagcctgggaggtcaaggctgcagtgagctgttattgcattgctgcactccatcgtgggcaacagaacgagaccctgtctcaaaaaaaaaaaaaaaatcaaatagtagggagttcaataaattgtgacaggtcttatataatggattatgtaaagccattaaaaaccatgtttttgaaaaatatttagtgacctgggaaggcactcactatgtaaaagatgaaaaaaaaaaataacaaaaccaacaaaagtatatgaagtatgatcccaaatgaaaaaaaaaactgtccttaggaaacaaacaggaaagaaatattataaacattaatgccgaaattctcagtctagttaagagatagatgtggggttaacaaggagcatgtaagagagagtttgtggtgtgatggggtaaaagtgtcttcccttagttatttgaatgttaaatgaaattcagctgggttcctttttaaaacagctttattgtaatttgcataccacaaaattcacccatttaaatgtgcaattcaatgatttttagtaaatttacagagtaaacagcactacagagtaaacaccactacaatctaattttattttattttatttttattttttattttttgagacaaggtctggctctgttgtccaggctggaggacagtggcacaatcacaacttactgcagccttgacttcctggtctcaggtgatcctcccacatcagcctcccaagtagctgggactacaggcacataccaccattcctggctaatttttgtatttgttgtagagatgggatttctacatgttgcccaggctgtgcaatctaattttataacatttccattactccaaaaagaaaccttgtgcccatttgcaatctcttctggccccaggtgaccactaatctacttcctgtctctttagggatttgtgttttctggacgttccatataaaatggaacatatagcgtgggatcttttgtatctggcttctttcacttagcacattttttttttttcttttttgagatggagtttctctctgttgcccaggctggagtgcaatggcatgatcttggctcactgcaacctccgccgccagggttcaagccattttcctgcctcagcctcccaagtagctgggattacagtcatgtgccaccacgtgcagctaatttttgtatttttagtagagtcggggtttcaccacgttagccaggctggtctcgaactcctaacctcaggtgatccgcctgtctaggcctcccaaagtgctgggattacaggcgtgagccaccgctcctggttgcttagcataatattttgacatgcatctgccttgtagcacgtattagtatgtcattttttcctatagctgaatagtattcatggcgtggctgtagtgcactttgtttatccacttgccagttgttagacgtttgggcaagtttcttttgactgcagatttctcagggtctttgataagacaggatatttggattctccctgtggaggctttggcacccaagccagtttgcctctggaaccctgggttctaattaaacatccaaatgacaatgattgctgagatttacgagtgatttttattttcttcttttagggattgtgtaataaggtttgatcagagaaatccaactgataaatacatatatgcatattcataaacatatacatatattcatgcatacatacattcttgtgtgtgagaatgtatttctttttttttttttttttgaagacagggtctcactctgtcacccagactggagtgcagtggtgtgatctcggctcaccacaacctccacctctcagctcccaagctcaagcgattctcttgcatcagcctccccagtagctgggattacaggcatccgccaccacgcctggctaatttttgtatttttagtagagacggggtttcaccatgttggccaggctggtcttgatctcctgacctcaaatgatcccctgcctcggcctcccaaaatgctgggattacaggcgtgagccactgcgcctggccactgagaatgtatttcttagcacaagaatgcttaatttccatttttaggaaagattaaatattgttacttataatagggatagatggctcatcacagtttcagttataatcatggaaaattggactcaagggctcatagcagaggaaaatggagataaattgtagcgtaatcacagagtgttgggccaggccggccatgtgctcccacagcatggggaccatctccttttcacagtttcctgttgctttcctccacacactcatgagctctttggccgttgcaacgaggccctgagtacacagtgcctggcacagcataggccttcaataaacagttgaaacgtgctcaaagatgaggactgtatagaaaataatatttggcatgaaatatgctcatatgtcatggggtttatctcttagtattgggattatgggtgatagtttctcctttttgattttctgtattttcttcaatgggcatgcacttctcttataatatttttagacatcactttaaaaagaaatgtaaagactccctttgcttgcttcctgttcccccttccatttcaggggaactttgtgagattcttcstgcgttgcctgctgtaaaccggagggcagattggctgagctcattcagggcctgacattcaccagctcttcaggatttcatgctggggataggaacaagtttctgggagaagggcttatctgaacaacctgttaaaatgcttcaatgaacaggaaagaaaaaagactgtagagtgatgtctaggttgagctctttttatatatctaggaagaggaaaagttttctttaaagagcaataaaaaaattaaatccattagtgccctaatggggtcttttcatgcccttttgttcattcccttgggttcattttgtagtttggggctctaaaggagtgggctgggagggacccaggatgggagagtggccttgtgtctcctggatacccgttaggatcaaggcaggaggaaccttctccgccagctgacagagttctagttgctggggagactttagtggggtcgggtgagacggcccactgtgacctggtgtttatgtgaggtgtgactgaggctccatcaggagtcgtgagaaggggcctggatgtgaattctaattctgattcttccctagccaagtctggcacttgggtaagttacctgtgttgcccaggtttctctgggtgcttccagcctgagtgcaaaggaacaggcctctgtgcagcaggtcgggcccctctctgtgtgtgcccctggaggatgtctaatgtgttctcaggggacagtttgtcttatgtattggagctgcccgttccctgtggccatctgctggagccagagccactgggcctatgtcatcagcagtgcctggctgagcagagcttggtcagaatcactgggctacaggttcaagggctccagcctagagtctgatttagggtctggatgctacctggtgccacctcatgtttaaccagctcctctggtgcatctgaagcaggcatctgtggactagacagggagaagctctgctccagcctcgtggttcccatccttgcctgcacattgaaatcgcctggagagctttaaaagttactgaggcttggccgggtgcagtggctcacgcctgtaatcccagcactttgggaggctgaggcgggtggatcacctgaggtcgggagtttgagaccagcctggcctacatggtgaaaccatgtctctactaaaaatacaaaaaattagccgggtgtggtggtgggcacctgtaatcccagctactcgggaggctgaggcaggagaatggcttgaacccaggaggtggaggttgcagtgagctgagatcacgccactgtgctccagcctgggcaacaagagtgaaactctgtctcaaagaaaaaaaaagttactgagtcttgagtctcactcccagagattgtggtgtaattggtctgggctgtggcatccctgtagagatttttaaaaggtcccaggtggtcctagcgtatagccagagctgagaaccgctgcctggaataccttctctccctaagatgagttacttctaggatgctccttggtctttggtataggtagacccagaaggctgtttctggcccctcccactagtgccatgaccccctttccctcccasgtgcagtcattgtgagcagagtctaggttcaagctgtccttgctttattgtcttctacaagcctcatttttgttttctgtgaaaaatgttaggacttacccttctcaggtttcagtgaggttacatgtgataatggtgtgttacctgtctcagggcttggcctgtgacaaggtgcttaacaaagtccttgctctttttttcttctcccctttcctaatggtttccagtcagtgaccaagtgctttttttttctgtaaagcagtgaattcgattctagataacatatatgtgtttcctagcctcaaagccattgattaagctctcgttaaggaggcaggacacttaggcctaaaatctaatagtctgtggggttgaactaaggaagggcagagctgggctgggcagacaagctgtgtatggtttaggagttgacgtaaaggaggatctggtctggggggaccacatgagcctgccactcagggaggatcggcttatctgttattactaacaatgggaccttgccagtttcccgaggagggattttggtttacatgtgaaagtcttggactgaaccaattatgctggttacatgagccctttccgtagccattattccctgacattcccctgggtgyttgagttctggctctaatatgcattcgtcttttgccagatctgtgtcgagggcaatattgcaagtgggaagacgacatgcctggaattcttctccaacgcgacagacgtcgaggtacagcctctatgctaggtttgaaggaagcggagaaagcttgatgggataatttatagagggtgtggactaaccttgtccaataggactataatttgagccacaagtgcaagccacaggtgtaatttaacatttctaatatcctcattaaaaaaacaaaaggggccggtgcagtggctcaagcctgtaatcctagcactttgggaggcggaagcaggtggattgcttgagcccaggagttccagaccagcctgggccacatggcgagaccccatctctacaaaaatatgccaggcatggtggtacgtgcctgtagctccagctacttgggaggctgaggtgggaggattgcttaagcccaggaggtggaggttgcagtgagctgagatcacgccattgcattgcatcctgagcagcaggagtgaaaccctgtctcaaaaaaagaaaaaaacccacaaaaaataaaaaggayattttatttcacataacatatgccaaatgtgatcatgtcaacatttaatcaatataaaaatcatcaatgagctattttgcattctatcttgttatactaagtctttggaatatgatactggttgagcatcccttatctgaaatgcttgagaccagaagtgttttagatttcagaatttttcagattttggaatatttgcataaatgtaatgagatatcttgaggatgggacccaagccaaaacacgaaattcatttatgtttcatatatacatagcctgaaggtaattttatacaatattttaaataattttgtgaatgaaacaagtttgtgttaagtatttatgtgtggaatttttcatttgaagtgtcatatcggtttccagaaagttttggagtttggagcatttaggattttggatttttcaattagggatgctcaaactgtttgtatttgtaaaataagtgtaacttatagcatatcttaatttggactastcatatttcaaggtcttaatagttgcctgtggctcatggccactgtattggacagtgcaagtgttgactgcctcaaagtctggttaggaaaagagtctacatgggtaagaagaaaggacaggctattgagcagggctagaagtgtgacatctgagatagcaatgtctgagcagtgggtattactatgcataggcaattaatttaatttctagttcatttaaagcctagtcactaaaactaacctcagagatgtttaagaatcatctctacactaagacattgacctgtcttccttgttctagattttagtggtataatcttctctattgatggctctcttttgttactacagaagctacaatttctatacttttatagtcattttctttccttcttcccttcctttcctgtttttacttctgctagaaatatatgcatggccaggtgtggtggctgatgcctgtaatcccakcactttaggaggctgaagggggaggatcacctgagcccagtagtttaagagtagcctggccaacatgacaaaaccacatgtctacaaaaaatacaaaacttagctggatgtggtggcacatgcctgtagtcccagctgctcaagaggctgaggtgggaggattatttaagcccaggaggttgaggctgtggtgagccaggactgtgccgttgaactccaacctgggtgacagagtgaggccctgtctcaaaaaaaaaaaaaaaaagaaaaaagaaagaaagaaaagaaatatatatagtttgataaaaataataataaacattatatagcccttgtcctgctgtgttcatgtgctgctgtgcaggaaagagttaacatagcagacctaagactgctgccctttagaaatgcctgcttgcaagggtggtctttggctggcatctgggaacttagatcttgggagggcccccaccattcctaactgataacagtggctctctgcttaaattgtttctgcaaacagtatggtttatgctgacacctgctttcttcctgggagtccggaattttggtacatgtcaggaagtggttgtctgcatggctgagcgctgatgaaaaccctgaactcccaggttcaggccagcttgcctgctagacaacatttcacatgtattgtcacatcttgttgcctggggaattcagtgtgtactgtgcagctcctctatgagaggacccttggaagcttgtgcctggtttcctccagactttgcacctgccctttttccctttgctgatccttttttctttttcttccttttttttttttttttttttttctgagatggagtcttgctctgtcacccaggctggagtgcagtggcatgatctcggctcactgcaacctccgcctcctgggttcaagcaattctcctgcttcagcctcccaagtagctgggattacaagcacccaccaccatgcccagctaatttttttgtatttttagtagagatggggtttcaccatgttggccaggctggtttcaaactcctgacctcaagtgatccacccacctcagcctcccaaagtgctgggattacaggcgtgagccaccgtgcccggtcccctttgctgatcttgttttgtgtcctttyggtgtaatccatcttagctgtgagtatgactgcgtgttgtgtcctgtgagttctcatgaatcatcaaacctggggaggagggggggcttggggactcttgacccctgtcctgagtgatatgactcttaatggcactttagaagtgcttatagtctcactgaagaccttggacccgattaacaacgatagttaacatccagtgagtatactgctatttgcccaacactgtgttgagggttcatcataaatactaaatgatctcaccctcacaagaatagtccctctgaagtaggtaccatttttaccacagttttagatgaggaaaccatggcctaatgaggttaagtggcttgtccagggtygctaggccagtgtatgatacagccagatcccagcccggatacagccagatcccagcccaggctgtctggttccaggggccacacccttgtttgattctgtggtacgaagagctttgttggctttaggaagaccactctcccttcagatctgagctccgtgtcccctgaccttcccagcgaggttatgcttcctgacagaggatcccctggccgctctgtacctctcttttataccacttcttggggtttgaaaacatgttggcttctgtgattacctgagtaatgtctgcttcccctggtaggcttaaggttctgtgaaggcagaggctgggctggttttgctattgttgtgtcctcagtgcctagcatggatatctggcacacagtgggcactcaataaatgtttgttgggtgacagtgctatggatggagcacccctgagctgggtcggggagcaaggctgcctgtgacccagactctggtgggcctgtgtggtgctgtgtatgctacttaggggctaggaagaagacctagaagaaggagagggggtttgagaggggcaggggaagggcatatttgaactggattttgaagggtatacaggagttttccatgtgatgaaagttgatgtgaagtggaatggggtgggaatgctggtcagaagaaacaacgtaagcaaagacacagagtatcttgcttgagggtggatcacttgaggtcaggagtgaagggtggggggtgattacttttcttttctttttagagacggagtcttgctctgtcacccaggctggagtgcagtagcgcgatcttggctcactgcaacctttgcctcctgggttcaagtgattctcctgcctcagcctcccgagtatctgggattacaggcatgcaccactacatccggctaatttttgtatttttagtagagatggggtttcaccatgttggccaggctggacttgaactcctgacctcaagtgatctgcctgccttggcctcccaaagtgctgggattacaggtgtgagccactgcacccagccagggtggctacttttcaagagttccatgcattgcctgccattggtcttttgtcacctatggccccttctcacatgtactctgaaagttcccagatggatcctggcactctgaagatcttggccccaagaacaccatttaaatcttttctagcacacacctgcatacccagaaaggctctagcagagtctggggttgtcccagatttgtgtgtctagaccacagatggaggctctagaaatgcccagcagagatcctgatatgtgtctgaaaacacacaggatgttggagagattggcagtcatcctaaaaggtacaaacaggaccagagggaaagaatgcctccaaaccagtgagacagggavcgtactaaagaaacagggactatcagcagccagtgcacccagtgcagtgatcagaggcaggaaacggaggcaggtggcctgccaaggcctagccctgtccagtgtccctcctggcttctcccacccacctgccagcttgatgtggtaggcaggcaggggtgggatagaatacacagaagagggatggacagagccagctctgaccttggggaggctaccagggcaatagagaggtaggatgtacctatgcttggcacattgggtaacatggatagagttattctcaggacatttctggaagtaatgtgaggaagccgtgtctagatagagttgtgacctcacgggggttgtcagctattttggcctaccttgggcacccaaatttggatagtctttttctctctttttcccttctctcctcactttcccctcaacacttacacacttttacagggttcagcacagagaaacagtagctctgatgttttctttccttccaggtgttaacggagcctgtgtccaagtggagaaatgtccgtggccacaatcctctggtgagtgggttgttggttgcatgaacccccggcttccccttaagcacctgagaatgatggtgcctctgcytgagccctgcctgcccaggcattctctgcgctcttaactgagttggagaagaccagggagggacaagcagaaaatggtggcatgttggtgttctgaggtcaaggatctctgaggcctgagtggctgtgcacagagcctagggacttcccgtcagctatcccatactattcccagtggccgaccttagccactaggggtgtccatttcttgttgctcattccagccttcccctcccctagaagaaacctatcagaacccgggacttctcaggcctaacccccccaggacctatctctaagtaaccaggatccttggtggacccctgacttgggtttgcaaacttggccctgtctggtaacaggggccacctctggcttacctggaagccaccagcctgctttcccaagggtgaacctagcaacaggggctgtagtgtgctgtgtcccttccttcaccttccccaattcgaggttctgctctggttgcttgaaagagatggatagaatctgggtcctgcaagagagagctttagaagaggatgttggttctgagctcccatcccatgaggtagggatgattagtctcatttttcagcttaggaaattgcacttatataagttgcctgaggtcacacagctagtaaatggacttggaagcctgtgctgccctgtgattttttttttttttttttgagatggagtctcagtctgtccmtaggctggagtgcagtggcgcgatctcggctcactgcaacctctgtctcccaggttcaagcgattctcctgcctcactctcctgactagctgggactacaggtgcgcacgaccatgcccagctaatttttgtgtttttagtagagacagggttttaccatgttggccaggatggtctccatctcctgaccctcatgagccacccacctcagcctcccaaagtgctgggattacgggcgtgagccactgtgcccggccatgccctctgatttttagcaacacaattggcatctcctgtgtggttcattagactctgagttctactaggagcagggactgtatctactttgttcattgttatttgctaaaaccaaggcacactgcctagcacttagtaggggcttgtgcattcatccattcattcaaccaatattcagtgcatgtcagccatgtggcagacactgttctggatgatatggcagtgataaattcaaagcccttgctctcctgcccctaatattccagtgtggggaggcagaagtcaaacatataatctggcgggtggtgatagggcctaggaagaaaactaaagcaggtgaaaggatgtttcttaaataaggcaaaacctctcagtctttcaataaagaatcctaaagagacatgagaagaatttcttctctgtgcattcgggagaagatggaataccagtcatcttctttggatataacaaagaaacctctgtaacattcwtattctctagaagccaaggaggaacccaggcttagttattaagtaagacagctagagttgcaggtgttagggatcataagtgacgtttcacgggacagaatcacagcctcagaagtcttagtgtccttggtacagatagccttttcaatgrgagtttcctaataaaaaatacaatagaagtagccatttttatataagtttccactctagaccaaaagaaagatcgatacttttgtgaaaaatctcaattcatcactttatctgaattggttttctgatgcagaaaggtgactgtttctgcggccatcaggcaagagggagtgtttctcctagcctttatgagattttctctcaactgcagtcagaggagtctgcagttctcaatgaagaacactggagtttcattagtttgcaccaagagaaaaatgaaaagcaaaaatgaggaaaaggccgggtgtggtggctcatgcctgtaatcccagcactttgggaggccaagatcagaggatcacttaaagccaggagtttgagacaaccctggtcaacataatgagacctccatctctaaaagaaataaaagtaaataaaattaatttaaaaatgaggaaaggagcagaacaggtttcttagcaagtatgctggagcatgaagtgttttgcttctagaagggatggagagtgattgagtaggtgggttggcttctgttttacatgagataaccagggaatgtgtctatgataaggtgcttaaacatgagggtgtgagcactgcagatatctggatgaagagtgtttaggcagaaggcgctgcagaggcaaaggccctgagatgggaccatgcttggcatgtttgaggaatgctaagtaagctcatgtggttggaagccaaccaggccagagggagatgggtaggagatgagagaaagccttgtgggccatgataagggtttggatttcattctgcatgcaatgggaagccactggaaggttctgagcaggggagtggcaagaactgatttaggtttcacagactcactcttgtggctggatagagaacagactacagagggctcaaagaccattcactgaacgacttgaacgcatgttccttggtgattttattttattttttgaatttccaaagaaaagtaatttattttttgcagttagggcagctgagaagtccrgggttgaaggggtgcatctgctgagggctttcttgctagtggggactcttcagagtccccaggtggtacagggtgtcacatggtgagggagttgagcatgctaggtcaggtctctctcccttttctcataaagccaccagtgtaagataacccattaatctattaatccgtgaatagattaatccattcaagagggctctgtactcatgatccaatctttttttttttttttttttttgagacagagtctcactctgtcgcccaggctggagtgcagtggcgcgatctcggctcactgcaagctccgcctcctgggttcgcgccattctcctgcctcagcctcccgagtagctgggactacaggcgcccaccaccacacctggctaattttttgtattttttagtagagacaggatttcaccgtgttagccaggatggtctccatctcctgacctcgtgatccgcgcacctcggcctcccagagtgctgggattacagacgtgagccaccatgcccggccgatccagtcatttcttaaaggcaccacctgctacatactgccacatgggggattaagtttccaacacatgaaatttaggggattcattcaaaccaaagtattatttgttaaagatgatcttaaagagcttaacttctttaaaaattttaaacttatttatttatttatttattttggagatagggtcttgctatatcacccaagctggagtgcagtggcacaattatagctcactgtaacctttaactcctgggctcaagtgatcctcctgccttgggctcccaaagtgctgggattataggcatgagccactgcacctggctctcttttctttatgctagaaacattcaaattattctcttatagctttttttttttttttttttttttgagatggagtctcgctctgtcacccaggctggagtacagtggcatgatctgcctggccagcatggtgaaaccccgtctctactaaaaatacaaaaaaatttagctgggtgtggtggtgcatgcctgtgatcctagctacttgggaggctgaggcaggagaatcgcttgaacccagaaggtagaggttgcggtgagctgagatcatgccactgcacttcagtctgggtgacagagcaagactctgtttaaaaaaaaaaaaaagatttttatcaaaaagacaggtgataggtgtggagaaaggggaaccctcatacatagttggtgggaatgtaaattagtacagctactatagagaacagttatgaagtcaggcagtgtgatgcctccaactttgttttttttgctcaggattgctttggctatttggggtcttttgtggtttcatatcaattttaggattttttttttccctatttttgcaaagactgtcataggtattttgatagagattacattgaatctgtaaattgctttgggtagtattgtcattttaatagtattagttcttctgatccatgagtgttgaatatctctttttttgtgtgtgttctgttcaatttctttcatcagtgttttatagttttccttgtatagatctttcacttctttggttaaatagattcctaggtattttacttttattaattaattaattaatttattttttttttcgagacagggtctcactctgtcatccaggctggagtacagtggtacgatctcggcccactgcagcctctgcctcctgggttcaagcgattctcatgtctcagcctctagagtagctaggaccacaggtgcgtgccaccacacccagctaattttttgtatttttaatagagacaggatttcgtcatgttggccaggctggtcttgaactcctggccttgagtgatctgcctgcctcaacctcccaaagtgctgggattacaggcatgagycactgtgcctggctggtattttatattctttgtagcatcgcaaatgggattcctttcttgatttctttctcaggttgttcactgttggtgtatatacatgctactgatttttatatgttgatttgtatcctgtggtattactgagttcgttcatcagttctaacagttgtttggtggagtctttaaggttttttttttttttttttggtcatttcaacttttattttacttttagcggggtacatgtgcaggtttgttacctgggtatatttcatgatgctgaggtttagggtatgatggatcccatcacctaggtactgagcatagtacccaataggtactttttcaacctttgccccctcccttcctccccactctaggagtccccagtgtctattgttgccatctttatgtccatgagtacccattgtacccacttataaatatccacttaaagtgagaacatgcagtatttggttttctgttcctgcattaattagcttaggataatggcctgagtctttaagcttttctaagtgtaagatcatgttgtccgtgaacaaggttaagatgacttcttcctttccaatttggatgcccttcatttctttgtctggcctaattcctccggtccctcggagactttccataggctcctattatagctgttaccatactgtcctataattgtttcagtgtctgcctttgtccaccctgctgtcagagccctgtgatcatgctgggttyatctccagccccaaccctgcctgtgtaggtttcttgagctgtccttcagtgccttgtgagaccagggtcctcctgcagatgycactttkatggaaagtgctgtgttttcccttctgcagggcctgatgtaccacgatgcctctcgctggggtcttacgctacagacttatgtgcagctcaccatgctggacaggmatactcgtcctcaggtaggtttcagatgctcagtttcagccttcttaaacgttttcttcagacttggggtatgtgattgccaggaagggaaactttacaaggaagccaggctaggccttcagtgctgtgcaggcctctctgtgtggggccaaggtctctggcttctgtggttctcttctgacctgcctctagtgcccccacctgcaaacctcagccagccaggtggtgcccctgccaccawtctgagctcacatctttatgacctgaccactgctgggcttaatgccgtttaactcagttcttctcaaagtgtggtccctggaccagcagcggaagcatcacctggaaacttgttagaaatgcacattttcagctgggtgtggtggatcccacctgtaatcccagcactttgggaggctgaggcatgcggatcacctgaggtcaggagttcaagaccagcctggccaacatggtgaaaccccatctctactaaaaaatacaaaaattagtctggcgtggtggtatgtgtgtgcctataatcccagccacttgggaggctgaggcaggagaatggcttgaacccaggaggcggaggttgcagtgagctgagatcataccactgcactccagcctgggtgacagagtgagactctgtctcaaaaaaaaaaaaaaagaaagaaatgcaaattttctagtcacatcccagacctgctgaattagaaattctagggatgaggcccagcaatctgtgttttatcaagccctccaggtgactcgaatgcatgctttgtttgttttcatatttgagaaccacttatttaaccttcatggggtctggctcttagttcaaattcttgagacaaagaatctgattggttcagctttggtcaggtgtccagccctggttcaatcaggtgttggggacaggaccccaaggcacaaacatggctgcttaggcctattccatcagtgaggatgcatctagagacagagtctcttagaagaaagggggctgtggaggtcctgatcagcacctatgtttcaaagctgtaagcacaacctatgatgccagctttaaggctctgcatgaaggagacagactgtccctacagccagttaacactggcacagctgctgggctggacagttcggtcccagtctgggtacctgcagcaatagctaccattcttctgtaagtctgtcttttaaaattgaaagatgtgagtgggccgtttttggtgaataagaatttccatctccccaaatatctgtctaaattgcacaaatccacaaatcgaaagatctgaggttagtgcattttgcctttgctaatttgcttttcctgagcaggcactcaattgcaaacctaagttgtatctaatgatatttgaataggaagggatataaatgcactcctctatttaaggaaatctacctcaggaggcagagagagatggacagaccaggaaagatgagcagaaggagaccagagggatgaatggggagctaggaagtaaggaaagagaggatggaagaatggaaaggaagatggatgggcagaggatggatggacagagggacagcagggagagggaggaagtgcctgggttatggctttgaatctgccttggatttgttggcccaggtcccatgggtgctgtgggccatggccaagtgagagtagtgttagtgtgcctggcatcaagggtcagggcgcctcttgcttcccagaggaacgctggacaaagggcaaggtcgtctgcagagggtttgagcatcctggcagaaaggggcactgtcaggctgtcttcctccctcttgggcatcgttcttaccagtttccttgggcagagcccccagaacgtcacccccaacccgaccctcttggggctgtacctcatgcatgtggtccctctgcttaagcaaactcaccctatttaggtccgtggtagtcaccacatgttgcctcaagtggacagctttggatggtttctccagggcttgaccgtgttctagttgagactcacctgccatcaaagaggcagctgctgatgagccctcagcctcggcattgctgggccatgcatgcagctttggggtgtggggcaggtcagggtggaagggggacacagcctgagcctggtggcagatgtggcttctcctcccggcaggggagtgaggaggtcctcctgcttcactctctctgcmgccttgattctcatattcagcaaagtccccaggcagggggagtaacagacatttctcaaggcctcctggctgtctccttttcccctgagttagtgattctctttttgttttcctttaggtgtcatctgtacggttgatggagaggtcgattcacagcgcaagatacatttttgtagaaaacctgtatagaaggtactgtagtttgaatagttgataatttattaaaccactaatttttcaaaatgaaatagaaacttgtttattcgattgacagatatggagtacccgctgttgtatcagttatccattgccatagcaatgyggtgtaacaaacagccacgaatcctcatggcagacagctatctgcattcattgcccagtcagccagggtggtcaccaggcagctctgcttaccttggctaggctcaatgagatgtctggggatcagccgatgtaggatagcctaagcaagggtgactggaggtggctcatctcttttcctcttgcctgtcactctccttctgggaccagcaaaccagcccaggtgtccacttctcacggtgacaaagggtagaagcaacagcagagatgcaaggacatatttttcaggcctctgctccaagtttgctagcattccattggccaaagcagatcacatggtcacatgagcccagggtggaaaggtgggagggtccagtgagttacacagcatggtacaaggctaaagggaagggtggagagttgggcgagtcagacgcacagtgtgcgtcgcatttgttgtgtttttcrctaaaagcttccctcatgagagcagactstgtgatgtatacctagttaggggcttctggtggcctgtcagtgccaagggctcaggcatggggccctccatccctgtgctcagagactgccgatttctaggggtcttggaaatgggttgcagaccccacctgtccctgccgcgagcttgggatactgctgtccttccctcgcagagctgttcggatgtcaacgctggaggcccttcctcccactctcatctgcagctgtcttcctaaatgccaccctgtctcccagccctccccgaccacsctgtctagatagggcaagctccttgttagtctttgtttcgtttttggttttggtttttgttttttgaggcagggtctggctctatcacccaagctggagtacgggggcacgatctcagctcactgcaacctccgtctctcaggctcaagccatcgtcctgcctcagcctcccgagtagctgggactacaggcacacaccaccacacctggctattttttttgtatttttagtagaggcaggatttcgtcatattgcccaggttggtcttgaactcctgggctcaagtgatcctcctgccttggcctcccaaagtgctgggattataggtgtgagccactgtgcctggtccccttgttattcttaaggactactttctgttagttttctttgtagtatttaaggcaatcatatgaaattgtttaaccaattatgacctacaaaaatggcagttttgtgtggttcaacttagtatgtgtctaattgtttattgccacccacccccccggaccataagctcctaagggcaggcaccaagtttgttgtccttgcctagggtggacccagcacagagcaggctcctcgttgatacctgttagctattgttggatgaggggacctgtggctgtgctttggtctccagcccaacttgttccccaggctctggtcccccactgttttgcacctttcatttgaggggccactaaaaaggcttctcctaggagccctgagctgccatggatcatgcctttgagcctgtgtcaccccccaaaatgagagcctctgccccaaatccacccagagcatcagagcaatgctgtgggctcaggggctggcagccaaggtgagtcctggccgtggctttgccccctggcctcagacttttcttgtgggctgcagcttgccctctgagcaggtggcattcctgaccttacggccccattttcacctgacaacctgggtttccaggtgyccactgctaggtttatccagccctctgcggtcctcagctcctgctccttagcacctcagccagagggaggacaggcaggacagaggagagcgagagcagaagggagcctctgttatgtttgtgtactgctctgattagaactgtaacccgaggcggaggttgcaatgagccgagattgcgccactgcactccagcctgggcaacagagcgagactccgtctcaaaaaaagaactgtagcctgaggaacagatcttggcagtggggtgggattacctatgaacctcgcagagtggggctgtgtctgtcttttaatcacattcagcttggcctgttctgtgtggggtcagtggctcttgttgctttttttatttttgagatgggcttgtgctctgtcacccagactgtagtgcagtgccatgatcatggctcactgcggcctcgatgtcctgggctcaagagatcctcctacctcagcctcctgaatagctggacctacagcacatgtcaccacttctggctaatttatttcttattttttgtagagacagggtctccctgtgttgcccaggctggtctcaaactcctgggctcaagcgatcctcctgcctcagcttcccaaagtactgggattacaggcatgagcctgattacagctctgctcggcctcgtggctctttttgaagcaagwaatctggaatggaatgaccagaggttaaggggagaggatagagtgtggcatttggtgggcctgggttctatcctggctctgaagtttgctctgtttgtgagcaagaccaagtttctaaatttctctgagcccatctctcatctctgattcctcttgtccatctctgaagagcctttggacctgccacctccttcgtgtcttaggacccttttgtgggtccttgcccaccttggtctttattaaatttgtgagttccccaatcctacccccaaacctgtaggccacccagcgctaggtagatttccccaggagccatttgtctttgtttggccggtcacagttcctgctgatggccatgggctttggtaactcacgcccatggtcctgcatcaccacatttctgatgcgtcagttctgtatctcccaatctctgtggttacggcattggtctagatgacatgggccttgcctggagctgttctgtgggtagtttaggaagagaatgtagcttttaatttttttagctcttttcctgtcctgatgactttatatttatgtctctccctggccctcccagaatgcatggcctctgtggttaggatttctgtgggacaatgaaccacagaagaaacttacagtgtcctttctgttcttgggatctaattgttttaagttcatatggctttcggggggctcagattcccctgaagaccttgttggggccttgagatccatcactgggatctcttgaagccaaaggctctcagtgggcatgtggcctcgggcactccagaggctactgggagcactgtggctgcctggagggccaggctatctaccatggtctccagagagatgagaaaaggcggtgttcctcagaccctttcatcggattcctctgaaggcagaggaaagctccccacagcactgcttcctcatcctcccagaccctgtggtccaaagcagccacctgccaacaacccagaagtttcttggagtctcctattttaacctagaattcattgggattttgcattttcctccataatatgttcttaagtttgtatctaaaaataataatttacataacttatcattgaggacaatggatgttcctgtattaaacaccatgctttgcatgtggcttggagttcccactccctcagccacataccccagagtccctaagtccaggaggcagagaaccaaggggtagcggcattcaaaacaccttcccagggcaagtgattcacttgtgaactgcacctgcttatgtgttccctggaaacgggggcatctgctctcatggttaaggaacagggcagggacccatggacaggagctgcatttactgtctggttgttgaccctattgggcagataaggaactgagaaaggattacaaagccagtgctccttcctgatcgggcaggaactaaccacaggaggggaaggtgttccgaaccctgctgtgtgggggcaagcagcaaatgaggaagtggcaggaggcatctagatttctctcatcaaggccaaaggcttcagggcccactgggttccccaaagctgagaatcctgaggtactagcccaagggggagactctgcctctttccagacaggctttaccctaagcttctcccacaaccacctgtgcatcttgtttacaggcagattccacttcagtagcactgaggtggggcctgagaggccacatttctagcaggtgcccaggtgggaccatactcctactggtcggggatcacactttgaggaatacgggcctcagaagaaggtggcagggccgggtgtagtggcttatacttgtaatcccagcactttgggaggcagaaggggaaggatcacttgaagccaggagttcgagaccagcctgggcaacaaagtaagactcccatctctacaaaaaatttaaaaaattagctgggcctggtggtgcacatctgtagtcccagctacttaggaggctgaggcaggaggattacttgagcccaggaggtcagggctgcagtgagctatgagcataccactgcactccagcccaagtgacacagtgggactttgtctcaaaaaataaaaataaaaaaagctggtagccaggtggtccacagggcgccctccatcccaatgccacgacccttttcccctggagttctgacggtaaggtgggcttccttggggcttcactggacctttgggggtcataagaacaagagcctcggcctgagggttgtctttgggaccatggtgaaaagttctgcgcagtgcaggatttcctgtttcctgcacctggcctgtggtttcttaatttcacatttgttgcttcatatttgggttgctgggggctgtgttgtgttatctttgtttttaaggtttctggacttattcctaggccaagaatcaggcagccatagggcaaagtaaaaagtatttttagccagagccacagaagggataaagggaaggaagactagagcttggccactctccggacaactccagctgccctcgatggagcggtcatccacaacgaagtattactgagaaagtagatgtggggtttttttgttttttgttttttgtttttttgattttgagacagaatcttgctctgttgctcaggctggatcactcaggcgatctcagctcactgcaacctctgcttcccagattcaagcaattctcctgcctcagcctcccgagtagctgggattacaggcgcccaccaccacgcctggctcatttttgtatttttagtagagacagggttttaccatgttggccaggccggtctcgaactcctgacctcaagtgatctgcctgcctcagcctcccaaagtgttgggattataggcgtgagccaccatgcctggccaaagtagatgtttttagaggtttcggctccttcaaaatgcagattactgtcattgtcactacctatgcaaaatgtagcatagaactgactttggctgggtcctttgcccatacctagaataaggtgtcttggttcccacctgcagggagttcagccaggtactgggaaccacacggtggcatgtggggcrtcagctcctgcctgggagctcgtgtttcctcatttcctgggatgctctaggaaaaggcttcccaaaatgccatgatggggagcccttcacaaggtgggagggcacattaccattgccccttcagtgcttgggttgatctttttctccctctcagaagctcttgcaaccttggttcaggatctgtgggggcctagacagaaggctatatggcaggctcaggtccccagaaaagcccacatattggaatcctgcatctcctcgaagtaaaatttcttgaagggtgttcttgctctttgggctgtgaacaaatgaagagctcgccagggaaaagacccacctcttctggcactgtctaccctggcgaggttggggtgtgcagaatgtaactgcagttatgccaccagggattcgagagggctgtgttaattgctggagaggaagattccagttacacagtatccttaaagacgggaacttctttttcttttttttgagacrgagttttgctgttattgcccaggctggagtgcagtggtgcaatctcggctcactgcagcctccacctcccgggttcaagcgattctcctgcctcagcctcccgagtagctgggattagtcatgtgccacaacgcccggctaattttgtatttttagtatagatggggtttctccatggtggtcaggctagtctcgaactcccgacctcaggtgatctgcctgcctcagcctgccaaagtgctgggattacaggcgttagccattgcgtctggccaaagacaggaacgtgtaaggggcaggcagctggctggcatgaaaagctgaaggtggtgagcaagattcatgtagctaaagaggccacacaggtgactgtgtgggccgagtaatgggaagcaaaggttttacaagattgcctggtcgtccttttctaagaacagaagtgagggcgtggagtgggacccagctcgggaagtggcatgctgactcacctgtggcttgtggttggggacactgagtaagacctggtgtttggaaccacaggctgggcctcctcccctgctgattggcccaggggcttaagttcttcccagctcctgtctagactgaaacctcctggtgtgggtcatgcgcctaagagctgtggccttcctggagctcaggctagagagacactggacttgatccgagtcagctgacagactggggtgggcgggtggtgcaatggagagcatttgggtttgggggtagggagagccaggcttggacccctgctcagacagagttggccttcacttctctgatcctcaggtttcttctataaactgggactgaagccagcctcacaaggtcttgtgaaaacaaaaggaaataacgtatacaagggagctcttccattccattccgcacagactggggggctctcttggcctcagggaaggatgcaagaaattgtactgatgtaacagcaggattcatgtggatcaagaccttggttttgcccccttggggtcagggcargggtgagacccccatgcccactgttgagttgtgtgcttggatttgccaagcttggatttgcttggtattgctctccgtgcattctgtagaaataaaggcagtggcttgtcttgtcggtggtgtggggagccccatgcttgagacagacacaggaggagctgggcagagttcctaggaggaaatacagttagagcagcgcccactgtgccccatgtccctcggagtcatggagatcaggcttctgtttcctcactcagctcagacactggtcattcagtcctcctggatcccccagcctcttctggcacatggttctagtcatggaagggttttcaataggtctggcctactgaccctgcccatgggaggccacccgaccaaggaccccttccaagagcattgggaagggagaggctgcccctcagtctgcaccaaccctgtgggggaagccttttgtttggctgtgatgggggtgggagtgggaggcccctgtgactacctggagccgattcccaggggagctgtggcaggggcagagccaccggagtctgtcagtcccagagtcccccacaggtgtgaccccctccccatgtctccatgtgcagacccccgtgtactgtgactgttttgcagtggtggttggtttggttttagttaacactgcttcatttgttctgagctgtggttcagttccatgatcatatctgtgggcaccctcccagctctgggattggacagagtctccctcgagctgtgcagacgcatgaggtactccggtggctagtccagccttggacacttgggagactgtcccatgggcagctcagcttctccccagttgctgctaactggccccacccctttggtgccacctcttctgtgccctcaagccatgagtttgctggagtaggcgagaagctaatcagcagcttcctcattgcacatcctcattttcttagagtcaattttgttctcagtcttctttttccagaaaaggaaaataagagatagtggtttggtttcttgaacatcaaatattcggagctgaactaactgaaacccaactcagggtagcctgaacaatgaggtgtcatcaactcccaacagatggcttatttggtgcctctggcctggtttctctacattttgctactgtgcatcctgttcgtgtcctcatgcagttctctcagggtgacaatgtagtcgtggcagcattgggcttctcactcgctggttggagtaagggcaggtgtcttgctagtggctcttccctaagcgtgcggaagtatcttttctgtaagtccctgcaaacctccctcacgcctgcctaatccaaattgggcccctggctgggggaggccctgcactgattgacttagcttggcttcctgaacgcattgctggaactaggggagacgacttcctttagaccgattgtgcctaccctaaagcttggaagcttggggtggggtgaggtttccctgaagcccttgggtctgtggatggaccctgaataaagaatgggctacttttaaggaggtaagcggagaggaggcagggaggcagcctgtggacacaaagttgtcacctgaacttgtagtgcctgagttttgttgcctgggagtcccctctgcaatgctgtaggatttccttcccactcctccagcctcccacgcagcttctccaggttttctgggagtcctggccgtcccacaggttggtctgccctggcctctgtrctgcagtctgctcaggccccgctgctgttctccgtccactctcccgctcctctgtcaaatactcttctcttctgaggacatgggggtggtctcagagactaggggagaatgtccctctccagttggtgccatgccttgctgttagggccccaagacagggctacttgtgcccttggcctcccagagtgcctgcctcactcttccagcctcttacttccttccatgctcatcccctcgtgggactggagtcagcccctccctgccccctccccactgagagcctcccattgcacatggctcaggtacggccactcccccatggccagtcttgccgaacccagctctgagcgggacccacatggagccactagtggaatggaggatgttaaagggagaattcctctgctaggcctgtgagggttgtctgcctgctgatgggcttgtgccctccagctgtgtccattcctgctctctctttcctgttcatttcctcccagggcacaggaaacccacaggaataccaggaatagatgccagatttctccttcaccctggctcgttcttccttcccactttcttgcctttttttctttcttttaaagttaacatttaaaatgtgtagtaggccgggcgcagtggctcatgcctgtaatcccagcactttgggaggccgaggcgggtggatcatttgaggtcaggagttcgagaccagcctggccaacatagtgaaaccccgtgtctactaaaaatacaaaaattagccaggcatggtggcgcacacctgtagtcccagctactcaggaggctgaggcaggagaatcgcttgaacctaggaggcggagattgctgtgagctgagatcacgccactgcactccagcctgggcgacagagtgaaactctgtcttaaaaaaataaaaaatagaccatcctggctaacacggtgaaaccctgtctctactaaaaatacaaaaaattagcccggcgtggtggcgggtgcctgtagtcccagctactcgggaggctgaggcaggagaatggcgtgaacctggggggcggagcttgcagtgagccaagatcacactactgcactccagcctgggcgacagagcgacactacgtctcaaaaaataaaaaaaaaaaataaataaaaactaaaatatgtagtaatgctccccaactcccactgctgatttgagaagtaatgtgttgttaaaatttggaaaatacaaaaaggtataaagaaaaaaagaaaagtctcatgtagtcctgcagcttgagaaaagcactttttacattttgatatttttctttcccacctttccaagatgcattggtgaatacttttggaaatgtggttgggatatacacagttttagatcctgttgctttcactgaacattagatttgaaatttttccatgccattaaatattattttacaatatcatccttcagttactgcgtgaattttctgttatatagatttaccaagatttagttttttattggtttaaacagtgccgcggtgagcatcatgattattttcacaaaataaatttttttgttttgtttgagtcaggggtctcactctgttgcccaggctggagtgcagtggcatgatcatgacccactacagccttaaacccctgggctcaagtgatccacctgcctcagtttcccgagtagctaggaccataggcatgcgccaccacccctagttaatttttttgtagtttttgtagagatgggggtctttccatgttgcccaggcagatcttgaacttctggcctcaagtgatcctcccacctcaccctcccaaagtgctgggattacaggcataagccaccaccctggtccacaaaataaatttctagaagtgaaattggtttgctgattcattgcctaacctgagcactgtctctgttctcagggtacaagctttaaagtccctttctctgcttagagttccaatcccaagtgaattctcccatcactccgtgccatggcccttgcagcattgtgccataagccgctcccaggcagcaggaggtcgggaatgcttagggtccttgtcactgcatgtccagtattgcacggatcacactgtgccctggtacccttggtgactcctttcattgagagccgtctcaagatccttttgggggaattgcatagcccagaagttttctcttaggtgaataagcccttacaactctcattgcagtgggaagatgccagaagtggactatgtagttctgtcggaatggtttgactggatcttgaggaacatggacgtgtctgttgatttgataggtgagatgcacccctcccacctccctctcttgtctctctcctgggtcccttgaggatgtgcttggctgggccccaacccttgggggcagtgggtgaggcacttgcccttggcagttccttccccatgggagttcagctttctccctgagggcagacagaattcgggacttctggtctctcatggagaagaaccctggcctttgttctttaaacttccctccctggctcagctactttcagacccaaatccactgtgatctgatgggtttttctagtttgcaaaggaacaggaaggacagagcctgaacattcactgagacctgctgggtgtgaggcctgttttgagctctgtctatgaacagaatcccattcagcctcaaaacgaccccacggggccgctgacactgaaagagaatgaaagtcgaggcggagggtcagtggtcaagccaagagctggccctccctgcttcctgctcgagctgtgcagaccttcctcccgcctttgcctgtgtgmctgctttgcttccaagccatgagcagagtcctgagagccrcgtattcttttaacctcagtttaccttcggaccaatcctgagacttgttaccagaggttaaagaagagatgcagggaagaggagaaggtcattccgctggtaagaggcctctttgacttggttaaagacaaactgggaaaccacctctgtccaacccggcttcctctcccggccccacccccatgagatcattgtgcccttgtttgcagagagagaacaggaaccaagtgtatcagagggtgaactctgacttcctgtttggccagagacccacgtggatgtccagatctgcttggcttcctgtggtcgctgactcacagtttggcaaccctcctgcttggaggcgttcccctcccctccccacctgcccctccccatcttggcagcaccagggcttgtctgttctgcctcctgaagattgcctggccttgtgctctctgtgtcctccctagaatgcgagttccaggagggcaggacccagccctcttgttcactgctgcatccctagtgcttagcacagtgcccggcacggaggcggtgctcatgcttagtggtgtttgcccactggagagatgccatgcccttctgagttctgctcaggccacactgactctcatggggactctgccagtataggcccgggctgtgcatctcgccctggcccttccctccttgcatctcccttcaaaatctggcctccaggctgccgcccggctgatatttccaatactcatcaccactcgtgcaatttcccagcccagaacctttcagtgccttgctgctggctagaatgcagtccccactttgtaatacggcttatgacccggccccaactgcctctctggcgttatcatcctccattccctactttctatgctctggctataaggaactagttgtggccacacacaaacaaccacatacacagtggagttatgcaaatgtgcctttgcacagtcgtttcctttgtctttaaagtgttactcagatgtcacctcctccaggaagccacccctgaccttccttccattgtaaccccccccaaacccaccccctggctttctgtgatcatgggccttaggacagcatactgacactatttgtttatacctttgttccccatccctcactaatgtgagctttttaagattgggtcttattccctccgtgtcctctgcatgtgccttggggcctggtgcctagtagttgctcagttagtattgaactgaatgtcccatgtgagaagctgccactggagggagacagaggctgggcaagcattcagtggggtgtcaggggctctgagctcaggataggctggactgggggccctgggaagcctatccaactcctgaaatcctgctcagccttgtttttccttggtgccagcacgatgcattcctgccacgagggcccaggcgtcactctgggcagctcctttgaaatcttggagacaagaatgctaggaagatggaatgtggtggaatggggccaggctggaccatgctgtgatgcgcacagcagctctgtgcagtgacccagatgctccccaagcctgggggccgtccaagccgtgatccaagccattgtcttaagggtttgaccaggtccatgggacacatctggctcctattgccaagggagagctgggcaggagatgtaaaggctgctgcagagttgacacgcgagcctctgggatggcgagtggaatctgtgtgaggagccatcccactctgtgcctgggagagcacgagtatctgctctgcctggcatgcaggccccatggctcaggagggcctgtgccccttttcccttgggctccgctgcatcaggctttctgcagttggtggtctttatagtctggagggtctataggttacgagttgttgagggggtagaagggcaatgggtgagggtcacagtcctcttggtggcaagacagagcggagggtttagaggctgcccagggctgggcccctgcctgaaggaactgaggccctgctgctgcaaaagtggcagtaaatgggagaagccaggtgtgggtcctgcctttttttttttttttagtatttattgatcattcttgggtgtttctcggagagggggatttggcagggtcataggacaatagtggagggaaggtcagcagataaacatgtgaacaaaggtctctggttttcctaggcagagggccctgccgccttccgcagtgtttgtgtccctgggtacttgagattagggaatggtgatgactcttaatgagtatgctaccttcaagcatctgtttaacaaagcacatcttgcatcgcccttaatccatttaacccttagtggacacagcacacgtttcagagagcacggggttgggggtaaggttatagactaacagcatcccaaggcagaagaatttttcttagtacagaacaaaatggagtctcctatgtctacttctttctacacagacacagtaacaatctgatctttcttttccccacatttcccccttttctattagacaaaaccgccatcgtcatcatggcccgttctcaatgagctattgggtacacctcccagacggggtggtggccgggcagaggggctcctcacttcccagactgagcggccgggcagaggggtcctcacatcctagacgatgggcggccaggcagagacactcctcacttcctagacggggtggcagccgggcagaggctgcaatctcggcactttgggaggccaaggcaggcggctgggaggtggaggttgtagcgagccgagatcacgccactgcactccagcctgggcaacattgagcactgagtgaaccagactccgtctgcaatcccggcacctcgggaggccgaggctggcggatcactcgcggttaggagctggagaccagcccggccaacacagcgaaaccccgtctccaccaaaaaatacgaaaaccagtcaggcatggcggtgcgcgcctgcaatcccaggcacttggcaggctgaggcaggagaatcaggcagggaggttgcagtgagtcgagttggcggcagtacagtccagcctcggctgggcatcagagggaaaccgtgcaaaggggagagggagagggggagggggagggggtcctgccttttgccttggctttgattcaggcgccaggggaagggccagtgtttgtgcccacgaacccccagtggagcagagcagggtggctggtgacacttgtgctgttttgctcagcctggccaccgagtgtgtggctgcgtctgccgctgtccacttgagccaggtttgctcttgcagggttcctttgtctgagtcactgcccatggtcattgactactttgaccccctctgcttgasacccttggtrggtggggtctgctctgtccactcccgacagactgcttgtgtttccctggcaggaatacctggaagcaawtcaccatctccatgaggagtggctcatcaaaggcagccttttccccatggcagcccctgttctggtaagtaagactcccttacagggtacragactgttctagaaagaggagtgacccggggaatgtcagccaccttgcagacaggggagggcacagtcctttagagtttgacaacttagaagaaggaaggtgggaaggctggtgctctctctcccagtgcctgtttctgggctgagtctcagagtgagttggccagacccgagggaaggcagtctgtgccagtgccatcacacctggcagttgtcactgatccagcatcttcagcgaagactctagacccgggtctcagttttcaccatttgggatagtagttcctctgatgtgaccttcctccttccgtggatgacacagagcctcatttcacckttgtttggtgactcaggtcatcagaaggaatgtcattgtctggtctgggctgtcacacagtgatgcccttaggaatgctgaggtgtgtggaactgtctgccctgcccactaatgtctctgcgttcctgtgtttactttttacagtaatcctcctttctcttgctgccatgtgtcatttctgactgatattgatgtgtctgtcccgtcagcatttccttacttccccatctccttgttttccagtttgctgtttccagatttctttactcagacaaataagcagtggcccagatgctcccaagaaatgcggagtctggggtccctccgagtcttgattggagggaacctaagatggttacatatacaacatgggattggctgtgaggcagggttgtgcgcaagctttggtgcatggctataggagcattgtttgatgggatgtgaggcagggctgtgcatgagcttttgtgcgtggccataggaatatctgtttgggctcaaacacttctgcttatggctcttgcaggcagtgaggttgccggaaagtgagatattactgtagtaattttttgtttgtttgtttttgagacagagcctcactctgttgcccagactggaatgcagtgacgcaatctcggctcgctgcaacctctgcctcctgggttcaaatgattctcttgcctcagcctcctgaatagctgggactacaggcgcatgccaccatgcctggataattttttatatttttcgtagagatgggattttgccacgttggccaagctggtctcaaactcctggcctcaagtgatctgcctgcctcggcctcccaaaattctgggatcacaggcgtgagccactgcacccggcctactgtagtagatttttaaataagtacagcttatttttctccctcattatggaaaaaaaggagggtagaaagtgatgagggaaaaaaacaaatcattcatgagcttacagggtctcactgtgttgcccaggctggtctcaaactcctgggctcgtgtaatcttcaggtctcagcctcccaaagtgcttggataatagacatgagccaccatacctagctcttgtagtacattcttaagtgaaaacctcattggaaatgtagattgccctagagctgaaagcgatttggctctaaccttcctttttatctgcctgcaaccttctgtgcccttccctgccccctgctgcctgcttccatctgtctgtctccagctrtgaaaggaggatgctgctgaggtcagtgcagccttgtgacccatgtrtctaatttccaggtgattgaggctgaccaccacatggagaggatgttagaactctttgaacaaaatcgggatcgaatattaactccagagaatcggaagcattgcccataggaggcaaaaggtctatggctcatgtctgaaaaatgcctgctgctgccaagttagctattgggagcaatctggaaaaacttgctcccaggagggctttgtgtctggccagcttgattttcctaatggtctcatctcctttgctagtgtctttgtcatgcgtctctggccctcgtgggtaaatgacaaacgggaccaatgggtttgccaagccctttgctgttcgcagcctcacattcccccggtgcctctcccatggctttgtgctgctgagtcgctctcatgaagcccttagggagagcacctgttgtgtgcctgacaccacgctggagctgtgtaccaatcgtctcagccttcattaggaggccgaggtaggagtcttatatcccaggtgaggaatttgaagctcagaaaggttgaggggctccccagaggtcacacagcctgtgtgcagtggagctggcaccattcagactttcagccgactcagcaactttcccttgccctgggctgcctcctcctgagagctgttccccaccgccctgcctcttccggttggaggctctcatgtctctttggggagagctggcagtgtgcggagctgataacattttcccaatattgagcagttcccaaggacagtcagcatttctagacttccacaaaattatgctgcatttggctggagcccggtgttcagtggtttccctgcccgaggtcgctgcagccccatctaccacatcttcatgtggacattgagattcacaygctggctcctgaagggtgctcagtctccttggtgattaaggtcctgcttgaactgctgccaactccatgtcagggaagtcgcttttggtgcctggctggtttgcccagagccaagctggggcaaggggcagccagccctggcttccaaggctcccgtactgtctgtgtccttgtataaggagctttgctcttggaattactgaaagtctgtggcccaagagagagacacaagtggccttaagtctttttgaagtgttatttcatccagggaaatgcctcgagccatagagcctgaaatcatctttgttggctcagaaaataccttagcttcactcagctggactgcattgaaggcgaggctgccccttggatcaagcagaaaacaagagaaagaaagaacgttccctttggggatagtctggaaagttgggatttgcaaataaaggctctggaagcattgctggtcctgaagctttggaggtgggcagagagagcttcaagaagactagatgcaaaccctggaaaggattaaggctcaactctggagaaacaggccacagcctctcagagcagctgttggctgtaaatagaggtagcaaggccgctcccaggcccctgtgagtgtgggcacctgtgcatgcaatgctccgactctgcagaggtgccaagtgcccctgctgggccagtcccagagagttaggaagtcaaggcctgcaactcctggttcttcctgtttggaccagttcttgtgccattggcaggatgagaggcagcagccaggcgggagctgtgtctagcagcacctgtagcccacgtgctgctaattagctggaaaactggcgaaggcagaacctttgctaccaggaatcttgacatgtggggtctgtctttgagaatttgtaaatgaacagtccaatatttcctctcggctcattttgcacatccatttttggggaaatgtgatttctctctctttttttttttttttttttgcctaaggcacaatctcaagaggtcctgagaccacgtacccatgatttttttcttgctctgtgatacccaataactccttcacctaagccctgttgttgattttgaagtgcttcctaggccagtgattttagcttctgccagctgcttttgccagtagattaacgtgtttttatttttcaaactccgtgtttcctaacgtggagtgtatgggtctaagagagcctgctgtcctccctgccttccaccttggagaggaggctggacgcatcagcagtggccagggcaggtcgcaaaatctcccagcctagagaccacacctgaaacggctgaagccagcttgcacaagggctgctgtccctctgcggcaggcagagctggtgggggcaggggtcacagagcagtcatagacaccatggaccagggcaggagaagggcagatggcacatgggcacaacagggccttgtccttagagcactggggggtcatggctgggaggggcatggcaggggctggcatccctgtagagccagaggggccacccagggcagtgacattccagatatgttgggctcacctcatccttgctgtgagactggagttccatggggacatgaagtcagtacaccgcagagctgctcagctgctctacctctcgctgacttttttgttgcacatatacattttctttcaattagcatttatttcagcttttatttaagctttttgacagtacatgtaaaatatatgattataaccatttaaaaataccttatgtacctggttttttttggaaactagatagaaatatatttatcttttacataaaagaagtgtgtagtggggtggtccagggctttgtggtggcttagtggccatcggggtcccaggctcttcccacctttctcttttgggtccacctcttggctcctggcttccttcctctggggcctgactgtccaggatggcagctggagctcctgctctgggcacggttggcatcagagcccactgctccccatccactctttaatccagatgctggtaatgtccctttccaaggcataactaagataagctggaaggttcttacgaggctttgctagaggccctgggaggtggggggaaaggcaagagggcagtgcccacccatagaccgggtcacatgacctggcatcagcgccgtggggtcctttgggcttcacctccctctcccctctgcccccacgtcatcccaccctcatcctcaccctcaccattcccatcccgtaccgtaatgtcccttgcaaggcctaactctgtgaggaatgaaaccacctcatccttgttccaataacatgagtgaccgaatttacaaacgagtgaatgtggacctctggaaacattacccagcttgtttttacttttcactttctctttctgcccctttcatttccgtaggagccctttacctagatgagaagtgtccccccgcctggggaatatatcagtcagaacaatcttcctgcagacatgcaccattagacccgagtgacggtggtgccatttaaacctcagagcaggtaaaaggtggtcctgaaacctgtctacccacagggtgctatggaatctgaatcacttcttttttcctagagccctggggtggggagctccctcaagtgttcacatgtgtgtggaatgaggaacacccatctccttggccctctccaccctgaagagttagttattaaaataattggcaagctcttgcaaatgtcagtcatccattgttcagaatggaatagcaataatacatccctggctgccctgggcttggccaggattactcactgaaggcctcagggttactggcacacactttcttttcctaataatcccatcccctcagctttcctaaggctagagtgaatttcgtgttcctttagtttacataagatggtgaacttggcaaaagctatcattaaacagaagctaagagaaagcctatgtcgtggaatccagaatgggtattgccattcactgctgtccacagaagctgtcttgaatttctttctgtgtcttttctttttttttctttaagactgttgtttaccagactgggctctgtggaacacaggtgtcctgggagatggttaatcattacaaaatattggtaacaatctaaagatgcatacataagagagtggtcaaataaaccattttccattcacatggtggagtactgtgcagctatacagaagaatgaggaagatctctctgaatggttatgaagtaatgtctaggacataaagttatgtgaaaaatgcaatgcccaaacgagtgtctatagtatgctaccctttatattagaaagaagagaggccaggcgtggtagctcacgcctgtaatcccagcactttgggaggtgggtggatcacctgaggtcaggagttcaagaccagcctgcaacatgggggaaccccatctctaccaaaaatacaaaaaagttagccaggcgtggtggtgggcacctgtaatcccaactatttgagaggctgaggcaagagaatcacttgaacccaggagttggaggctgcagtgagccgagactgcgccattgcactccagtctgggcagcaagaatgaaactccatctcgaaaaataaaaagaaaaccgatagaagaaaatacacagatgcaaaggaaatataggaaggacgcccagagacaaaataggttggtgggtaaaggctagaaagaagggaaggatgagactgggctacagggatgagaagggaatgacacttctttgaaatatctttttattttatttatttatttttttgagacagggtctcgccctgtcacccaggctggagtgcagtggtgtgatcttggctcactgcaagctccacctcccaggctcaagtgattctcgtgcctcagcctcctgagtagctgggattacaggtgtgtgccactacgcctggctaatagtagagacagggtttccccagtttggcctggctgctctcaagtgatatgcccaccttggtctcccaaagtactgggattagtgaaccgctgcacccagcctgaaatgtctttttctataactgactgttacatactgtgatgtagcaatgtttcacatacccttcacatactgccaaaataaataagagcaaccaggatgtagggaaaacagaaaacaaaattacagatgaactccaccataccgcaggtgagtaacataaccatactgaagggggcaggaaagaacagaactaacaaataactgtggaaaacagtatctttactggatatggtaagagtaaaggcaaaaatttctgtacataaaagttgtagtatagttattaaaaatgtttctcgaccatgcgtggtggctcacacctgtaatcccagcactttgggaggccaggatgggcggatcacctgaggtcaggagttagagaccagcctggccaacatggtgaaaccctgtctctactaaaaatacaaaaattagccgggcgtggtggtgcacgcctgtaatcccagctatgtcggaaggctgagaattgcttgaacccaggaggcagaggttgcaatgggcaaaaaaaaatgtttctcacaggagtataggttagtgattctgaaactatgtatactaaagttgaacaaacaagtaaatagattgtagactatgagggctggatttcttactgttagtgaaagaggttacaaatgataggggtctagaataaaccccgtggtgctgggttagaataggaggtgtcagtctaaactcatgattttaaaattttaggctctggtggctcactcttgtaatcccagcactttgggaggccaaggcaggtgaatagcttgagcccaggagttagagatcagcctgggcaatgtggcaaaaccccatctctacaaaaaatacaaaaattagccaggtgtgatggtgtgcgcctgtagtcccagctacttgggacgctgagatgtgagaatagatcgagtccaggggttcaaggctgaagagagctgtgattgtaccactgcactccagcctgggtaacaaaggaagaccctgtctctaaataaataataaataaaattatatatagatggatacagaaatatagatgtgtgtgtgtgtgtgtgtgtgtgtttatgtgtgcttagtatacatacttatgtttcctagctctgtcctgagtgtgtctagaggcaatggcacccagtaacagtgagcacacccggtacccagttcttggtctccaaacatcattctcctgcaaaaggaaccaggtctcctaggagatgtggttgattccagggatgccacaggggaatgacaggatgaccctggaatatcttgtggtgctagaaagaaagtgcagggatgtggggggatgatggagccatgtcaagggaattgaggagcttgcctgaagttcctaacggccaaagctggaacagtttgaggaacaaaataaattatgttagtattggattctaacacatagactaaaataaatatccacgaatccatgctgatataaacagttgaagaaataagtaaacagggaagaaagggagtgcttccttatggtagatttccagttaatacacacaaaaggcaagagggaaacagagacttgccattacataaacaccacagttaaaaaatcacaggccaggtgcggtggctcacgcctgtaatcccagcactttgggaggccgaggcaggcggatcacaaggtcaggagatcgaaaccatcctggctaacacggtgaaaccctgtctctactaaaaatacaaaaaattagctgggcatggtggcgggcgcctgtagtcccagctactctggaggctgaggcaggaaaatggcgtgaacacaggaggcggagcttgcagtcagccgagatcgtgccactgcactccagcctaggtgacagagggagactccgtctagggaaaaaaaaaaaaaaaaaaaaaaaaaaaaaatatatatatatatatatataaaatcacagacaagatttacctgttgatactaaaattagtggacagaagtttgaggaaaaacaagatttgcatagtttctatttcccctaatatacttatcaagtaaaaagggaaagaaattaactaatttgacagtggagatggaaaccccatagaaaccagcttaataagtgattaaggtaataagacgtagtgacatcatgaagcctttacaaagatgcactgaggacagcatcttttttttttttttttttttttttgagacagggtctcactctgtcacccaggctggaatgcagtggcgcaatcacagctcactgcagcctcgacctcctgggctcaggtgatcctcctcagcttcccggggagctgggactacaggtgtgtgccaccaggctggctaatttttttttttttttttttttttttttgagacggagtctcgctctgtcacccagg

SEQ ID NO: 93381 - DNA, 13487 bp, Homo sapiens
gctaatttttttatttttagtagagacagggtttcaccatgttggccaggatggtctcaatctcttgacctcgtgatccgcccaccttggcctcccaaagtgctgggattacagatgtgagccacctcaccaggctgggtttcctttgaattatcatacagtcatgctgacctcttttggtatatagttctatgaattttacttgtacagatgcttgtaaccaccttgacaattaagattctgaacagttccatcactcccaaaaaactcgctagttgttattccctgtggccacaccttcctccatccctaaaccctgagaagcactaatctgttctcatcaccattgttttgtcttttctagaatgttacgaaaatggaatcatgcagcatgtaaacttctcagtctgacttcttctatccataatgttatgtatatcaaaacagttcattccttttgatgactgagcagtattccatgaatggatggacagtttgtttatccattcgcccaatttctattgcttacagttttcggtgattatgaataaagctgcttaaacattctcacataagtccaggcatgatgactcacgcctgtaatcctagcacttggggaggccgaggtgggagggtcacttgaggccaggagtttgagaccagcctgggcaacacagcaagacacccccttcccccatctctacaaaaaatttaaaaatttgctgagtgtgttggtgtggatctgtagtctcagctactcaggaggctgaggtgggaggattgcttgagctcacgagttcaggactgcagtgagccatgatcacaccactgcactccagcctggatgactgagcaagaccctgactcaaaaaaaaaaaaaaaaaaaacaattcttgtacaggtttttgtgtgaatataagtttttttctttatttctctagggtaaataactagaagtgtgaatgctgggtcattgtgatttgaatttgcgcactcatccagtggctaatgatgttgagcatcgttctttcttctttttctttcttttttttttttttttttggaaacagtgtctcactctgttgcccaggctgaagtgcaatggtgtgatctcggctcactgcaacctccaccttccgggctcaagcaatgctcttgcctcagcctcctgggtggctgggattacaggcgccaccacacctagctactttttgtattttttgtagagattgagtatagccattttgcccagactggtctggaactcctgagttcaagcgatcagctcgctcgcctcggcctcccaaagttctggggttacaggcataagccaccatgcctggccaatgtctctcacgtgctttatattctgcacatttgtatattctttttggtgaagtgtctgctcattttaaaatttgttggttgaaagaggggttgtggaggttaaccccctcccaaacaaaattatttgtttattttcttactgttgagtttttagagtttttttctttttcttttcatttttagagaagatctcactgtgtcgctcaggctggagtgaagcggtgtgaccacagctcactgcagcctcaccctcctgagttcaagggatcctcccatttcagtgtcctaagtagttagaagaggtcttgtttttgtttgttttgtttgtttttttttttgagacagaggctctgtcatccaggctggagagcagtgtcatgatcttggttcactgcaacctcagcctccagggtagctgggattacagctgtgcgccaccacccctggctaatctttgttttgttttgtttcagtagagacagggtttcgtcatgttggccaggctggttttgaacccctggcctccagtagtgatccacacatcttgaactcccaaagtgctaggattacaggcgtgagccaccgtgccaggcctgggagagtttttaaaatatattctggatacaagtcttttgtcaaatatgtgatttgtaaatattgtctctcagcctgtaacttgtcttttcattctcctaatggtgtcttttgcagagcaaaagcctttaatgttgatgaagtccaattgatcaatttttattcttttgtggatcctgcttttagtgttttttgttgttgttgtttgtttgtttgtttgtttgtttgttttttgagacggaggctcactctgtcacccaggctggagtgcagtggtacgatctcggttcaacctccacctcccgggggttcaagcaattctcctgcttcagcctcctgagtagctgggattagaggcgcccaccatcacacccggctaatttttgtatttttaggagatacagggtttttaccatgttggccaggctggtcttgaactcctgacctcaggcgaaccacccgccttggcctcccaaagtactgggattacaggcgtgagccactgtgcccagaatttttttttttttcttgagacagagtctcggtctgtcgcccaggctggagtacagtggtgtgatctcagctcactgcaacatccgcctcctgggttcaagtgattctcctgcctcagcctcctgagtagctaggattccaggcgcccgccaccacacctggctaatttttgtatttttagtagagacagggtttcaccaagttgaccaggctggtctcaaactcctgacctcaggagatccacctgccatggcctcccaaagtgctaggattagaggcatgagccacagcacccggcctagtgtcacgtttaaggactctttaaccccagatcacaaagattttctcctatgtattcctccagatgttgtatagttttaggccttacatttagatctccttccttccttccttccttccctccctccattccttccttccttctttccttccttttttttggacagggtctcacaattttgcccaggctggtctcaaacacttggttctagcagtcctccagacttggcctcccaaagtgctgggattacagatgtgagtcatgcatattttgtatatggatgtctgcttgttcaagcacgatttgttgcaaagactatcctttctccattgaattgcttttgcacctttgtcaaaaatcaattggctggccaggcacggtggctcacgcctgtaatccgagcactttgggaggccaaggcaggcggatcacgaggtcaggagattgagaccatcctggctaacacagtgaaacctcgtctctactaaaaatacaaaaaattagccaggcgtggtggcaggcgcctgtagtcccagcaactcgggaggctgaggcaggagaatggcgtgaacctgggaggcagagcttgcagtgagccgagattgtgccactgcactccagcctgggcgacagagcgagactccatctcaaaaaaaaaaaaaaaaaatcaattgtccatacttatgtgggtctatttctggactctctattctgtttcatcgatctatgtgtccattcctctgacaatacaataccatcctgttgctatatagcaaatcctaaaaccaggtagcgtaattcctccaactttattcttctttttcaaaattgttgtagctattctttgcctttccatataagttttacgattaatttgtttttatatatacaaattcctgctggcatttttattagaattgtgttaaatctacagatcagcgttatggtttgaattgtgtctcccaaaaaggtatgttgggcctggcacagtggctcatccctgtaatcccagcactttgggaggccaaggtgggaggatcacttgagtccagaagtttgagatcagtctgggaaatatagtgaggccccatatctacaaaaaatttaaaagattagtggccaggcgtggtggctcatgcctgtaatcccagcactttggaaggccgaggcaggtggatcatctgaggtcaggagtttgaaaccatcctggccaacatgatgaaaccccgtctctactaaaaatacaaaaaattagccgggcgtggtggcacatgcctgtaatcccagctgctcaggaggctgaggcaggagagtcacttgaacctgggaggcagagcttccagtgagctgagatcacgccactgcactccagcctgggtgacaagagtgaaactccatttaaaaaaaaaaaattggccggtcacggtggttcacacctataatcccagcactttgggaggccaaggcaggcggatcacaaggtcaagagatcgagaccatcctggccaaccaacatggtgaaaccctgtctctaccaaaaatacaaaaattagctgggcatggtggcgcacgcctgtagtcctagctacttgggaggctgaggaaggagaattgcttgaacccaggaggtggaggttgcagtgagcccagatcgcgccactgcactctagcccaggtgacagagggagactccatctcaaaaaaataaacaaaataaataaataaataaattggtcgggcgtggtggctcatgcctgtaatcccagcactttgggaggctgaggcaggtggatcatgaggtcaggagatcgataccaccctggttaatatggcaaaaccccatctctactaaaaatacaaaaaaaaaaaaattagctgggtgtggtggcaggagcctgtagtcccgtcgactcgggaggctgaggcaggagaacggcgtgaacccgggaggcggagcttgtagtgagcctagatcaagccactgcactccagcctgggggacagagtgagactccgtctcaaaaataaataaataaatwaatwaattaattaattaattttaaaaaaagattaaccaggtgtggtggcccacatctgtggtcccagctactcaggaggctgaggcaggggattgcttaagcctgggaggtcaaggctgcagtggacggaactgtatttgcgccactgtactccagcctgggtgacagatggagatcttgtctcaagaaaggaaaaaaaaaaaaagatatgttgaagccctaaccctcaacaccttgaaatatgacctcagttggaaatagacacattgtagatgtagttaagataaggtcagcccttaatccaatatgtttgatattcttataggaggagaagagacacagagacacagagagaacgccaggtgacaactgaggcagaagttagagtgcttctgtcacaagccaaggaacaccagtgactgcaggcaagccaccagaagctggaaagatgctgaaaagaatcctcccctggaggcttaagagaaagcaccgccctgcccacatcttaatttcagacttctggcttccagaaccgtgagacaataaatttctattgttttcagccacttagtttgtggcactttgttatgacagccctaggaaactaaattcaattagtttggggagaaataacatctttactatgttgagtcttccagtccacgaacatagtatgtttctccatttgtgtagatctttgatttctttcatcagcatttttttgtagttttcagcatagacatcctgcatatattatgttagaacatcctgtgtatgttgtgtaggtttagttatacccaaatatttccttttttgtttctttctttttagagctattataaatagtattgtgttcttaatttcagcttctaattactcattgctaacatataggaacacaattgaatttcatgtgttgatcttatattctgtggccacgagaaactcagttattacttctaggagttctataataggtgtccagcattcctaatggcatttactctgaaaaaattatattcattgctataaaatattccatcatctggccggacacagtagctcacgcctgtaatcccagcactttgggaggccgaggcaggtagatcacatgaggtcagcagttggagaccagcatggccaacatgatgaaaccccatctccactaaaaatataaaaactagagagagtggggacgtccggcttcagagcgggagtcttcgttgcgccagcgactaaaaagagaattaaatatgggtgatgttgagaaaggcaagaagatttttattatgaagcgttcccagtgccacattgttgaaaagggaggcaagcataagactgggccaaatctccatggtctcttcgggyggaagacaggtcaggcccctggacactcttacayagccaccattaagaacaaagacatcatctggggagaggatacactgatggagtatttggagaatcccaagaagtacatccctggaacaaaaatgatctttgtcggcattaagaaggaagaggctgggcacggtggctcacgcctgtaatccgagcactttgggaggctgaggcagacagatcacgaagtcaggagatcgagaccatcctggctaacacggttaaatcccgtctctactaaaaatataaaaaattagccgggcgtggtggcaggtgcctgtagtcccagctactctggaggctgaggcaggagaatggcgtgaacccgggaggtggagcttgcagtgagccgagatcgygccactgcactccagcctgggtgacagagcgagactccatctcaaaaaaaaaaaaacaaaaaaaaaaaaaaaagaggaagaaagggcagacttgatagcttatctcaaaaaagctactaatgagtaataattggccactgccttatttattacaaaacagaaatgtctcatgacttttttatgtgtaccatcctttaatagatctcatacaccagaattcagatcatgaatgactgacagaatattttgttgggcagtcctgatttaaaactaagactggcttgtggttaaatgaatatgttcagtttttgattttaatagtaactccaattcagtaaatgctatcactgtttaccccttctaaagatatgattagacttcgttagtaatgttcaacttttcacaaagatggtgagtgccatcttaaaacttactggagattggttttatatttagatttctataactggttatgtgaatatatttaaatactggggaaattcctacactgtcttagaaccaagcaagattcacctgtgttttgtgttcatttgcctcttaaaggcaagggttgaagataagtaagggagcaatgtctatagttttggccttaactataacaatctaattataattccctgtatttaaaatggttccttttacttattgaaaggcattttagtgtggtttatgtgtaatattaaagattattcaacacctctcacatcttatagatctataagrtcacatgcttttaaaatagtagcaagttaaacttcactcttgaattctttacaatctaagtcaaactaggttataatttaggattgtctttaaacagccattcagaaacataaaactgtagaactgtgtatttgtgattgggaatggtgcttttgccaacttaaaaggattaaagtaatggagatatacacaaattttaaaattatgtgtgattacaagactaaagataattaaaaagaaaaccacacacacacacacacacacacacacaaaaactagccaggtgcagtggtgcgcacctgtaatcccagttactcaggaggctgaggcaggagaatggcttgaacctgggaggtggaggttgcagtgaactgagatcgaaccactgcacgccagtcggggtgactgagtgagattctgtcccccccaaaaaaaaatccatcatctttcactctttttcttttctttttttttcctgagatggagtctcgctctgtcgcccatgctggagtgcagtggtgcaatctcagctcactgcaacctctgcctcccgggttcaagtgattctccttcctcagtctcccgaggagctgggactacaggcgcctgccaccacacccggttaatttttgtatttttagtagagacagggtttcaccatattggccagtctggtcttgaattcctgaccttgtgatccacctgcctcggcctcccaaagtgctgggattacatgcgtgagccaccgcacccgacctctttttttttttttttttttttgagacagagtctggctctgtcgtccaggctagagggcagtggctccatctcagctcactgcaacctccgcctcccgggttcaagcgattctcctgcgtcagcctcccaaataactgggactacaggcgcacaccaccatgcccagctaattcttgtatttttagtagagacacggtttcactatgttggccaggctggtccccaactcctaaccttgtgatccgcctgccttggcctcccaaagtgttgggattacaggtgtgagccacctcgcctggccgttcactcttaatatgttttaccaattgcctcctgttgggcatttatgttgttttcttttattgctgttattattattactataatgatggaatacatttcagatgctgggacataaacctttgacccctttttaaattatgtcagaggagagattcctagaaatgggattagcaggccgaaaagctgaactcttctcaagtcctacacacgattgagctgcttgtcagaaagatcaagcatgtttcccattctcatcagcaacatgtgagaggactcagtgggctgaaacacagccagcactgagactggtcatttaaaaactctgccaattgggccgtgtgtggtggcctacacctgtgaccccaacactttgggaggcccaggcgattggattacttgaggtcaggaattcgagaccagcctggtcaacatggtgaaaccccgtctctacttaaaaaatacaaaaattagacgggtgtggtggcacttgcctgtaattccagctactcaggaggctaaggcaggagaatcacttgaacctggaaggcagaggttgcgcgtctaaatgactaataacccgtacctgcttcacagactcaccgtgatgatttaaagatttatgggggccacaaacagtggctcgcagaagtaatcccagtactttggaaggctaaggtgagaggatcgcttgaggccaggagtttggcaggagacccaggtcaacccataacagacagcattacaaacaatgaaggatggcttgaggtcaggagttcgagaccagcctgggcaacacagtgagacccctgtctctacaaaaaatttaaaaacaagcaggcggatcacttgaggtcgggagttcgagaccagcctgaccaacatggagaaaccccatctctactaaaaaatataaaataagccaggcgtggtggcgcaggcttctaatcccagctactcgggaggctgaggcaggagaatcacttgaacctgggaggcagaggttgcggtgacccaagatcacgccattgcactccagcctgggcaacaagagtgaaactccgtctcaaaaaaaaaaaaaaatttaaaaattagccaggcctggtggtgtgcacctgtagtcccagctacctgggaggctgaggtgggaggatgctttgagcctaggagttcgaggttccagtgaggttccatcatgccactgcgctccagcctgggcaagagagcaaacccttgtctcaaaaaacaaaaagagcttttttaggctgtgcatcattcccctcatgattatcatttttgcccacacccctattcttgaagaagcaggatgatgatggtaagagctgtgatttattgagcacttaatggatgctaagtcctgtgctgcctcacttagtgctcaccctgctgtatagcaaacagggcccaggcaggaaatggaatccaaccaaagggtgcaagaggctttaatggaaggacgacaggggtgggggcagggtgaaggggatcaacctgggtattgggaccggcagtgatgacaagacactgcaacttctgggctgaaagggcaatgggaaaatgcagtgttcccgagctgacatcatgagggggcatagccacagtcagaccaaggaccaaaacagggccaggagtaccctgacttctctctcgcctcccctcaggtcggctgcatgggtgctgctcaacagaaagccagctggtaagggagcccgggccacgaagtcggcatgggaggggaaggggcggggcgaaggaagaataacaagcatagggaagcaggattatcctgctccatgccatttcgcagataagaagactgaggcccagagacatgaagtaacctgccggctgccacagagctgggaaggtggagctagaggagagccaggctctgaggccctccgcccagcctcctaatacaatcccagcctcaaggcgcgagcagagcgcggagcaggccagcaccccatgctcccggtctccctcctttctcctccctcccctcactgctcagctctcccaccctcccaccttctgtctgccttagctgggcctcccctggcctcctctcaagaaggctgtggcccctttcctctgtgtgcttccccactttgtctctcccttttttctcagtcttcttgtctccctcactcagtcgctgtcttcatttccctcagtctttccctatagcaggctcacaagggtgcatcctcctaaggctcagtttctttgccattcccgagctccgccccctctgcccgccgtggccccgcccctgccgggccgccctcccctgcgctgggcggcgggccgggtggcaggcgggggcggggcccgggctggcgcggcgccggcctgagtcacacgcatgaggcagcgtgagtcaggcgcggagggaagtccctgcggaaggggctttcggagctgcagtcgaatcgcagggaaagagaaagtgttcgaaacgctgctttgacacagtgaccttgtgtgagccctagctgcacacaccccccccacccacgccctccccgcagacagcagcacgcacacccccggccggctcacggtacgcggccgctgcccgcactcccgggccgggcctgcgcgtccctgtggggttgggcgagcggggtatcgagggtccagcagcctggacccggcccctccacagggcagtcccttttccagcttccaaaagctagcgttgctcacctactgccagaccccagacccacttctcccacgaggtgtaaagaaggacccctgagggtcttccacgtcaccttgtggagcctcgtggagtatggcagaaggaggagggcaatttgaggtcctgcagcgcccgggggaaccagggatgaactccctcctgcccccaggctctcctcctcatcctagaatcaatcgatgggattcagttacagaaatatttattaaacaccgactatatgccaagttataaaaacctgggacaagatggtaaacaaagcaggacagtaaacaaaatatattaacccctgcctttcaggaactggcattctagttaggtgagggagatgataaacaaaaaataagcaaatgatctaggctagtgctgcccgatagaaatagaagggaagccatgaatgtaatgtttaattttgtagtaaccatgttaagatggtaaaaagaaacacatgaaattaactttaattttttttttttgagaccgagtttcgctcttgttgcccaggctggaatacaatgatgtcgactcaccacaacctctgcctcctgaattcaagcaattcccctgcctcagcctcccaagtagctgggattacaggtattcaccaccactcctgactaattttgtatttttggtagagatggagtttctccatgttggtcaggctggtctcgaactcccgacctcaggtgatccgcccgccttgacctcccaaagtgctgggattacaggcgtgagccaccgcgcctggccaattttaatttttttttttaaggaaccgggtcttcttaaagggttccttaaggaaccaggtctctactttgtggtccaggctggagttcagtggtgcgatcatacctcactgcggcctccaactcctgatgctcctgcctcagccttccaaagccctgagattacaggcgtgagccactgggcttggccaaaattaactttaataatatattctatttaatccaatatatccagatgttaccatttcaacatgtaatcaatatacaaaaaactattgagtttttctttttcttttttcttgtactaagccttgtaaatccagtgagtacttatacttccagcacatttcagctcagcctgaacacattcccagcactcagtggccacatgtgcctaatggctatagcaatgggcagcagagtcttgatgttagatgtgggctgtggaacataaggaaagtagaggcgggcaaaggggctgggataggaagcgctaagtgggggtggtctgccctgggcagccctgaccgggtggtgaggacaggagtcgggccacagataagacctgcagattacctgcaatctgaatccaggcttggccactggccttcgcaattcacctgaccttgctgaataagggcattttcctccagtgtggattggagttatgcatctgaggctatgaggcactcattaaatgttatccttatctcacctgtctgcaacagtaggcagggcacaggcccccaatctcagagtcacatcctttccacccgcaactcttatggccaccaaaggcggcctatgccccaccccacccccagaccctccatcttttatccatttctactccttgctacagcaagatacttaaccttctcaggcttctgtttcactacgtagtaggtgctttaagctcttcaaagaaaagcattgtagacttccagaagaccaagccaccctcttaagatggacccaggccaatgctgaggtgggtggggccagcaggttccaggtgccaaccccaccacacctctttgggaactgggagaaaaaccggccctcttttctggaggttgcggtgagccgagatcacgccattgcactccagcctaggcaacaagagcaaaaatctgtctcaaaaaaaaaacgactggccctcttttctgcccacaacagccatcctaccctcaaagccccttccagccaaggacaaaaatgatatgaaaggatgcatctgaaatgcgcacagatcccagggagcaggggtggaggagagggccccaagtcaagaagctgcttcgagaggagctgttgatcactgttatacactccacctccacctgggctggtaggcaacaggcccacaaacacaagagaagtattgggatcaacaaccagcccttcctgggggacctgtgggaccaagattgagactgcagcaaggctggaggtgggagatgaaagcaggcccagaagtgcccagacaagcagcagcaggaccagccttgggatgcagacccgcccttgcccctcaccaaaagccggggatctcaacaggccccctgtatgatgacacagaaacctgaatgtcagcagcttctgcctgacactgcccatggcgagctc

SEQ ID NO: 93382 - DNA, 13079 bp, Homo sapiens
gggagctagagccatgtgctccacgctgccttttacgctccctaagcccaaagacagaggccagtaaattccaaaaggggataggaaatacactttgatttgcggtccttttaagaaacgttaacagatccataccagatgatggaattctttattttgttaggagtacagataacagaatttagagttacctttaacaaatcacataacaaatgatacttttcatgccaagggaaataacaaaaaggggccacaaagtaaaccagcaatagcagaataccagttgggtcttaaaatgtaaaaatcctccacttcccctttctttctgtgaatgatacctggcctgcacattttctgtctttgtctcctttagtcaaagaggttattatatcccctttctgtcaagaagttagaaagattctatttctggaggaaaatgtgaatgagtcaggtcttcgcttttttatctaatttaattaattagtttatttatttttaaagacaaggtcttgctctgttgcccaggctggagtgcagtgcatgatcaccactccctgcagcctcaaactcctggcctcgagtgatcctcctgcctcagcctcccaaagtgctgtgatgacaaatgtgagccactgtgcccagtctgcttttgctttcttaatatgattttcttgttctttcactgattattatagatactgggacattaaccaaatgaattctctgtccttggcctccatcacaacccatttataccttttcctatggctcattctaataggttctaaatccattactgcattctcttactcggcattcaatttcttcataattattgccatcactacttcactacttttcaggagaatgaaaacagctgttggctatttactgcactccttcactaatgtcttttttctttttttaatttttaaaatctctgaacaattttactcacctggccttatttttccattctgttcccatacatcatgcgcttttaagataaacaggtacttgggccgtgtcacgaacatcaaattaatcttgtctaccccttaggatgtttaaactacttttatccactcaccccaattatgtaggaaacaaaccaaaaaaaaaaaacctttcttattcttatactcaatataatattatttgagttaagttctgtattctggtactcaatttcagtagagctgttgaaatgtataatgtgcctcatttcacagagagacctccattattaggctgtgcactcattgtttctttcttaaaaataagtgatggattaatgacagataaatactattgactattttacctagactttggtttgaattcctaatccaattccaaatgactaatagcacgtatctatagggcagatggttgggatggaagagaagactaagaaagggctgctaggagacactctcaggaaggaaatgaatttgcttggtctcattagcactatttattaattgagctcctccctctgcccttaggtcctcttactgtaagacagtgtttctaagcaaaaacattaaaaaaaaagtactgctctttctaagcatcatctgatatctttgattcactctaattcagcttctacatatcataaaggggaaaaaaatacctctttaggttgacattgtggtaacactgacaatgactttcaaaatagtgtgtaatcacatgggattatagtttggatcatgttatcagaacatctgggatctatactcagctctgccacgtgattcagtgcatgacatggaaaagtcactgcccttctgggcttttgcttctttatcttaaataagtaaatgaaacaaattcagagtggaggttcagaaatacactgggctttgggatcctttcaagaaatgtaccggatacataccagatgacggtattctttattttgtcaggaagatgatgaacggttccaactcacctgcttatgcttgcctcaagctacccagccatcttcccaactaggcaaagggccccttcagtcataaatgttgggaggagaatccaggaaggcataactggagcttggctccatagctctttttttcttttgttcaactgcctggcagcagatcgagggaaaaagaaaagctgggctttcatggcttctctcatgcctctggcccaagaaaatgaccaagagcaggaaatcatagcaaaagtaagccagactcacattcccatggcttctgtctaagtccctgcttagaagcaagaaagcactagttccaaactctgtctcaggttatctaacttataattacaaggcaataggaggaaaatttataaccacattcctgtgtatctgaggtatcaggagtgaagctgtttcttctgagtggggtctagggactgggtagaaaggtccctctgttgggaacaaacattttacataggatatgtgagtatctattctaaaacaataaaaaataacttctgggaaggggcaacagtgtgcagacaatgtacattttattcttttagtgattaagttaaactaaatacatggtgaagctcatgctctgagaacaaacactagaaacagtgaaaagagctctagagcatacgtgaaacttctgagaaagaagaaagtcaggtcttgaggacagagacacaaagtttacattaatctcttggaatgaattagaatctcaaatctcattgctttactgggatactattgtctaatggaggctcccgtgatcttagtgtgtacccagatagagaataaaacacatttgtgcatgcaagcaggcacacatgcgtgcacgcacacacacactcacactgtcttatacctcactcatccgggaagtcagcacacaaagggcatgtgtgcttacaaacacacccaggtcaaagtacagattggtagaaggcaagtggcagaggctcccaacagggcagataattacaaagcatcaactcacagactctgaggagattttcttcaaaagctcagcccctggggttccaacgagtcttaaaatgagcttcaactgatcaatatctaatggtggaccataaaggaaaatgttgggacaaaataaaaatgaaaaacaaacaatgacaaacaaaacaaaaacaaacaaacagaacacaccgagaacaaaaatgaaacaccccaaacctagccaacacggtgaatccctctaggtcaaggctcctgcaggatgatcacttcacgtagggcatgctcctcctgtacaaagattcaaaatgctaccaaacacatatccactttatattcattttatgcatctgtcaacagcatgtatcagtaaagtgaggcaactttagctggttcttagctgccaaagacagcaggtgaaaacacaagagcttcactcagtttacactgccctcttcatctgccatcacagtgtcagtaaccagttcagcaaagtgcactgataattagagggccacagataaggaaaaaagcagcagaagacaggagctagggatgtacaagtctatttatgaatattctcccaagcgtgacctaaagagcttgtgatatgacagtggaaggcctgtgagaccccaaagcctgaccactggagcacaccctctggaaagggaagcctcgcctctcacactggctatagcaggcactatgagggagagtcgccagcagagggcgctctcccaccgcatgttcctttaggagcgccatgagaacgcaaatacaggcggtttcaaccttataaaatgcaaatgaacaatgcttaacaaacttcacacatcccaaaggctctaaataataggccacaatgccataacttttatcctggtagctaacacttcaatgtatactcagaatgtatgtgcatgtgttaaccagaagacaaaaatttgtttgttctcattgcttttaatcttacctaaaaaggaagttaaaaagagggggaaaaatattataaaatagcttttaatatttcctctgaaaatgtgaacagtttatccacgtttatactgactgacattccagggagggagaaggggaggatgactgtcttctgacccatcaggtttttcacatgactaaatcctcttggcttcaggtctcagcttcaacttcacctcctaagggaggcctcccctcaacactctatatacataacaccccaccccccaattctctctcagcaccatgcttgataacatcatagtgcttatcacagcctagaattactttatttgcttactgtctgccccctgtactggtctacagctctacgaggacaggggccactctgcctcttcaccatttatccccagcctaacatctggtacatgacaggtagtcaaaatatttgaggaaaaggtagagcaggatgaaagaaatttttgcttatggttatacatataaaggcaacatagcagcacttaaaaacaacagtctctataagccacaggtgcctacgttataggaataacttaatgcagtaatttgacatcctgtcttttactttctttcagacatgaaatcagcttaaatggaagaaaattctaggctggagtcaccaaaccccaggctctgcctgttttatatataaagttttattagaacacagccatgcccattcatttatgtacagtctataggtgtttccaattacaacaagcacagttaccatatggttcccaagcctaaaatattaactacctggccctttcagaaaaggtgcgccaaaccccaccctaaacccaaacaacttgtgttctttagcaagcaaaaacaaactagaaacaagtccactcacattatttctaaattaagaataacagggaattttgtcatctgcaaatggcaaaaatcattgtgttataaaggttaagattttaatactggcttctcagttcaagatgttgacaagtaaaaaatcttatagcatatgttcatgggacagagtaggaatgggggtgggatggatactgtcttgctctaaaataatcagattaattatattacaatagaaatcagtaaaaaaaattcttgctcatctaaaatgactcaattcaaaaaatttagtttcctcacattaacactcttcaggaatatatttaactgggtagccaccacaagataaagtaaatcatatatgggaaaaatcttgactacttcaaatctcaaacaagtggctttacaatatatgcatcaaaagtaatctctaaaatgaagcttttgatattggtactcttgtttaagagacttctttctgactacttaacaatgagagtcagttgttttttttttttttttttttttgagacggagtctctcgctctgtcgcccaggctggggtgcagtggcgcgatctcggctcactgcaagttccacctcccaggttcacgccattctcctgcctcagcctccagagtagctgggactacaggcgcctgccaccacacccggctaattttttgtatttttagtagagacggggtttcaccatgttagccagaatggtctcaatctcctgtcctcatgatccgcctgcctcggcctcccaaagggctgggattacaggcgtgagccaccgtgcctggctgagagtcaatttttatactctctctaaggaagacaggctctctgagctgtgaatttctcaactacctgaacttcaccccaacctacctgaagaatacgcaatttccattagtcacagtggctcattacatcaatgagctgagaaaccctctctctcccacctctgctggcatgaaacaatatcaggcctgaagaatcaagcctagtttgactctggctcaaattattattctttaatgcactcaatgcttcaactcacatcagatattccaggcacttctaagcttccaagtacttatttatgtactcataaaccagaatacctcccccttctcccgtccttccaagccttttctattcctatttacactttgaagtcctattcaaacaagaactctgccatgaagtcttcttggatttttttcaatagcttatctataactctattctagtgtatttatcactccatcttattttataatcagagacagttgttcaagtaactcttgtaactctctttccactgagtctgatcattctggttttaaggacaggtaccatcctgtccccagcaccttccacagagcagcttgataaatactagttgacttgaaaagatgagccatggcacatcctttcatcacctcgggaggtgccgatgtcttgagtcgtgacaccggcgtatgctgacactgctgcctccagtagttcttttgtcctcttccctttgtcacccctacactttggaggtgaacttctctcctgagggctgtaaagactagtttgaaaagggagagccaagaaccaactgaattgtctcagaatggaaacactatattatttcagaggagttaatttcagaaggaaaatgggtcaaacttgaaaaaacaacatacatggctcctattggtaaaactggaacttgggactcagtgaaacatacaaccaggaaagaacagactggtgatgatgtagyggtcatccctgtgctgcagagaacgcttcactacgagtgtatcgttctggtgaaacagtcctgaccaccaatgggtggctactgcatagagttccctgcagggaactcatagaagatggtgaaaccccaggagcagctgctctttgggagcttgaggaagaaactggctacaaaggggacgctgctgaatgttctccagtggtctatatggacccaggtttgtcaaactgtaccacacacatcgtgacagtaatcattaacggagatgacgcagaaaatgtaaggcccaagccaaagccaggggatggagaatttgtggaagtcatttcgttacccaagaatgacctgctgcagggactcgatgctctcgtagctgaaaaacatcttacagtggatgccaaagtctattcccatgctctagcactgaaacatgcaaatgtgaagccatctgaagtgcccgtcctgaaattttaaggccaaagacgacactggccatttttgtaaatgagactaccaggccttcttcacaaaggctttgtattcaacttagtttaatgtagatttgaattagctttttcgtaaaataaaagcagcaaaaaatgaaaaaaaaaaaaaaaagaaaagaaaagatgagccatattatgcttttcaactcagctttaccccactgccttgccctcaaaacacagaatgaccatactccatggaaaaacacacaacataaaataaaaatcttagtaactaaaagcatttgcatgaaggaagttaaaacatgcaaacctcagaagaaatcaccatgggttcttcaaaagctggcaaatccactgaaatacaggccagtcttccaacagtaccagctactataaggccactatgatttgtccaggcagttaagaccagaaggagcgtcacgtagccacattagcggagtaaagcaaaactcaccacatcatgacaatcagttatttccacagtgagccatcctttgtaataggtttagccctgtttctcttaggtagaaaatatttttactattagtttaaaatgtgttttaattgtaatgatcacaacgtcaaaatttaaatcataaatctcctgaatctttctaaaacaaatgaagaaaagaacaacttaagcctaagattactctttagacgaagtcatctttaacagaagcaagtcagtcagaatgaacaggtaaagaaaaaaaaaaacaaaaaaactaagcataacaggatatttctagggaaagtaaaagagggatattctagtcagttctaagtgctccaggcactcctaaaaaacctccacaggccagaaagttgaagataaataaaaggaccaattgcaggacctacctgccatgagcagtaattttcaaagacataaatccacataggggtgaagtggagcactaacctttgggaaggtaggaaatcttcctggtgacagacaggatagactagaataagacttagcctagctccttatcttccaagttgtcaaaatagtcattttcactgtaacacaaagaaaatttcttaagggacccttggtttatggacaaatctgaggattctaccttttcctgagaaaatgtattttcaagttagagaggaaagggcaaataacctaataaaatatttttcttcttcagcatttattggacacttgcttttggtgtctaaagtgaaactgctttttaaaaatgagagaacatccaggctggccaacatggcaaaatcctgtctctactaaaaatacaaaaattagccgggcgtgatgacgtgcacctgtaatcccagctactcgggaggctgaggcagggagaatcgcttgaacacgggaggtggaggttgcagtgagcagagattgcgccattgcactccagcctgggcgacagagcgagactctgtctccaaaaaaaaaaaaaaagagagagagggagaatatttggcagggtgcagtggccacacctgtaatcccaacattttggtaggccaaggcgggcagatcacttgaggtctggagttctagaccagcctcaggaggtggaggttgcagtgagccgagattgcgccactgcattccagcctaggcaacagagtgagactccatctcaaaaaaaaaaagaaagagtatttgaaaccaatgactgaaagtgatgggcagatgtgagagaagggtctccagaagctttagctctattgccagtgttttaactcacaagcaggacagtatgaacagaggtgtttattattctttgtctagcagtatgtctgaaatatttcaaaacatgtttgcaaaagaagaaataaaaaaaaatatataagaagcaaatttaatacactaggaaaactcccatagaccagggcagtaactgatggcaagtggattttaactcagctccattaacccattatgtcttaagagcaccatttctgttaaaattaaagaaggttttacacataaggaaattcacttgattatggagaaaaggaaaacaacagcaagccaaggctgtgatctctggtagaaaaacggtatttgatgcataacagggctataaaactttctctcttccttaagctgcagagtgttaagcgttggtaacagaattttcaaagtggcttattcatttcaagatctatggtatttgaaataagttagtactgtacctgaagagacattctgtatcctccctcctttctagtacaaagttctgtcagctgtgtccacttgatatccctagtcaactaggcttttaagaaagggcttcattctttaaaaaataataatgctatcattaggccagatggaagggttctgcaaagtcacaaacaagaataatttctaatctgataacacattattggctttaagacaaaaatgagtatttcttatatttttttaaaattaaattaaagttctgagatacaagtgcaggatgtgcaggtttgttacataggtaaatatgtgccatcgtggtttgctccacctatcaatccatcacctaggtgttaagccccgcatgccttagctatttatcctgatgcgttccctccgcctgacccccaccccaccaacaggccccagcgtgtgttgttctcctccatgtgtccatgtgttctcattgttcagctcccacttgtgagaacatgtggtgtttggctttctgaggaaaatggcttcaagctccatcagtgtccccgcaaagggcacaatctcattcatttttatgggtgtatagtattccatggtgtatatgtaccatgtttttttatccagtccatcactgatgggcatttgggttgattccatgtctttgctattctgaatactgctgcaatcaacatacacatgcatgtatctttgtaacagaatgatttatattcctttgggtatatacccagtaatgggattgctgggtcaaatgttatttctggttctaggtctttgaggatttcaccagtcttccacaatggttgaactaatttacattcctaccaacggtgtaaaagtgttcatatttctccatagcctcaccagcatctgttgtttcttgactttttaataatcaccattctgactagcatgagacagtatctcattgtggttttcatttgcatttctctaatggtcagtgacactgagctttttttcatgtttgttggctgtataaatgtcttcttttgagaagtgtttgttcatgtcctttgccaatattttttttttttttttgagacggagtctcgctctgtcgcccaggctggagtgcagtggtgtgatctcggctcactgccagctccgcctcctgggttcacgtcattctcctgccccagcctcctgagtagctgggactacaggcgcacaccaccatgcctggctaattttttgcatttttagtagagatggggtttcgccaaattagtcaggatgatctcgatctcctgacctcgtgatccacctgcctcagcctcccaaagtgctgggattacaggcatgagtcactgtgcctggccctttgccaactttttaatgggttttttccttgtaaatttgtttaaattccttgtagattctggatattagacttttgtcagatggatagattgcaaaaactgtctcccattctgtaggttgtctgttcactctgacgatagtttcttttgctgtgcagaagcccatttgtcagtttctgcttttgttgccattgcttttgatgttttcatcatgaaatttttgcccatgtctatgtccttaatgatattgcctagattttcttctagggtttttatcgttttgggttctacatttaagtctttaatccatcttgagttaatttttgtataaggtgtaaggaaggggtccagtttcaattttctgcacatggctagccagttctcccagcaccatttattaaatagggaatcctttccccattgctcgttttgtcaggtttgttgaagatcagatggttgtagatgtgcagttttatttctgagatctctattctgttccattggtctgtttttgtactagtaccatgctgttttgattactgtagcctcgtagtatagtttgaagtcaggtagtgtgatgcctccaggtttgttctttttgcttagaattgtttgggctatatggactcttttttggttccatatgaattttaaagtttttttctaattctgtgaagaatgtcaacagtagtttaatgggaatagcattaaatttataaattactttgggcaatatggccattttcatgatattgattcttcctatccatgagcacagaatgtttttccatttgtttgtgtcctctctgatttccttcagcagtggtttgtagttctccttgaagaggtccttcacttcccttgttattaatagctatagttctgggtattttattctcttttagcagttgtgaataagagttcattcatgatttggctctctgcttgcctactgttggtgtataggaatagttgtgatttttgcactttgattttgtatcctgagactttgctgaagttgcttatcagcttaagaagcttttgggctgagacaacaaggttttctagatataggatcatgtcacctgcaaatagagttttacttcctctcttcctatttgaataccctttctttctttcttttgcctgattgccctggccagaatttccaatactatgttgaataggagtagggaaagagggcatccttgtgccagttttgaaggggaatacttccagcttttgcctattcagtaagatactggctgtgggtttgtcttacatggcttattttgaggtatgttccatcaacacctagtttactgagagtttttaacatgaagggatgttgaattttattaaaggccttttctgcatccattgagataatcatgtggtttttgcctttagttctgtttatgtgatcaattatgtttattgatttgcatatgttaaaacagccttgcatcccagggatgaagctgacttgaccgtggtggatggataagcttttgacatgctgctggatttggtttgccagtattttactgaggatttttgcatcgatgttcatcagggatattggccttaagttttctttttctgttgtatttctggcaggctttggtattgggataatactggcctcataaaatgagttataggggagtccctccttttgtatgtttggaatagtttcagaagaaatggtaccagctcttctttgtacctctggtagaatttggctgtaatctgtctggtcctgggcttttcttgcttggtaggctatttattactgcctcaatttgagaacttgttattggcagattcaacgttttcctggttcagtcttgggaggtcatatgtgtccaggaattcatccatttcttctagattttctagtttatttgcatagaggtgtttatagtattctctgatagttgttcatatttctgcagggtcagtggtgataccccctttatcatttttattgtgtctatttgattcttctttcttcattactctagctaggagtctattttattttattttatgtttttcaaaataccagatcttgggagtcactgatatttttggaagggtttttcctgtctctatctccttcagttccactctgatcttggttatttcttgtcctctgctagctttagggtttgtttggtcttggttccctagttcttttagttgtgatgttagggtgtcaatttgagatctttctagctttttgatgtgggcatttagtgctataaacttccctcttaacactgctttagctgtgtcccagagattctggtatgttctctttgttctcattggtttcaaagaacttctgatttccgccttaatttcattatttatccaggagtcattcaggagcaggttgtccaatttccatgtaattgtgtggttttgagtgagtttcttaatcttagttctaatttgattgtgctgtggtgtgagaggc

SEQ ID NO: 93383 - DNA, 13874 bp, Homo sapiens
ggccacggctccctgagggctgcttgtctttcctctgcatctcccctactgcagccaggtcagagtctgtagaaggcgaacactccctccctggtgcacatcatggttttccccaggtaactggaagatcacaaagaaagaggcgtgttggtttctcagcaggagtttttgttttttctctgcagcaccagctgaacttgagtctttgctccaatgttgcaactgataacttagctccttaaatacagccaatgggctggctgaggagataagtggttatgagcacgggacggcaggttgaggcccaaatcttggtttccctttctttttttttttttttttttttgagacagagtttcgctcttgttgcccaggctggagtgcaatggcacaatctcagcttactgcaacctccgcctcccaggttcaagctattctcctgcctcagcttcccaagtagctgggattagaggtgcgtgccaccatgcccagctaattttttatatttagtatagacagggtttcactgtgttggtcaggctggtcatgaactcctgccttcaggtgatccacccacctcagcctcccaaagtgctgggattacaggcgtgagccaccacgtccagccttggtttccctttttatctagttatgtcaccttgggcaagtcctcttagtgcctctatttttctcatttttttattttttagtttatgtttttaatattttttctcatttttaaatgggaaataacaggtagagttgtgataattctgttaatccatataaagcatttagtatagtgcctggtacatattacgataagtattcaagaaacattcatttgcattgcttttcattgcatgtaaatcattcactctgtgtctaggcagttcctccatcattgacctctgatccctttggccagtcaccctctctctcttccactgggctggagacaaaggaagacagagccccctccttccctccctcctttactcttctctcttggggctacaatgaacaaatgataacagcacaggtttcactcaattaggataaaaccccaaagcagatgatgcttgtgtgcagaagatggagtaaaagaattggctccagaaggcttgggacctgcttgtagaggatgctaattggtttcttgccggtaatttttcacccctaagtgaacaagaaagagggtatctcagaggctcatctgccttgcaggttcattgcaggcaaatgagtatctgtgtccagggagagatggagattgtcctctccaaagagaacataatcttatttgtcccaagcaaagatttcattcctggcaggtctgcagaggtagaaggggataaaggtcacttccaaaattgcatgggagctctgcctcttacacactctcagtaagtcagagggtcgtggagcttgggtagatttaatcctcattctctcactgagtagtctggggagaggaatggggatgaaacattagcctaggaaactgtgaaaagagctccactctcagtggaaaggataaggctgaacaatagaaaaggtaactgtaagaatcgctcccctttagaactctttctgtcccttgtgtatgcatctattattgcagtgtcctatatgtatcctattatccaactgtgtccttgaggagataggctttatataacttcagcaaacacttactgatcgcttactatgtgccaggcatcgttctatttgctttccctatatcaactcatttaatccttacagcaaccttgtaagataggtatgttattattcccattttatggttgatggaatccaaaaacagaggtcacatatagattgaagtaggaagccagacagagtcccacacctctgctcgtatatctcaaaccctaacacagtatgggcttaatgcattttattgaactaagtgcaaaaaaagtgacgatgctgatgctgtgagcctataaaatactaagtgcaccaaaaatacttgctaaaaaaatgacttaccagaggctttgccaagaagatgactggtttaaagcaatcctaccacagaagctgccacccaacctggaggtaactctaggaaaggggaggtcactataagaggcatgctgcctcatctacttgtcactgcaaatctatctctgaactttaatttggctccactacttggggcatttgagtttcttctgacatcatgacctcctttccattcttattgttatcacctctatttaatgactggttacttccttctcaaatgatgagttaatgacactggtcccatctctctgaactctaagccgccctatacactgctgctaatctttctggctgggcacagtggctcacgcctgtaatcccagcactttggaaggctgaggcgggcggatcacctgacagtgggagtttgagaccagcctggccaatatggagaaaccccatgtctactaaaaatacaaaattagccaggcatggtggcgcatgcctgtaatcccagctactcgggaggctgaggcaggagaattgcttgaacctgggaggtggaggttgcagtgagccgagatcgcactgttgcactctagcccatgcaacaagagtgaaactccacctcaaaaaaaaaaaaaaaaaagaaaatttctaaaacacaattctaatatagtaaaaattttgcattaaccagtgcctttcaaattcaaagttctcagctcagcattcctggcctcccacactaacatgacttgcagtctcattcctctctctccctgtgatccatgcacggtgaccactccttcctcgcaaacacacttttgcacattcacatcttatctcagagttgttcaacctagtgtccctggctctaaacaactctggtggaagagacttacagaagaaagaagacagacctagcattcacacttctgccctgtcactcagagtagcaagaactcgggcaagttattcagcctcttcgagtcttaatttcctcatcagtagaaaaagaataatcatatttatcatgcagaattgttgagagataaattatttggccaacaagcatttgttgagcacctattatgtggcaggtattgtcggccctagagatgttgaacaaaacatggagctggccttctagtgacggtggaagagagacatgaaacaaataagcaagtatttataaagtgctcagtgcacgtctggcacatagttctctctcaatgaatgattgtttttccagatattgcaaaaggcctaataatagatgtatggttatctacccaagagcgtgctgaacagaaatgtctagtgtttttggattcaactggaatactcaaaaaatttcatgaaagaagagacagtatctatcaatgtactatcaatgtatttcaattactgggcacagcaccatacagacagcaagtactaaatacttgtttattgaataaatgttggctaatgcataatgatcaggacctttaatcaacagttttattgcctttaattataaatagatgagtagattacttaagaagtcctggctgggtgcggtggctcatgcctgtaatcccagcactttgggaggccgaggcgggcagatcacctgaggtcaggagtttgagaccagcctgaccaacatggtgaaaccccttctctactaaaaatacaaaaattagccaggagtggtggcgtgcacctgtaatcccagctacttgggaggctgaggcaggagaatcgcttgaacccaggaggcagaggttgcagtgagccgagatctcaccactgcactccagcctgggagacagagcgagactctgtcacgcacacacaaaaaaggctccaaaacccaaatgtcattcaccacctgstggctggtgcctaaagtctacacagttagagtgtaggttttggttcaagtcctgctcccctactcactagcagtgcagtttgaggtaagtctcttaacttgagattctatttcccatctttaaaatggagatggtggagataacatactcctcttaaggacattgagaggaacaaatatgagaatacatataaactgcttaggatagtgcctgctacacagtaaatgtcaataaatattagaattaatggtatggccaccacagcttcatctcattgccaaaggttttgtccatttgttcacaccaagggaaagataacctagtggttatagtctgccatttaccccacagtgagaatgactctttgattccaccctatcagaggcaggaacctgaaagcagaaatgactaagacatgattcctgtcttccaaraacattcgatctggtccagtgaatccagtccctaatggctaataacagtgcaaggatttcccatttacaaagcactttctcatataccattctgtgcgtcttcacagctccgtaagagagagatgttaccagcccactttggaattgatgaaacaggtttatttagggtatgtgcctcacaaaggtcacagagctagtgagtagctaggtcaggatcagaatgtgtgtcctgttcacaaggccattcctgtgggacctgagagaatggattttgataggtggaaggggaccaaggacctgggattcctgaggaagctcagagagtagatgaaggagtaagctggatgcaagtaacaacttcctcctcctctgtcccaccagcagtggaaggcaagtgacagttatgagagaaatggtggggtggcggggagagctccctggggagaggtcttgtctgcaggagtctcctttgattactggcccctccccacccctcccactgttttctcactgccccagttttatcaaagggcaattaagcctctttttctcaactgtctaagggggctacatgtgtcactcaggtcttttcttttcagttctgctgccttctccttttttttccaactaatgtgtcctcttataattagagttttacagtcacttgtaattaggcccatttagtgcttcagagtaggagacttttaacctatttcaccttgtaattagggacctccacccaggtatacacacccaggaagcagatacggataaagggagagggtaggggctgggtcaaaggcacacatggatatatgtacacacaagcacacacatacacacaagactgcatgctcgttgggtctgtgcgggggatgtctgtgagtgcagcagatgcaccgttgcctttgtacaaatgctgcagccatgtggttgtaaggagagcgtttggttgtaggttccagtatactcgggaacagaaggcgagtacggagcgagttctagctgcatgtgaatgtgttaagggagggagcaggcgagctgaaaatcggtcagctcctatcatctccatccaaggaaggaatttttatttttaacagataatacatggcacgtggttcccaattcaaaaggtacaaaaagctatacagtaaaaagagctctccctcctccccatccccaaccatccaattctcttctcaaaaggcaattttgggtcaggcgccgtggttcacgcctgtaaccccagcactgtgggaggccgaggcagatggatcacttgagtcaggagttcgagaccagcctggccaacatggcaaaagcccgtctctactaaaaatacaaaaattagtcaggtgaggtggctcgcacctgtggttccagctacccgggaggctgaggcaagaggatcacttgaacccaagaggcagaggttgcagtgagccaagatctcaccactgcactccagcctgggcgacagagcaagactccatctcaaaaaaaaaaaaaaaaatgggttgatggtgcgcggggctggcgggcagttggcatgagcgggaccgaagctgaggcaggaagagccggcaccatggtggagaaggaggaggctggaggtggcatcagccaggaggaggcaggcgcagtatgaccagcagatctgcctttggggactggaggccccgaaatggctgcgggcctcccaggtgcttcttgcaggcatgaaaggactcggggctgaaattgccaagaatctcatcctggcaggagtgaaaggactgaccatgctggatcacaaacagatatctccagaakaacccggagctcagttcttgattcgtattgggtctgttggccgaaatagggctgaagcctctttggagcgagctcagaatcttaaccccatggtggatgtgaagttgsacactgaggatatagagaagaaaccagagtcatttttcactcaatttgatgctgtgtgttgacttgctgctccagggctgtcatagttaaggttgaccagatctgtcacaaaaatagcatcaagttmtttgcaggagatgtttttagctaccatggatacacatttgccaatctaggagaacatgagtttgtagaggagaaaactaaagttgctaaagttagccaaggagtagaagatgggcctgataccaagagagtaaaacttgattcttctgagacaacgatggtcaagaagaaggtggtcttctgccccgttaaagaagcgctggaggtggactggagcagtaagaaagcaaaggctgctctgaagcgcacgacctccgaccactttctccttcaagtgctcctaaagttccgcacagataaaggaagagatcccagttctgatacacacggggaagattccgagttgttgctccagatacgaaacgatgtgcttgactcactgggtattattcctgacccgcgctttatcacgtacttcttctctgagatggccccagtgtgtgcggtggttggagggattttggcacaggaaattgtgaaggccctgtctcagcaggaccctcctcacaacttcttcttcaatggcatgaaggggaatgggattctggagtggcttggccccaagtgaacccaagacttggcagccctggagatgccaattgcaacatgcctgcctgtattccctgtccccctccttcgtgaaggcatctccaggcaaggaaaactgaagtcatcggcccagtacaaaacatttcctgcgacgaaggaggtggtgccgtcatgctgcttcccatcacccgcagctgcttgacaaggggtgcagggcagctgtctttgttccagcactgttcagactgcctgctgtcccaggcctgccagctcccctgagtgataagcacttccaagcacccctctgccccttctctgtccttatgctgtcacggcctcgccagccctctagggtattatgggagatgcctgccaggaacgagcatgctctgttgcttaggagcctcttgccaccttcttggacttaactccccacctgatgtcttacagagaggagcgtgacttcaggtggagagtaggcccaggccccatgaggcaccagtggaagcacagctccaagttcagacaggtgcccttagagaggaaacccatgacaggcaaatgcatttcctctggagtttgagaccctgacgaacaacaggtggcatctggtgtgccgttcttgagttttcgtttaggattcgttgagttccagctgggttttgggagaaaggagatgctaccaagtcttggatgttagggcgagaccctgcaagttgagtattagtgggagagcttgtctttcaaggcaggttcctggggcttcagggctaggaggcaggagcttgcccttttaacacaaccccagtcacccatgcggcccaggccactcagaggctgttgcatttcagggctgtgttggtcctctgtttacctcctaaaccacagctgtttgtgtttcacatatgttctgaattttccttggttctttttaaaggaatgataataaagttacttgctttaggaaaaaaagaaagtcaatcttaggtaacaagacaaaggcaatctttattaccagagatattctaaatatagttttcctaacagagatattctaaacatagttttcctaacagtttgaaaccttttgcttttttcatttaaaaatatatctgttgtctattattgataacagtcttggtcagtgttccacatctgtctatagagagcttttctctatctttttaatgcctgtatcgtgttttgtgttcataccactattgcttaatttacaacactcttgtgaagtaaaaatgttttttctcattttaagaaatacatttttctctctttttcttttcttttctttctttctttctttttttttttttctttttgagatggagtcttgctctgttgcccaggctggagtgcagtggtgtgatttcggctcattgaaacctctgcctcccgggttcaattgattctcctgcctcagcctctggagtagctgggactacaggcgtgtgccaccacacctggctattttttttttttttagcagagatgaggtttcaccatgttgggccaggctggtcttaaactcctgacctcaggtgatccacccacttcaccctcccaaagtgttggatttacaagcatgagccactgcacccgccttctctcatttttatgctaaggaaactgaagcatgttcagagcaactcaggcaagtctagaccctgagaagctcaggcaggaattccagcaaggacttagggcaggagggaaaggtagttaggtaaaggatctgccttagtgaggacagggctgcaggtgtggttggaattctgagacgccagacatcagaggtgcctgaaatttccctgcttggctataatgccctagggtgcccaatcagtctgtaaacacttactgagcgcttattagtgatctattgcttcataacaatttactctaaaacttagtggctcacaacaatgataatcaatttttatctctaatgatgtatgtgagtcaggaattccaaagcagcttggttgggtgtttctggctcagaccttctcatgaagtggtggtcaacatgtcagcagggctgcagtcatgtgaaggcttgactggggacagagatccatgttttcaaggtggctcactcacatagccagcaagttggtgctggctttcagcgggagcctcagttcctctccctgtgcatccctccacagagctgcttgagtgtctgtatttgttttgaaattgttgcatagaaaattaccacaaacttagtaggttaaaacagtacccatttattatctcacagttctgtaggtcaaaagtccaggcaggctcaactggtctctctgcttccaaggccaaaatcaaggtgtcagctggtcttggttctcactgggaggctctagggaacattctgcttccaaacccattgaggttgttgccagaattgttccttgcagttatataggattgaggtctccattttctggcaggctgttagctgagggctgctcttagcttccagaggccacactcaggcccaggggctccctctattgttaaatcagcagcaatgcatcaggtccttcttgagctttgaatctctctgacttcctcttctgcccccagctgaagaaaactctcagcttttaaacggctcataggattagattgggcccgctcaatcttcccattgtaacatcaactgattagtaaacttaattacatctgcaaaatccctcttgccatgcaacataagatagtgatgggaggccgggcatggtggctcacacctgtaatcccagcactttgggaggccgaggtgggcagatcacttgacgtcaggagttcaagacgagcctggccaatatggcaaaaccccatctccactaaaaattaaaaaaaaaaaaaatagctgggcatggtgggatacacctgtagtcccagctatttgggaggcggaggcaggagaatcaattgaacctgggaggctgaggttgcagtgagccgagattgtgccacagcactccagcctgggtgacagagagagaatctgtctgcaaaaaaaaaaaaaaaaaaaaaagtgaaaaagtgattggaacacactggagtgcaaagattataggggccagcagagtataagatttccaattcttccacatgttcactaacatttggtagtatcttcttttctcatttttgctatcctggctggccatttaataccattaattcagcaaacacttattaagtctccacaattttgtgctgagtgcctaaaatcacgtaaacatgaatcaactaggtactcaataaatatttgttggctgattttccagatgttggagacataaaattaattagacatggactctgctctcaaggatcttaaaagtaaatatgtagtgaaagactgatgaccagcacataaataatacagttaaaaaagcaataagggccaaaaggaggggaattcagaagaaagaaaaaaatcttttaatttagaaagactcaaatcaagggaaacatccttgagtaagtggcatttgagtgggttttgtaagaaaaaaattaggatttagttatgcagaggtgatggagaacaggggtagtggctaatatttcaaacagatagaagagcatgagtgaggctgtgcacggtggctcacaactgtaatcctagcactttgggaggctgaggcgtatggattgcttgagctcaggagtttgagaccagcctggacaacactgtgaaaatccaacacaacaacaacaaaaaaaaacaaacacaaaaattagccaggcatggtggctcgtgcctgtagttccagctacttggtagactgaggcaggaggagcccttgagcctggaagatcaaggctgcaatgagccaagattgcaccactgcactccagcctgggtgcagagtgagacagaaggaagaagaaagaaaagaaaagaaacctcagtgataaagattctccagtctacaaactgcacactaggagctttctgaacactttcaatgcccagaggtattttgtttggtcttttcaatctttttttaaaaatttaaatttgaatgcatttcatagagcatgcattttgtaattctagtttagtcgatacaagatcctgttgtcctaaacccctcttcagcctcttcatagatttatggtatccacctggcatctgagggatttgtgtttgagagcatggagttcaatccgtttgttttacacataagaaaactgaagctccaaaaaagctaaatgactcaaggaagtactgagagtcagtggtggagtttctacctggattccagcctcttgatgtcctgtctgagcttcttttgcagaggctgatagaccaaggagctcagtcactcttagataaacccgctttggctatcaacaaatatgtatgtttgtttttccttgagagaagttttataaaggaagatggaaggagttcaagattcctaggcaaagaagaggacagaggctgaaatgtgcttcctttttttcattttgcttggacctaaatggcaggaaatttcttaactaaaattaaaaagcaactagaatatctcttcccatctcatgaatacgttgctttctaaagtcaaccgaatccaagcagctgactttcaaaatggggccgaaggagactctaaagtgccacctggtggccatcttcagcacaagcgaaaaggaaaagggattgcagtgagatctttgatccaggtagggctgatagcgtagaaaactccccagcgacaaaagtggtattaaaagtaacaaaaaaggccgggcgcggtggctcacgcctgtaatcctaacactttgggaggccgaggtgggcggattgcctgagctcaggagttcgggaacagcctggacaacacggtgaaaccccgtctctaacaaaatacaaaaaattagctgggcgtggcggcgtgcgcctgtagtcccagctactcgggaggctgaggcaggagaattgcttgaacctgggaggcggaggttgcagtgagccgagatcgcgccactgccctccagcctgggcgacagagcgagacaccgtctcaaaaaaaaaggaacaaaaaggctttatttgacctgcggccaaaccaatggaaacttcagtggaggtgggttagagtgaagttcaggacttttaaagcacttgtgagaatgtcttcccacaggactaaggaaacaggtgatacagaaacagataaggacatccggtgaaaggagtaaggtaggaagagatgagggttctaaccctcctacaggcttgggagtacttagcctggagatatttctccaagccttcaagttgtctgcaagacagttccatatatatggtgtttttcaatatatttttacaaatactatttatgttttaaaatattcattgaacatggagaaacaccatctctactgaaaatacaaaattagctaggcgtggtggtacatgcttgtaatcccagctactcgggaggctgaggcaggagaatcgcttgaacccatgaggcggaggttgcggtgagccgaaatcgcgccattgcactccagcctgggcaacaagagcgaaactccgtctcaaaagaaaaaaaaatgcattcaatttattacaggtttataacataaccacaataaaagaggtgagaaaaaagaattaagtaactttggactgttatttaactatgtactctaaacgcaaagagcacacaaattttactgtatttaataaatttgtttttcacaaggctgtaggttggaaattctaaaactgttttatgtgtaatctagtgttgaacaaataagtaaatacattgtgaataataaccaccgaattttttactgtcagagaaaggaattaaaaacaagaaagggaaataatagaatgaaccctgagagctggaatggaactggaggtatcaatataaaataataggttttttttgttttttgttttttgttttttcttttttcagacagagtctctcttttgcccaggctagagtgtagtggtgagatctcagctcaccacaacctccatctcccgagttcaagcaattctcctgcctcagcctcccaagtagctgggactacaggagtgcgccaacacgcccggctaatttttgtatttttagtagagacagggtttcactatgctggccaggctgatctcaaactgctgtcatcgtgatccgcccaccgcggactcccaaagtgctgggattaaaggcgtgagccactgcacccggcaaagtcatagtttttaatagagagacagggaaataagtaaagacatgtttaagtgtacacatacgtatatttcctagccctgatcactgagggaggaaacaatgacaccccagtagcagtaagcatctagtgcccagatcttttttttttttttttttttgagcctgagtcttgctctgtcgcccaggctggagtgcagtggcgtgatctcggctcactgcaagctccgcctcccgggttcacgacattctcctgcctcagcctctccagtagctgggactacaggcacccaccaccacgcccggctaatgtgtgtgtgtgtgtgtgtgtgtgtgtgtgtgtgtgtgtgtgtgtgtgtttagtagagacgggatttcactgcagatctttctttctaaatattattctccagtaaaaaggaacccggtctacttaaacagatagctgattatacggctggggcagggaagaacagaatgaacttaggacatcttgtggagctagtaactaaggaagtgctcaaaaaatgatggacacatgttgaaatgacacaagccaacttggtaagactcctagatctgggacaatctgaacaacaaaaatgtttaaaagataataatgttcactcacagattaaaagcaatattcatgagcccatacttatttaaataaaaaattgaataaacaaataaatgaggaagaaaggaaagtt

SEQ ID NO: 93384 - DNA, 19445 bp, Homo sapiens
catactttcttatatgattccatctactcttctgggttaaatccacttgcatgattgtaatacccagattctgagtactatctctaaaaggaagattaggtcatagtcctacttaaaaactttatgttgtattaataaagagaggaaagtacattttattatactctcatggaacctctaatagcatatcattgtttatattaatactgccagagcttaatatacaatgaaaatttctcagaaatcagagaataggttttatacggattttccctaggactttatattaggtgctcaataaatacttgttggttattttatctactagtaaatgtataagaatctcattgctgcaactggccaggtgcaaaaattacagactcacaagcttttttattttggccctccaattcttgtaaaactagaaaggaaaacaaaacaaaaatctctgacctataatcatgtcttctggtagaagtgaaaataagtatattatgcatggttgactatcactttcataaaataaaaatttatttaaaaaagaattcactcctataaatctcttacttacaatcagaaaacaaaatccttttaattatatgtctatgtcatcaattcagggatatgcatgttccttacatttcacttagtttaatgcactagtattaattacaatttaagattaactcattctccacaaaatcaaaggtctgaaagagaataattttatttatttgcttcatattatcagaagtatttactactcgaacagtgagcaaaatggtttactataaggttgaggctattattcatttagaattgaggtgaagatacaatactttgtaggcaaaaaaagcaatttagtaagactgttccaggccgggcgcggtggctcacgcctgtaatcccagcactttgggaggccgaggcgggcggatcacgaggtcaggagatcgagaccatcccggctaaaacggtgaaaccccgtctctactaaaaatacaaaaaattagccgggcgtagtggcgggcgcctgtagtcccagctacttgggaggctgacgcaggagaatggcatgaacccgggaggcggagcttgcagtgagccgagatcccgccactgcactccagcctgggcgacagagcgagactccgtctcaaaaaaaaaaaaaaaaaaagactgttccatctcatttagatttcaataatgtatttttattaaataatgggggaaaaaaacactgtgaatgaaaaggcatcaataacctcgtccactattttggttaagggaattcaaaatgtaatttttccccaagattgctgttaacatctgccatttatagtcttttagcatggtgctctatgatttttaatgatttgacttcaaaaaaacaacagttactcttttctaatcagaaaagcaatacatatttttgttacacaatttggaaaatgcaaaaactattaagaagaaaatgaaaatcgcctgttatcctatcaccctgaggagtttttgtagcatttcatgcatatgtatgtgtactttgccacacaaggatcatgctgcatagcagccaagaattcaaatgccaggaaggtgacatccacgagtgcaacaggtcaggggtaatggtcaggagtgctgcggagtgtggccagctggagaacacctgccaggtctagggtcccagccttcccaactccagctgattgctgctcccaggtggtatgccatgaatgctacccaatatctaggattttagaaaggacctgaacatacagttgtttaaaagtaaaatatcctaacttttaaatattggaaatgaatttaaataattaacaccatgtgtggcaaactaaacaaatctacagacgagattccaccaaggagttcatctaccacttctacatttatgccttcctttcctacctttttcacttcattttaccaactgagcatttcccacatcattaaacagtctttgtaattgtaaacaataacttttatggaaattcaggattatataacaggcatatgccattatttatactaacacatccctaatatttggagattatattgtttcctttctgttattcttactaatgctgtgatgaacattgttatacacgaacctttgtgtaaaactctacatctgtactattaacttctaacaggcacattactagttcaaaatacagtgacatcttagaggtaaatgtaactaaattgctttcaaaatcattacacaaatttctagtcccacagcaatgtttttaagaacactatacctctggcagccttaatattattttgtattatattttgtttttaattgtagaaatttaacagatgaaaatgacgtcttaatggcactttttaatttacttaataatgttggggattagactttgagctaggcacactgagaacatttttctctctcctggaattactatatttcataaaacaataacaacttatgaggaaaacaattacccagacaaaacagttgttcattaataattaccttaccatgaactaagtgtaagtcaccttgccagaatgcagtttaatatttatacacattccatttctttcatttattcagctttggggactgattaaaccaagaaacagctaaggaaaactactatgtttttgaagagtaaatgacaatgcatatttcaaagcgtaaatttctcttgctttgcagggccaatacatttcagcaaaattggctataaagtgagtcatgtttccctacagatttttgatataaaatcagcaatatgttgttttagcaagaaaaaaatgacaaacttgagtaacaaaaatagcttcagtataaataaagattaccaggttgtggcatgttatatagattcatttgttcattcaacagatatttgagagcctaccatgttccaggcctcatgtcagggactgtggattcaacagacagacactaagactatatgtcataccttatagcgcttttctagctgcaagttcacgcctcaccggagggacttgtgtctcatgcaatgggccaactttggtgtcattttgtccccagtttccaggatgagttgccttcctcctatgctccaattgtgacgtataatacaattaacatgcaacggtgcagtttgcaggctgtgtctgtatgcagtacatgtcatgtactcatagatgaagaagttgatttcattaggcactctatcattttgtaaatttgatttggctaaataaattttcttgtaataaagaatactttatcttatctaaggacttattcctaatgttcccatattcgcctgttagtacaagacattatagatgctgagaagtgaaaatggtcaagcttttataggccctgctttatggggcttgcattatattaggggattcagactcccaaaaaagtgaataaacaaattaattaattacatgttatcattttaagtgctctaaaaagtaagcctactttaggtgggatagccagaaaaagcattcctgagaatattaaatggtattcaggtgcctcacatgtgaaggctgggggtaatggtgttccagatggattatcaagtccaaaggtgctgaggcaggacaaaaaaaaaagaaaaagactgctatacttttaaaacaaagggccagcatagttagagtacaatgggaaaggagagagagacaagaaatgcatcaggagaggtacatagagaccagactcttcaggaacttatagctcatggtaaggaatttagacttattataggtgaaatgaaaagccacagtaatagaaaaaaagctgtaaaaggcacacacaaaaattcgatggtgtttgggggtaaggagtagcactaatgatttcccgggactgaagttgtaacagagacataggactgactaaatttcaccagttgtagtataagaatgggtattttttaaagataaaagacaaactatacccaagattaaaagaaaagttaggcatgttatgaacgaacaaaagaaccgtaagagtatgtgagtaggtagcatgtgactgcacgagaaagacttgcagaacttgtttccaggggaatggggggcagagaagtttgccaagaaggtgatgcagaatatgagcactagaattgtaaaagtctccaccgtaggcaatacctgtacaggcaattctgctgtgaacatatcccctgagtatactgagagatgcctctacacatatcaatacatacatgtatatataatatctgttatatacatatatacacacacatatatctatatctgttgatttaccacattgcatagcaaccacactgcagaaatttgagtcaagtttgtgttactaaaacaaaaacataccctttatactacaactaccagataatggagaaatatgtgtattcactcagcaacacaaatatataccaggctcactgtacaatgatgaacacaaaaagacttggtcccttttttcatgggccttgtaatctaataagatagacaaccaaaaaattagacaaataaatataaaattgcctgccattgtgataaatgcttcacgggaaagttacaaggagatactgagcatatataacagtgagagctatactagactgcaggcgagtaatgattgacttccttgtgtaagtgacatccgagctgagaactgtacaatgtgtaaaagtaaaatagggaagagcaagattgttggaaaagataaggggacatgtgtttcttatagcatgaggaatgattctctgagagacaagaataccagaataaaaagaataaagagaaaggggaaagaactgtgaaggatgaggttggaaggatatatagggcctatatttttatacatacatggcaatatcaacttttactgaaatctttttctgaactatgtaccattctaaacattttacttgtattactcacttgagacaaaaccttataaaggaggcactattattttccacagttagctgataaggaaacagagcccacagagataaagcttcagctaggaaatggtagagccaggctttgaagccaggaaatctcttttcacagtcaactctcttcatcagtactccataagggcttctccaacttagaaaactactgaagagtagtgtctgtgggctgctgtttatcactcaacctctctgtgcttgtttctccatgatggactaaacgcgtacaacagtctgacttcttgtggggatttaaaaaatcagtatacataaagcacttaaaatagtgcctggcatataatgagtagtataagatgccatttaacatgttacctgttgttgtggtggtggttgtttctgttgttttggataataatataaagttggatgtgtgtgacttggtttgatttaagttttcaaacagtcactccaactacattgagaagagtggattggaggcaggcatgcaagtaaaaagaggatcatttatgaagacactctattgtctaggaattagatggtggtagtatgggctagggtggaagaactgaatatgaagaggattgaatggggtgaataaatataaagtggtcaggacttgttaagaattggccgctagggaggaagacagagtttggggtgttgaggatagctatccaggctggtgtggtgcttctgtccactgagggtgggaataacggatygatacaggtttggggaaaaagatcccaagtttgattttgaatctgctgagtttaaagactttgatatgtctaagaagagatatataattatcaatttctatactgcttaactctaaataaaggacacaaagctacttacaaggtacaaattgatgagtcctatgtaccagaaacttcagtgtatgttttacatgccttatttcacaacaacccatgagtgtttattattcctcacgtttttcagacaagtgttcacttaccctggggcctcaatagtcttacttctagtactatcagaaaatttagtcacaaacccagtgtaagttaycaggctaattcttgcatatagcagtaaacacatggagtttacagtgtaatgaaaaaggcaagcattaaacaggtgaattaaacagtgatgagtgctatgaaaaaaagttgaatgtgttataggaatatggagtggaagatctaggttcatcaggcagaggagaaatcagggaaggcttccttgaggaagtgacaaccaagctgagacctgaaagacaagaagcatttagacatatgaaagggttgggtagggagaaaggaagaataatcaagtagggaayatcaggttgtgtgaagattcagattccatagaggatatggcagatcaaggatctgaaagaatgtcaatttgacaggagcagaatgaaaaaagtaaaagcacaaatgtggctgaagaggtaggtggggactggattatatcagaccttacagccacttgagggagtctggactttttcttaaagacaatggggaagaaacagtaaaagatttaagatattttaggaaatttctctgcctaggggacatcgcagctccttcatagctccttgctattttgaaataagcaacttacttttgatagccttattggaagggaaaagagtaggaactacaaactccttgtggttctctctctgtctttccctttctatttttgtatctatcatttctctacattcttattacctgcatgttgcctgctcttccttttggttttattttttaaatgttgctatccagagaaacacctccaatctctgtatggattcaggtctttaccctcttccatcccaatttctgtggtcctttctctattataccactagcaataaaattgggactctttagtctgaaaacatgtctgttttcagtcaaaagagaaaagcctgtttgcttggtgaatgtcttctttattttaacaaacttgagtctaaactggcaaatatggttttaaacattaggaaaatgtcgcatgtcatcttaaatatctaatggaagtctaaacatggttaacacacacacatacacacacacacacacacacactttattattatatgttggccattcctagaatctccatagagtgtttggtcaaaatgtaatcagcccagagcacaccattctggctgtgacaggaattaagcacgtgtcagcataagccatgaaacaatatacaatcacagttcagaaataagcatttatggtattgaatactgtgaatgcaatccctcacatttctcttttcaattatgaaaaatgctacagaagtatgttaaagtagtagtgattgaaatatgttttagttctagttattaacataattctacccaagaaaagtgggcctgcgaaccaagagcttctccttatatttcctcaagtagtaacacttctgagtacctgtacttctttaattccctttttgagaagaaacgagactaactgttgaccgtcacttggggtaagccaagaggtgttgtcttcccactcttactttaccaccaagtcgcacaaacccacaaagatgaaacagatgaaaataggggtacattttcaaggattctatgaatattaatagatattaatatggaaaaattattggaaaattaatatgaaaaattattaatatgggaaaatattaatatggaaaatcggagttctgtgaccgttgatggctttcattaacagatatctgagtcacctaagcagtcttcaatccccttgccatgataattactcaggagccaaaaagagagtgggggggaagtatttgatctgcagtttacagaaccattcatgtttattagaactgacttagtgaatatttttatagaatcttgtatgaggtttttatttcagttacttttttctgtgttaggtgactgagtcagacaaatggaggcttagagcaacactctacttaaacagagctctggagccttgacataatctgaaaacagatgcagggttgatcacagaggagggtcaactcagctggcagtttccagatgcagaataaaggggacagatgggactcacccttccattgtccatctgaccctgatgggatgctgacaagaatgttaatgcagaagtctgttcagcttcactgcaccctaaattcatactcatttatatgaattcctatcttaagaaacaaaataaggcatcaatagctagcattctgccatcagccttgactgaaagataagttctgctgtagtctagcccaaagaactggcccatgcatgtggacagccaagggtaagtcttgaaatcttccttcaacctccttcttagaccctggtgccttcccagacactggtgttggtctggggaaggtcaatctccattggaacacaaaggtttcatcttactccagggttattttttgcataagaaagcattaagcctctcagataatcctgaactttaaacaaccgtgtccagtttctagcaaatagtaaaggttcaataaaacttattccataattaaacatcttttgagaagttgtttcaaaactacatttcttggaccatcaagtaccagccttaactccctagggggtcacaagatgtgccaccttttcagaatacagttgttaccagcatggtagatcaagtggccttagtgccattgtctcagaatagacaaaagtctgaattataccaagtgagcatataatcaggacagtcatcattcatcatgttgtcttgtaccaggctggcctatcatcctcttctgagccttcaagtatattctctcgggttcactcacatcccactccatagagccataaatttatgtctcatgatacagacagtgagaaagacaaaggaaaagaaaacctaaataggaaaagcatgcttttttcccattaatctgcttatacaatctaccgtggttcatggatgctctactgtggggtcaggtctcagggacatcacctgtctggaatcagctaaccgaaacacagaatgaagctaaccagaacataaaatgaagctaaccagaacatagaatgagaacttggaacaagacmtattctctcaggagggactgtccccagtcaggagtcattaggaagtccaacacagagtatctggccagttgagtkagtggaatgtggtatcagagtagacataggtttcaggaagtcaagaatgccagactgcatggagaaatctaataacctgtgactgttctggcctctggaccaggttctgaagcaaatttacattcttgggaagagattagagggaaaccaatacagagctctaatcctagagggactaaactactagatggattttcaggactaagacttaggaacaatccagaaacccagtaatataaactgagtacaatgaggcagcagaatccagagagcaagaaaaaggcccagttatcattagagctagcctcaagcatgagttgaatctaaatcctaggaaggattaggctagatatgggtaaatgattcttttcttaggtaaaaaattgggggaagacatagcttgaaggtgatagtgtctctcacaataaagaaaaaagayatgcaaagtttggaaccaggcttgatgggtaggggaaaagagagagaacaatgtttcttttcttatgctttcttgtttatgattttaagagcaaattaataaaataccatgttttaagctgggagcagacttccacaggaatgccctaatttaatgcttcttaaagcaagctgtgcatcagactcgcctggggagctgattaaaagtgaaggtgtgcaggcaccagaccagatctacaattcagaatcccaaggggcctgggaatctgtattttctgttattttattttatttcttcaacttttattttaaattcaggggctacatgtgcaggtttattacttgggtatattgtctgatgctgaggtttggggtacaaattatctagtgacccaagtagtaagcatagtacccagtagttagtttgtaaacccttgcctcctccctctcccctctagtaatccccagtgtctactgttgtcatctttatgtccatgcgtactcagtgtttagctgtcacttataagtgaacatgcagtgtttagctttctgttcctgttaattcacttaggatgatggcctccagctgcatctatgttgctccaaaggacaygatcgcattctttttttatggctgcatagtaggaatctgtatttttaacaagatctcttggtgatgcttacacaaggctaaggtgggatgccattccctaacatatcaggaaaagttacatacaactcgtaaggaatagaaaatttccaaaaattaaaaacatcaccattgcatgatccatgtgtctgccacaccataaggtctgaaatggttaaaatttactggcgtttcattctatctctgtctctaacacacacacttgtcctttaaagtaaatttcccacttaatcttttctgtactgatctgttaaatatttgaactcarttgttgaagtgattatttgaaatttgcatctggtatttaagatctccarctgaataaataccatgctgttaatcaaacaaattcattgtgaaaaggtaaaaacatgctctgtattaatttcagtaactatttcaggcattcgccaacaaataaatacccagtgtaagttaatcatctaatccaaagttcccaaaagttcacaatcaaataaaccaaaaccccagcaatgatagattcttgtaattatctttatcacgttaatgtctgtgtataattactcacaatataagattatgtgaaaacagtcagctctgggactggttcccgaaacaacaaatgctttatcttataaattaataacaacaattagcactttacagaccttttcatccattggtctcattgcaaaggcgaattaatttgattgtaacataacttcctggaacaaaagcatcatccttgagattaaaaaatgcatttaagtcattgtcatgatgagaatccattttttggtacagtttctttaaaaaatgtgttttccaattataaccctatcccttaactgcattaaaaggcaaaaagaaaaatgtctttggagaaaaaaatatttcataattttatttcatttattattattatttttgagacagggtctcactctgctacccaggctgaagtgcaggctcagctaactgcagcctggcagcccaggttcaagcaatcgtcccacctcagctttccaagtagctgagattacaggtgggcgccatcaagtccagctaattttttcttttacttttagtagagtcaaggtttcaccatgttgctcaggctgatctcaaactcctgggctcaagcaatctgcctgccttggcctcctaaagtgctgagattacaggctcacagccaccactactggcctattttgcaattttaaatgtatctctggtgggaaataggactgtaagccaagcctcttcactrtaagattaaggttctgtccacaataccacccagaaaatgagaatgttgtatggaatgtttcagagaacacggaagccacagctactgcacatgtctaggaactaatttctctatccaattagtcttcactcataatgtcccttctgagtccataaggagttctcaaaacatcctcctctcctaaatctttcctgagtactaagaattaggcatcaatctcagtacttgacacatttcttacccttaaaaccatagaggttgacttttatggatttattgaaaccaaaaataatgtctatatatcaaccatgcaagcaagatgtatgttgttaaacctgagggattcttgttagagcaaggatactatgcccatcagctaaagataagtcctcacatggtgttcataagactagctgggcttcctaagtattccctcctccatacatgccacggtgtgattctgtactcagtccctgacctcacagccagcccaggaacaattagaagttggaggtgctagcaaggggacatataatccctgacttcagcaactcatcaatttctttgtgtgagtctattttcttaaaaaaaaaaaaatgaagagtcacctgctctgtcgcctgccaccgctgctcgggcccgagtggttcactgcaccgtgaagacagattccagacaccgggaactcacgcctccaatcccagacgctatgtccagcaaaggctccatggttctggcctacagtggtggcctgaacacctcctgcatcctcgtgtggctgaaggaacaaggctatgatgtcactgcctacctggccaatactggccagaaggaagacttcgaggaagccaggaagaaggcactgaagcttggagccaaaaaggtgttcattgaggatgtcagcagggagtttgtggaggagttcatctgggcggccatccagtccagcgcactgtatgaggaccactacctcctgggtacttctctcaccaggccctgcatcgcccacaaaaaagtggaaaccgtccagcgggwgggggccaagtgtgtgtcccacagccccacaagaaaggggaacgatcaggtccagtttgagctcatctgctactcgctggccccccagatgaaggtccctggagggctccctggaggatgcccgagttctacaactggttcaagggccgcagtgacctgatggaatatgcaaagcaacacgggattcccatcctggtcactcccaagaacctgtggagcatsgacaagaacctcatgcacatcagctacaaggctggaatcctggagaaccccaagaaccaagtgcctccaggtctctacacaaagatccaggacccagccaaagcccccaacacccctgacattctcaagatccaattcaaaaaaggrgtccccgtgagggtgaccagcgtcaaggatggcaccacccaccagacctccttggagctcttcatgtacctgaacgaagttgcaggcaagcacggtgtgggcttattgccatcgtggagaacatcttcaccagacaaaggcccaaggtatctaccagaccccagtaggcaccatcctttaccatgctcatttagacatcaaggtcttcaccacagaccgggaagtgcacaaaaccaatcaaggcctgggcttgaaatttgctgagctgatatacaccagtttctgacayagccctgagtgtgaatttgtccgcccctgcatcgccaagtcccaggagccggcagaagggaaagtgcaggtgccggtcctcaagggccaggtgtacatccttggctgggagtccccactgtctctctacaatgaggagctgatgagcgtgaacgtgcagggtgattatgagccgattgatgacaccgggttcatcaacatcaaytccctcagactgaaggaataccattgtctccagagtaagttcactgccagatagacccctgtaccatgaggagctggggcctcctcaatttgcagatcccccaagtacaggtgctaattgttgtgataatttgtaattgtgccttgttctccccagctggcaacctagtggggctgccaggccccagctttgttccgtggtccccccaaagcctgtaaacatcatcatggaagggaagggtgtggggaagctgcggtggagagctataaaatgacaattaaaagaaaaaaaggcagggcacagtggctcacacctgtaatcccagcactttgggaggctgacgtgggtggatcatgaggccaggagtttgagaccagcctgaccaacatggtaaaaccctgtctctactaaaaatacaaaatacaaaaattagctgggtatggtggtgcacgcctgtaatcccagctactcaggaggctgagacaggagaattgcttgaatctgggaggtggaggttgcagtgagctgagattaagccacggcactccagcctgggcaacagagcgagactctgtctcaaaaaaataaaaaaaagaaaagaaaaaaatgaagagtctcttgaaaaagatttgccaaaataggctagtactgtgtgattaaaaagaaaaatcatgggttaatacaataaacatttatgtcagcatatctgtgggtctgaaattcaggagctgcttaaatggttggttttggctcagagatttttcaagaggctgtgctcaagatgtcagcccaggttgccaccatctgaaagcttgaattgagctgtaaaatccatttccatgatggctcactcacatggctgttggtggcaggccgcagtttcttaacacatggacctcttcataggtcagcttgagtgtcttcatgacaatgtagctggcttctttctggagagagataacaaggagaaagccttatatacccttatgtcaaacattacacactttcacctcaaccatattcagttcatcagaagcacgtcactaaatacaacccacagttaagaagagggaaatcagagcccatctttcaaagggaagattaacattgtgttgacatattttaaaaaccaccacagggtctattccaggcttttgctatattctgcaatgcctgcattacaaaccagggcaggtcctaaagatgatccactctttttttttttattttttgtcatgacttttgacattatattattattttttaattccacaggttttgggggaacaggtggtatttggttacataagttctttagtggtggtttgtgagattttgctgcacccatcacctgtgcagtaaacactgaacccaaaagattacccactctaaactgaatataatgctgatcccatgcatgccagtaacagtggcctacactgagggagagagtcaggaaacaagggacaatgcaagacactatggttatttttaaggctttataaagtgatttaaaatctgcactggcaatttcaggacagtttgtataaataaataataggattaaacagttgcacctctcatggacagtttgaccgcccactagaattgagtctgaagtgcttcacaggatatgctaacattggacagtcaacctctgaatcccccacacttatctgagcacgttcaactttaccatcttcttctctctgctaagctgaaatcagtgtattgatrtcttggtgggagagtggaacwagagttgctaaactattccctggatggaaaactgaagagagaaggtgtcttcttgttcctatgagtcaggatatttaagtcaaactctgctaaatattcctctatggagcaatggaggagacatcagccccaaaatgaatattcttctctgtccactgtttttgtggcttactctgcttggatgttgctcccagaatgctgtattcagggagtaatttagaaacctctctctctgtgtcttgcacacacgctcactcatgcatacaccaccctagctaatgtatcagattttttaaaaacacattgaaacttttaggacactagtgtctcgtgtagaggttaatggaaccataatatatccttggttatgctgagtgacgccttagtgagatgtctagcattcccagagtacagaaagtatcttttcaaaagtaataatgatgttgttgatgatgataataaagtgtatattatattccagaagttgtattagcagcttaacatacattctcttattcatttctcacaacactgagaggtgaataatattattgttatgcccacttgacaaatgaagaaactgaaccttgaaattcagtggcttgcctgaggtcakccagcaaataagtggggaagtagggcttccaacccaggaaatctgaggccagattccacactggtacctagcactgaccttagaatgagtgccccagatgattacttagtagaggagcgaatggatgaagaaggaaaagaagagtaaggtcttgttgagtctttctctctaaacagtatcatggccaccaattataaggcttgatcactcgttatttggacatatatttttgtgtctcaactagactggcaacttaatgaataaatcttgtctcatgggactatctattccctcctgggtaaatagaaaattctggataaattacctctgtaatagaaaaaaattcatgtgactcagaagtctcagaagactatatcacctcttcatgttcagtaatttattctttatttctgaatttcttaatctaccaaataatagtacccacctcctaaacattcatgagtataaaactaaatgagataatatacatattaaaaataacaatctatcacatagtaggcactcagtgtaatttatcattaatattattctacaagtttccattggtccaaaataaaatatatatgtatgtatgtatatatatatatacgtgtgtgtgtgtggagatatatatatacatatatagatatttatactactacccctgctatttgaaataactaccatttgttatgtatttaatatcttgcaagcattttagaaggtgattcttatatattactaattttaacaatggcactctgaggctcagaggggtctgccaatttacccatgatcatactgctagaatgtgcaagaggcagaacataaacttaaatctatgtgattctaaatccagtgctatttccactaaaatgaagaacataatctgaaccaggttctctttgtctgctcctctcaaaatgtgaagttcagattttcaccacacatacatagtattccaggtaggaattctgcttgtctctcattccacaggcatgcccttacatcctatcctgaggtagaacattgttttcagaggagaaattccacctttttcatgaggctattgatactgccatgctgtcatttcaaagaagacggacttggagaaggcagtcaccacaaccctgttggacattagaattcctcactgatgtgaggaatctaaaatcaaaactagaaaaggtaatctactctcattgacctacagctgagaagatagagcagacttgcctcttaaaaaggtcggaaatgctgacccagcatctctcaggacagttatggaaaggagaaagtccattcaggccacagctacctgtcttctgtggcagtaaacatcgtttctattgcaacaaagggcacctagtatcaccccctactgagtaatcactaagaaagcaattctattaacaaaggccacaatgtcagtttcttacaagctagcctaagcattatgtataattaataactcctcctttatcttaaatcagattaataaagcaagtgtgtttttaaaacataaccaaccttgggatctgaataggacaggggtaggggaagtgtaatgtttaccaaccacactgctttcagagtctttgcatttacgtttatgctacttttctacaaagcgagtggaaaatagacacccttatttgaatactgattatatttacatggagtattcttaatttgttgtcagtagtggaaggttatatgcaagagaatataagttaccaataatttttaatcatatggccttctgaaatctgctcatagatacttagtagctttacttcattttcctgactcttcttattctgataatcaaatcagaaatatactaattcttagcaatatcaactttaacaactaataactactgagtgcttactctggcccaaacactcacaatctcactcaacacaacagctccatgagataggtattattatttattctattttacagttgagaaaactgaggcttagaggttttaaaccaacttgcttaaaaagtccttactcttaaccaaaggtagagtaaatacttaataccaggtatgtcagtcattagtctctgcccttaactaccacactagagtacttccttataaagaaaggagaagcccagagcggtaaaaaatgttgcattctaaacatgtctgctttggtcagagtatttcctaaaaagcgttccaactcccatttccattttcttggtggcctagtccaacccaagatctttccttggtctacaagacaagaacaagcaactgcagtaagaattcatttatgccatctattccatgaatacttactgaagacctagtctacatccaaaccagtagactaaacactgaagaaacgttgcctcaagaaatagagtctacccattcagtgcacaaactacacatagaagcgcatagctggacacctggctcagaatgacccaggggaagtgttatcacagctgagacctgaggatgatgagggtattttccaaggcaatgtgtatttatatgagctgtggcctcagtatgtcctcttcttcctccagaatattgagactggtcctcttcgtggattttgcaaaattaaaacaacaattccaaccacctatcagttaagtaaaaagaaatgtaatattttgtatcaaagggaaatgtaacaggaccataatattatgatgcaggaagtgaagatagatgcacaactttcagtgaccttagcagactatcagcatttcactgagccattctctttcttgttattgctgcataaatatgtatataaaagcatatatatatatacacaagtaactgagggtcaaacactcagctcttcagagtatagaaaggaaagagggtcacaggccgatattcttatggtaaggtgacagagcccctcaatcctgtgattgtagcatgttcttttatttgagtaaggtgtacagttgttggagaattatatagctgtcactcaaaatggtgtaacttactcattggtcaacccaagcattaagtacatttgctccttcagttgctgtcaagcccagagggagtgctgaagtcagctactgccctggctggaaggtctcagggaaatagagaattgggtgctttccttgcaacaagaattggcactcaaatcgtccctggtggggatggcaaattaggattaatgagaacaatgtgtctgtgctcttttgctgaaacattggttcacttctgtttcaattgacacccaagattatttttttttgcttacaaagattttcttattagggaaaaaagtggcagatttgccatcctagagcctgctgaatgacaaatgccacacttatgtgtgtacataggataagacggtaagctttgcaaatgtttcctagcaggaaacatatcccaggcaaagggaagagcatatgcaaagaaaacatagtatgttcctaacttcaagcaatatttttgtcctataataaaggtcctggtgaagaatgtcaaaagtgtttagaaactaaacaggagccagtgcacaggtcatgtaaagaattttggcttaagttagctggtctaattagatcatgctatttagagtgtagtgagaagtttcctaaagagaaggtgctagcccacaatctgagaacttgaatgagttgctagaagatgctcgacctc

SEQ ID NO: 93385 - DNA, 42419 bp, Homo sapiens
agctgcaaatgtttactgggccttgagcgcatcaaatgtgctatgtcccaggccgtactcactattttgtcctatccctgccaccccaaactgttcatcccccatcccagttaatatgctcccattcactcatttccttccatgttttttctctttttaaaaaaactctaatcccataacagattacacccgcattaaaaaaaaaaaaaaaaaagagtctcattatgttgctgaaactggactggaactcctgggctcaagtgatcctcccacctcagcctgcagaagagtctctgcccacccccattttattagccatttatatccattcaaccttcaaaattcattaaatctgctcctctccaccatccccatacctctgccttgtacacatctgtatcttctcttgaatagactccagtccaccttctcaatatccccagagccatcatagtgacctttgaaaacacaaatgtgcctcccttcctaaaaagtcattagtggttttacatcatacacagaatagagatcaaagttctgagcccctgttacaacattgcatgtttgtccaactgcctagactctgaccgccaccaaggcagggaaggtctgcctccgttatctttgaattcccagtaactgcttggatacacagaatatcatcaatattaagtgaattactgaaagcaggcagaggaaaagtataaaaagcaacctagttttaaactctccctcatgcaagtttatatgatgcaattttctacaactctcactaccagctcattcatctctgctctgaccatgaatagcaaagaaatagaaatcatattttatttgacaattaacaaaagacatatcaaggtgggtatgtggtctcagtataaatttttttatactaggtcctgaccctaccatttccaggtgtataaccctgggtcagagacttaatctctggcctcaatttcatcatttatgaattggggataataatagtacctaattcaaatggttgttaaatgaggcagtgtgtggaataagaagtgctcaataaattatacctgtagttgttacttcagcagaccccttcattaagcctgtttcattaaggcttctaaaaggagtagaacgtacggttcattcatggagaactacaaacaatgctgctttggacaatggaaaacgtgcatgcatttcctagaagaggatgtaacatgtctttactttttccatagagttcagcccatccaaagtcagcctcacatggaggttggggagtttttgtatctttctcttcctgctcccctcttttctcccagtgttttcttcctctctgtcctcttccccagggttcaatggctcctggaagagaggcagcaaagcctatagctctccaaataaataggcttgggtctcatggggacaggcaagccaactggcctagacgtgaagtttacaaagagccctaaatgttgactttcaacattatctcacaattcatttattcatacatcacaaagatacagtgacacaactgaaaaaactcattcattttaaacttgagttccatgactggaccactcttcctatagcaaaccaggaataaatattttttatgaattgcataattattttgtaactagcacattacattgtattttatctctgtttatgaatttgacctctacaaacaagttaatatcattcaacctattatttgaagatgttaatttgttgaacataaatattaaaaaaaaactttatgtttctgttatgccatttcttcactttttaatatgttggaattctcagaaaacggcctggctgtggggaggtttcctttactctttgagaagccacggagtgaggcatctacaaggcaaatctttcttttgctgataataaccatctttgatagcatcccttcaatgcatttttgttccctttttaaaacagaagtaaggagaagaagggataaaaggaatatggagggccgaactccctgtcacatattatataaaattacaataatcacgagtcacctatttcacaaattactgtgagcgttacaattaagaatacactgcaaagaactttaaagagttaaaagtacaattatgaaaggcagtgtgctccagggaccatttcagtctgtgaactctttgtttctggtccatggctagttaagtataaaaaattgaaagtaagcatttagaaactgttacagaaatttgacaaagtaattttatgtctgttgaaccaaataataaaagatttgggcttgtattttgtatgtctggtttttttacttcctcttccagtaagtcattttcattgcattttacaaaggccaagaaaaacctgtccttcactgcacatagtttgagaagcactgataaaaggtattattatttctgaaattttgcttaaaaaaccacttaataaccactaaataagtcagaagtcattatttgagaaatactgtttcataccaagtataaggagttgccagcacacaagcaagttccagaacaagtttgttttgtattgagtaacttggttatttggtagtcagaaaccactttccccaggaaacaaacgtaaaccaggggttatgttcttggtgtggcctatacatcctagttatctcaaaagacagctaaactatactatacaatgtaacaaccactataacattcttacaatggtttctgatttccaaattagaaaatacgtctcatctccatccccatgtgaggaatgacaattccagccctagcatggtggtggggctgggggtaaagatggatactacttctgcaaaagttgcttcaaccgcaacattcagaaagagaaagaatatgggggtagaagattcctcacacagattattgggggaactcactggtcatgttaataaagttaaaataaggtttccatttctcttgattctctgagggtgagcttaggtaggttttggtggacttgaaagtcctggctcattatcacaaatgcttccatgctaaatcccaaggtgttgttcctcctgaccacccagcaccaagatggcaaacaggtttcatcctgaactgaaatctgttccctagctcagggattcttatttcccttttgttgttgttttaaaaaattgtgaggacaagtctgggtgtgatgagacactttgccaaaatcaattagtgacgcctaccatgggccagggaagaaaggaaagtcagcacaaaagctggttttggttgttgttgttgtttttgctatcctgagactagcctaaaagatgtagacctccaaccctttaatgtcacctggaaccaggttgaagaacatgactattaagaacatgacttttttctttttaaaaaattgggaatagcaaaagggaaatagacagagaatagcatatacttggatattcttatttgccatctatgtggtttcctcattttgcagaacttgtggaaagacacggtagcctggctcctgacccagaatccatgaggcatagttgtatgtacttcccttggggcctaagagattaagagagaagcccagacaatagtccaaggccctctgctttaggtctttcttctaaattctgattctttaatttttttttttttgttaattttaattttttttttgtagagatgggttctccctatgttgcccacaatggtcttgaactccccgcttcaagtgatcctcccacctgggcctttcaaagtgctgagattataggcaagagctaccttgccaggcctaaattctgattttgtatctgaggctcttctcttcctcaataattgacaccaaaaatagtcctagaaaggagattccacccttctctaaacagtcatagccttagcctatgtcagagttcttaacccagtggtccattgatagttcagaggaattaatgaccttggataagaaaaaaaaaatcttgatttcaaatggaatttagcattttcttcaattacaaaactagcagacaaacctcagaagcatttgcagtactcgtgactgttactaatggaaataacagttattttcattatttcattatagttgttttcagtatcatgaaagaacatttgcactcctctttatttaaaagaatgttgctagatcttgttatttaatatgttaaataatgttgcacacattacattaccacattactatagcaaaaaattatgttttagatattttaacaattacatttcaattgttgacctttaattttaaagctaaggcaaaattaatgtaagtagagagtttatttgggccaagtttgagtactgcaacccaggagtatagattcaagtttccctaaatatacactctgattagcagcagttacacatagatttttaaggggaaggaagaggcagttcctaaattccttgcgttaaaataacataagctgtggattggttatactttgttctttgtatcataaattccaggaatatgaagataatgggtgggacagctactcgggaacaaaatgtctttaaacaactgtccccaggcatgggtattggggcgtgactgaagtcccatactcatgttgctctgggcctgataaattttgcatacctcacaaagctcagactgctctcagctattttttttccttacaatgtaattgattttctttgcaatctatacattttattcatttatttaaaatttttttttcttctttctttttttcatgaaccgcacagagaaaatttatgcattttattgtaagcatttataaacattattctaagaagttatccacaggctcaccactgccagaagggtccacgacacaaaaaaggtaatgcctcatgggctttcaaaggacaactttttacttctctttctaccatccagtataatccaatatccttaggactgaagcagagatacacacacacacagggagagaggtgtttgtgcttttttttttttttttttttttttggtgagaggcaggtgggaaattggcatccacttttatttactggttctttataaaactgatatttgttgaaaattgtcaagtgtgaccatttctgcctacatattgtagggtggcaattaaataccgaaaaccattagaagcttatttcagatgtactcatttattgtaatggtatcaatcttgatgggtaaatttcattttacttttaaaattgtattttaaattattccttcatgttacggttgttagagtaaaaacggaaaagaaaaaaactacacttcttccctttgagtttggatgaaaaagacgtgtctaagtccttaagtctgtagtctggaagtattaatagaggctgggcatggtggctcattcctgtaattctagcactttgggaggctgaggcaggaggatggcttgagtccaggagtttgagaccaacctgggcaacacagcaagactcggtctccacacacacacacacagacacacacacaacttacacacacttagctaggtgtaacggtacgtgcctgcggtcccagctactcaggaggctgaggctggagggtcccttgagtccgggaggtccagactgcagtgagctatgattgtgccaatgtactccagcctaggcaacacagcgagaccctgttaaaaaaaaaaaaaaaaagtattacgaggcacaggatgtttatttattcgcaactacgtcctgttataaaaagtagtgattccaacgtgaaatatttacacgacgcatcccgttactttccctcccttggccaccgacccccatccccaaaagctgctttctatgtaagtttctcactggaatagcgagtgagaaatgtgtttgaagactagggaaacgagaaaggtatgcgggctgctagagggtttcgggtgggttgtttgaaaaaggaagtgaaggaattcaaagtttcacatcatgagcctaatgtaaggcgtgtccgggccgtcccgaaggtatctggggaaataggtttgtgaggacaaagaccagggccaggcccagggcggagcctccgcggccccgacgcagggactcggcctaggcggaggacggggcggagcgcggccggcaccatcgagccgggaagatggcaccgcccacggagctgctggccaggccggagcgaggcagcgcgcccggctcccgcgccatggggcggctggtggctgtgggcttgctggggatcgcgctggcgctcctgggcgagaggcttctggcactcaggtaggtgggactcccgcgcgcccctcctcggcggtccccaggctcggggtggccgcgtggtgcggggagggcgcaggctgggggagggattcctgcgggacctggccctgcggccgggggtggagaatttttgaatgctgtccctcccccagctagttgaacccccatcaccccgactctccgcttctagtgaaaaaactagcaaagtttggagtgaatcgcgacactttcttgaaagtttataagcccttgctgctaacaaagttctcttctgcttaggctgacaagagaatgctttgcaattacccaagggccaaactagtggtttaaattgaaaacaaaatgactactcatgcattgaaaccttaactatgaagatttatttcaggtcattggtgctgtttctccttgttgcccaaaccagacccgtctttaataaagttgttctccacccatttctgcatagtttgagaaactcttcagctgtmgatcaaagacacttgaaatattcagctactgttcttacttcctatttattcaccagggaagcctgaagccagaatgccagacagcgcagacactattccatctcgcattttagttttaatgaaaatctctggtaggtagacatcatcgtttataaattaccaactcaacgtttgttttttgtttattttattttttgtagagatggggtcttgctgtattgcccaggctgttccctaactcttgcactcaagcaatcctccagcctaggcctccccacagtgctgggattacaggtgtgagctgttctgccctgcctcaaccaaaattttataggcctcatgcaaaagagttccagaaagactgagcacctgctatgtgtaatgttctctcttaggcttctatagtagagtacgacccttatggagtttgayacaggggaagagagaattaaaatacagtaaatgtataaattaggatgttctaaggacagacacaaatgaaccgcataggcttaaagaggaaagattccatcccctgagggtggagttctagagggaggaagagacattcgacctgaccttgaagggtgggtgcaacacatatgagcatgaaggggcccatgccaaatgtatagtgcagcaggagcaaaggggctaaggtgggaagttggaagactagcaaatgggccaatttgaagggarcataaagtcaggagatgagaatagtagggtggtgggaaggataggttttgaggccattaaatataagttgaaaaatggggccccactttcataggcccaatagtgcttcaaaagggaaatattggtgggttttgcttttcaacaagaacttaatataactagttgtgttttatagagataagcctggaaggggggattggaggagarcaatggttctctgtacattagaatctcctggagggctggtgtctgagtggcaccaccaaagattctgattcagctgttctggatcagaatctacagctcacacctgtaatcccagcactgttggaggcctaagccagaagattgcttgagcccaggagttagtgacaggcctgggcaacatagcaagatcccacctctacaaaatgaataaataaataaataaataaataaaaaacaaaatttgagttggtaatttataaactatggtgtctacctaccagagatttttcgttataattaaaatgtgatatggaataatgtattgtttggcaagctggcttcagggttcccaggtaaatagataaataaggaagtgcataatgtaagaacagtggctgacagtagcagtggcattttttatttttaaaaacattcctgataattctaatgagcagtcaaggtcgagaactactagaatagagagcagacatggggtaactggttaaggtattgcagtaggtcagagaggataacagggacccaaactctggaaccccagggatgagggagaagtcaaaggtgctaccagagtttgtgccacagctccactgtcccatggttgtagtttcatctactgataaagcagtgcaaagaggaagcgtgtggtggctgagatgggagtgagatttgaggaaagaacgcttatgggtaggaaatggacatgttgaccttaattttcatgttaggtaatgcccattgtgctctacagaacattcatgagttggatgactttgtatatgatctgtcctgctctccatttcaaaggcaagaccaccaaaattcacaagcttattatgttgtcactaatgtgyaagccaccagtttttctgcaagttggaagttttctcaacagtcaaatattcccccttctcactaatcttaaggttttaaagttatagctgcaaatctaaaaaaaaaagaaaaagtaaataaaacttattgacagaatgcctgatagtttatttacaggtttttgtttgtttgttttttgtttttctttgttttttattttgacacaaggtcttgctctgccgcccaagccagagtacagtggtacatcaaagctcactgcaatctcaaacacctaggcacaagcagtcctccctcctcagcctcctgagtagctgggactacagatgcatgctaccatgcccagctagtatttttatttcttgcagagacagggtctcactttgttgcccaggctaatctcaaactcccagcctcaagtgatgctcctgcctcagcctcccaaagtggtaggattatacacatgagccaccaccctcggcctactttacaatttgatgcaccttttctttacgtgactgtgatgcactttaatgggcagtgactttataaaatggtaactttattggatatgtggagccccaaatgggctgacgtgagaatgttggggtaggtggtgggtggctggatttagcaaagaaaaatgtaggctacccagttaactttgaatttcacatggattttttttttttttttagtataagcatgaaatacttataccatacttttagcattaagcgtggaatttgggacataattatactaaaatatcattcattgtttatctcaaattaaaatatcactgggtaccctgtattttatcatatgttcgagtgccttctgtcagaatttggtgaccctttgagtctgttttaaaaaggagcatgtttggccggacacagtggctcacgtctgtaatcccagcactttgggaggctgaggcgggcagatcactagaggtcaggggttcaagaccagcctggccaacatggtgaaaccccgtctctaataaaaatacaaaaattagccaggtgtggtggtgcatccctgtaatcccagctacttgggaggctgagtcaggagaattgcttgaaccccagaggtagaggttgcagtgagccaagattgagccactggactccagcctggacaacagagaaagactccctcaaaaaaaaaagaaaaaaagcatgttcccacctccccataaggaaaggctcttcagaggaagttgaaggaacagaggctttatgtttgatttttgctttaatctgatgcctactgtttgattattcaatatttagagatggtactttggcaatcaagttatttctctccccaggttgcccacttcaatttttagtataaggatgtcccagagggataaatgccatcaaagttgtctttcttcttctgaactgtaactgggattccacaccctccttttccacccctccctagttgagcaataaaggggaaaataacagtatacaaatattcccaggccagttcctggtgtcaaggtacacagccatggatgaatcatgaggcttgagtgcatcagagacctaagcgtgggcaggaacccccagagtacccatgtgaatgytctgcttgctgcctcgcaccttttatgacaattcccacaagaagctatgtggtctgtttctacttctgaaggagcagcctttttccctttttttttttttttaaaccaccatcctttaaatcatttattatgtaactcttgtgtgctggtcagtcagtgtgtcaaaagtgtaaaaacttctttatttatttttttaatctatcttttaaaaaatattttctttctttttttcttttttcttcaaggcaggttcttgctctgtcacccaggctggagtgcagcagcacaatcatagctcattgtaacccagaacacctgggctcaagcaatcctcccacctcagcctcctaagcagtgaggactataggcatgcaccactacacctggctaattaaaaaaacatggccgggcacggtggctcattactataatcccagcactttgggaggctgaggcgggtggatacctgaggtcgggagttcaagaccagcctgaccaacatggtgaaaccccatctctactaaaaatacaaaattagccaggcacggtggcacatgcctgtaatcccagctactcaggaggctgaggcaggagaatcacttgaacccgggaggcggaggttgcagtgagccattgcactccagcctggcaacagagcgagactctgtctcaaaaaaaaaaaaacaaaaaaatttttttgtagagatgggggtcttgctgtgttgcccaggctgatctcaaacttctagccataagtgatcctaccgcatcaacttcccaaagcactgggattatgggtatgagctactgagccctgccaaatttctttatattaaaccaaaacgtacatttactgatatttggaaagaaagctcttttacttttatgccttcatccagtcttcatagatatcttcccttttacattataactgtaaatactgaggttagagaggttaactagttagttcaacagaataatataaatattgaataatataattaatgaataattagtgctgaacctgtcgcctcagccaggtctcctgattccaaatacagtttgccccagctccccacagtcttctagcttctctgccagtggagcaaattttccctaggtttacaggcctaagcacagattcttagttacttagtgcaagtattgccagagcccaaggggtgaattccaaagggtttttacaaggctatacataaaagataaagccctggcttgtatatcacttgcacataggagataaagccccagcagttgtatgtaaatttcaaaagcagagaagtatggcacaaagaaactcctgatagtaacactgtgttcccactttgcttaggggcatattggcaccgtagcatggtacacccttactgctacctgccatgaggccagataatagctagcagcccctggtctcattctactctggatgggtactgctgtttcctgaatgaaagacactgagattgatttcatgctaatgactgttggttaagagttcatgctttctattcacaatagcaaagacttggaaccaacccaaatgtccgtcaatgatagactggattaagaaaacgtggcacatatacaccatggaatactatgcagccataaaaaaggatgagttcatgtcctttgtagggacatggatgaagctggaaaccrtcattcttagcaaactattggaaggacagaaaaccaaacaccacatgttctcacttataggtgggaattgaacaatgagaacacttggatacaggaaggggaacatcacacaccggggcctcttgtggggtagggggaggggggagggatagcattaggagatatacctaatgtaaatgacgagttaatgggtgcagcagaccaacatggcacatgtatacatatgtaacaaacctgcacgttgtgcacatgtaccctagaacttaaagtataaaaaaaaaaaaaagttcatgctttgtggacaggtagcctgagttcattcatagctctactatttacctgaaaccttggactaattatttcacttttctgtgccccagtgttgtaatctgtaggatggggtactgcctgctccacagtgggactatgagaatgcttaaaataatgccaagcgcacagtcagctcaataaatgtcatctatgtagacaatgaaattcaagcataattccttaaacctttgtgccatacatccctttggcagtctggtaaagccttcattccttctcagcatcatgtttttaaatgagtaaaataaaatatataggattacacaggaaaccaattaaatactgctaccaagctatttaaaaatctatgatataatatgctttttwaattaaacccttaaatggatctagaggtaggtaaatgtctaacagcagatattttgaagttgcaatgaatgtaaatggcactttgagctatctacaactgaaatgcgatagaaaagtatctataatttctattagtgacagtcacaaatactactaatagtattgtggtttgttgcttatactcatcatcaaaggaaatactcaatttgagttaaaggtttaaataaagatgtatttttcccccatccaagttcatggatccctgaattctacccatggattccttggtcactggactccataggggtcacttggggaatgattgtgacaccaatgaaggaagccagcggatactgtttgctgtattatacctaccataggctcgtgatgaggaaataataaaataaataactgtaatgaaaaagaaaagaaaggaaaacaaaaggaacctaaaacagagaaggcaaatagctttccttttgagtgtcaattttaacagactccctgtggttgcgaaacaatgtgtctgaggctggctctgggttagagggagagtgctgttattgattagcaattcctgcatgacagcagagtggcaacagccatgcatctctgacctggcacagtcataagcatgttatagacataaagtgttagggaacaaataggctctagcaaaagtaaagagtgttcctcctctcatatcatcacttatatgtgtttataccatttatgttgtattttttacatgaatacttttagatttattaatctaatccaaaaaggtttgtatagctttctctatattaagagaaatatatgtatttcttaaatacacaaagttcttaaatctgatgccagcgaggattgcttccagccacaagtaacatatatcagattaatagtagttcattcaaagagggatttattttcctcacatgaaaaacagctctgtgggtgacccaatatagagcttgttcattgagccagtgattatatcaaggaactgggttcttcatatattttcattctttgatctccccctattgactttatagctgtatctttctcaaggatgcagaatggctgccgcagtctcaaacactgcgtgtgtgttcaaatcatgaagaaaggagattgagtgatgccagctagctctcttctcgtgactctcctttgtatctagaacacagtgtctttccccaaaacctgggtcatatgactacacctcaatacagcggagtctgggaaagcaaatatttgctttgcccaccactacaatagaaacgacaagggagaaagaaagggggttgggcatggcgttaattttgtcagccgctagggtctgccacccagaaaacagaagtccactaacaagcagggaactgattgttctgccagggaaaaagtctggcagtttcctactgaagaaatttggaagtcttgatggtccaggaaggataaaggcaaaaccttcattttcttttatcaaaaaggaaagccaagaaaaaaattagttaagtagaagttatgcacaaccctcatgtaactcttccatgttaatagcaggtaggctgcatatgaaaacatgatattatacaagaaaactagttgatgaagattgccctatttagcaccaattacttacgcaaacctaagttgactctgaaacaggaaccccatattaaacttttcaaacacatcagaatatgttactttgaacagattttatttaatccaaagagattatctttgaaaaaggtagatggtaaacatcgttatccctatttttgtatagtcaaataggcatagtagtaagttgtgtaaaattgacatccaaaccaatgcatgatactaaaacttggtgtacaaacagcagttacatcctattgctttgtatctacatctgtttctggagtcatataacatttgtagaatcttggaggtgttttaggctcatccttattttatccataaagaagactgacacctatagagattaactgacctgccaagggtcatggcagtttcactgctgagacaagaacacagatccctttacttctttctgagaaaagtacaaagtagtttaaagcaaaagcttccctgcttccagcacttctggctaagttgcgccgtgggaaaattgttttgtctgattcagttttctcatcttttaaactggaataatgctacctaatttacagggttgtttgaagaattaaatgaatgcatggaggtaaatcacttagaacagcggtaaattatacttttttattatttatttcctttgaccacccacaattatcatcagtgtcatcctcatcatcacaattaagattactaccacattaggctacrtaaactttttttttctctctctctttgttttataatttcaattttattttagattcaaggggtacatgtgcaggttttacatgggtatattgtctgatgctgaggtttggggaacaactgatgccatcacccaggtagtgagtatagtaccctatagtttttcagcccttgtctactcccttcccttccccttctagtagtccccagtgtctaccatcgtcatctttatgtccatgtgcaccattgtttagctcccagttaaagtgagaacatgcagtatttggttttctagcttatttttcctctcttaaatcacttctgtgacacgtaggccatgagatttattgtattttttaatgccttatttaaaaatttgtattatttaatacatttaatgcattattttttattatatttaaatattgatttatttgtactttttgccttattgctatattgtttcaaaaaaattaacattatttgagttacatgatttcaaatacatactgattaacattttaattagaaactttatgtctgatatgaattgccaaaatgtgtagttggtacaacctatgagtcattctgggttatctagaagaaactggtagcctgccccatactccagaagccttccccagtgtctagacctcagaagctgtcaggaatatgcacaggagaaggacacatggcaaatagctatttcgtctcttaaatgtatggtatgtgggaaccactgaaaaatgtaaagtttctacaaggtgctatttttattatttatggctctagagaacagagaaggtgaaaaatgtgagagagaagggaaagccaatagtatgtggccttcaaaacaaaagatcccacagatattgtcccaaactgcttcctggccctctagagtggagagggagggggaagacatcctattagagttcaacattctcttattatttccttcttttaattttctgggtatacaacagcaaatagttttgctgaagtagttacagaactagttggtgttctccaaccttcctattccaatacatactgtcatggatgggtacactaaaatctcagaattcactgctatatcactcatccatgtaaccaaaaaccacrtgtacccccaaaagctattgaaataagataaatacattcttatttaaaaaaatactgtcatagggatgctaccttcttttcttttttgttagtaactatttgtgggatgtctttggtgtgtcaggctctgagcaatgccrttttctcttggcttctttgcagtctctgtgtgaggcttacagtcatttttcacgtttgactcttcagaaggaagacagggctwctggttctacatctggaactcttttcccacaacaccaacactgagaaatgtgacatggtgctgtgtttacatttgcataggaacttgcattataagttttatttgttgagttattggctttttttttttaataacccacatcagtatatagaactttgcaataggcatttttgttttaacttcatttctggtgcagttttattttcctacccttgtctttctattttctctttcatctgctttagacttmaactgtgttttatgtattgctgtaagcctctttaaaccctttctaaaacaaagcagggaatacataaacaaatagttttttgttttttgtttttttttctttgtaacagaaatcgacttaaagcctccagagaagtagaatctgtagaccttccacactgccacctgattaaaggaattggtatgtatatgaaaatgcttgttgggcacattgcattttttggccattaacattaaaacactcattaatggcattttagcatgaaattactscttttcagtggataaatcacattagatcaacaaaaacctctttggtcaacctcttgatctgatgaaccctgtatttattcttctttcctaccctcactgtaaattattcttttttgtgtgtaattctatgtttagcatttgatttcttgcttgttttgtgacttctctgaactatttttgttgcgtctgtattgtttgtcaggtatggccgctgcagtctgtgttctgtgagccttgtggtcagctagtgaaggaagctttatgtaggcagtgacagcatttaccctgctcactactctataactaggatctgatcttayggctaacacgwaactgaccaatatggtttggttgtgtcmccacccgaatctcatcttgaattgtagttcccataatccccacgtgttgtgggagggacccaktgagaggtcattgaatcatgaggtggttaccctgtgctgctgttctcgtgatagtgagtgagttctcatgagatctgatggttttataagggcttttcccccttttgctcggcacttctccttgctgccgccatgtgaagaagggtgtgttttcttccccttccaccaagattgtaagtttcctgaagcctccccaaccacacggaacagtgagtcaattaaacctctttcctttataaattacccggtctcaggtatgtctttattagcagcctgagaacggactgatgtaccggcacttcacaatatgtattgtaaaaacttgtttttattttatcttctaagctatgactgcagagggggagtctccctcttcccttgactttatgtaggatgtattgtggagtctgagtctttgagtaggggttcctaagagcaagccccaattttgctatagataaggagggatctgtccagattcttctccagcactgagggtctctctggtgtgtttgcagtttttctccaaggtagagtctgtgtcttgctgtcttttaccctttatcatctactaagtacatgtccctagtacataatagactagtagttagattatcaatgaacaataaatattggctttccttttttttaaattttaattttttttttttttttttttgagaggtggcctcactttgtcayccaggccagaatgcagtagcgcaatcttggctcactgcagccctgatatcctgggctcaagcgatcctcccgcctcrtcctcccaggtagctgagactacaggcacatgcccccactcatggctagttttttatttttgtagagacagggtcttgttatgttgtccaggctggtcttgaactcctggcctcaagcaatcctcccagcttggtctcccaaagtgctgggattgcaggcatgaggcactgagcccagccaatattggctttccttagatatggttcatggtatgattagaaacaaaaagaattagcagtcamaacacctagtttctagttctattctgccacaatgtaaccttaggcaaagttggtttttgtatttgtcacctataatgatgagtttgtgattagactaatggtttttagactttaaaaagcctgggaccatttatttataatcttactctgagagccacagtgtggaaataactagactgtcattgagtcacttctagtcctttacaacaacatccttctctagaggtaggagagacaatttaatattttgttttactctttagaaattaaaactcgggttacatggaaatgtkctcttctctgaataggtaacattgttaaacaagttttgagtgtccttccatctttttctttttatgaatactcctgtacataatttttaaaaacataagtgaggtcaaattatgcataatatttcaaaactagctttttgtacttaatactaggttttggaaacttatgtttgtacataatgttaccttttcttcacaactgcacagtattttttgtgcaaagttcatataaacagtgtatgtgcaaacaatatagaaagatataaaatggaaagtaaataaaaataaaaatctctcatcaaactcttcatcacccccaacagaaataaccccaaagataaagctyccttttttatctttcctgatagtttcagtgcatttgcaaacaaatatattgactctttttttcacaaatagaattttagtgtaaatatttcacaaccttcttcattcctaaaacagtgtgagcagctttccacatcagcatatatagttactttgttctttttaatattttcacattccatgatttatttaaccattccccttttaatgtacatttgggttgttacagttttttgcaactatgaacaaatcagtgaacatcattgctgttgagtttgtgtgtctgtagaatatgtccttaacaatgggattgttgttcccttagaatatgtgtttagagttttgacagtcattgctaagttgctctcaatttggcaacagtaataaactcagtacctcatagttgtaaccacattcactccagacagagttctcagcactcttttagtaaaaataaaccatcagttgacagtgccaccttcagagtttctctacaaataccttgcttgcctccctttctttttttcttcttttaaatcagcttcctcaggttgatctgcctctcattccttaggcatctgtttcctatgtgttctttctmctttttttcattgatacttttgtatttccccagttctacctcccctcccctagactggttggctgtcctggaatttcccttccttctttcaattgcccaaacactwagtgggaggaggcaaactcatatcaaatagcagattgactacatctgtgctggatcatgcagacagttcaagagtcccaagtaacttagcagcttcatcttgccttccagctgcaatcaagaagagccctctcagaactggtcactcagcaaaagccagatggcattagtaaaagatgttgggcaagggtgggagtttgggccagtgatctcttaggttacttttgctgctgagttaataattgtcacattattaaacagcccttggccctgggaagcccaccttctgtgaatacaagtctcagagtagacaatagggcacaaccagccatgttacatgacagactgccaagtgcattcctcttacaactcactgggatggagcgctcctcagagaaaaacaagcccagcaacatttgtattctgaacaggcatctgtctatgtttgtgacctttatgttgtgatgtgtgtgagctgctgtctggaattggaaagaatgaggaaatatgtcacctatggcccctcttgtgaagtgttaaatgcctctgaggcacttcaaaaggcaacagagcggagaggatgagtgattagaagcacatttgggatacatttttagatctaattagaattgtccttttttttttcttttttgcttttgccctgtggttagcacacaccatatgaacgtttgtcgaatgctatgttagtgatgcataatggttaataataacttttggttatatatctttaacaacagttgcttattcacaggtctttgataagaagaaataacaatgtgctggacacacatttctatacaggcaaaagtgactttttatgatagagagggctgtttcttattttctgttttgaaaacagtagtagctatgcacttgaggccaactaatccctctaagaggtgaaccttccttcccccttgcccttgattcccatcaacacacacatacatatgcacacactaccgtgcttcagtcaccatcactggaagtgaactatgtgcaacttttgggtgctttatatatatcatatcatattgtgtctgctttaataaatcatagttattgactacatatcatacaggatgtgtgccttctgtgggtcagaaartaagttcactatttagtccttttcaaaaattccttcccgatctatcttatagacagaaactaagcttttatacacccaagatttggcagattaacatctgcatattaaaatgtcaagagctagttaactttatttgaggcttaaaagttaaaaaatctgattttctaaatgtctggccttcaaaatttgagtggactgtctttctcaagataactaacaattttatgcacttggcagtcaagacctttacaataactgctgcttgggagattgaggggaaaaaagcattaaagtttgtggcccttataatcaagtactttacagtctactgatgggagaaaaggaaaacaaaacaaaacaaaaaaccactgtgagatatagatatgtcttttctttctctagcagataagtacctgaggctcaaggaggttaagcaacttttgcaaattcactttccaatatagtgtcttttcccagggtgactaatgtatatacttgatgagtgaaccagaaaagtaggaaataatatgttacatatgggatgctctattgggtatagtaaaggatgcgttgctgttataaaattatagtcacttagaaaagagatgtttatttttatttttctctcatcagtcttaaggtaagtgaatggcctagggtagttaggtgactgtgttccatatggtcattcaggggcaaatgctgatgaagcaacacagctgtcttcatctaagactagaactcygcttgttgccatttcccagcaggaaggggttgaaagaaaatttatgtagatttttttttctacccagtagttgcatatatattgtattctcacatcctattgacccaaacttagacatatggccacatctgtcagccagaaagggtgggcaatgttatctatagctgtgttgctacgtgcctattgctaaaaaggctaaaaasgaagaaggggaacatggatgctggtgaacacttggccacctctgacacagataattgctaaagtaataagaagagatggaaattaaatgtgctaagctaggagactttctaaagaaagggtttgtcatgctacgctgtgccattcatgtgtttttttgctcatgctgttccttgtgcctggaaattctccccctaattcccctgagcagtggatgcagtggataccctccccagatcccccccaacttccctgagtgttggctaccaaaagctctgagtgcacccagggagctaagtcctcctgcccacaggcaataatggactgacacggggtagacttaaagaaataagaggcacatcaatcaattgaaatgtgtgggaccttacctggactctgaattaaacaaactgtaattttttaaagctacaccttttaaacatgattggctatttgaacactaactagatatttgatgatattgaggaattattgtgaatttttagtgtagtaatgatattgtggtttgtataaatatatttagggataatatgatgcctcagatttgctttaaaataacacaggatgaggataagtggtaggactgcaagggaaacaagactggccatgagctgataactgttgaaggtgggtactgggtatataagggctcaccacaccattctcttgatttgtgtctatttcccataataaaaagtttaaagagagagaaccgatgaaggggagggagagagtcaagcacacaataagagtgacaaacagtgccaaatcagcccacagtattaagttttcacatatttacataaatatcacctggaatgcaatattgaaattaatgtatatcactagaataaaaaaagtaaagatttaataaatttgttttgaaataaaataagttgaaatacgaaaaagacagaaaaggttttgaaagaggttttaaagaaaagtgcaggatattcattggtaaagatgttggtgagaggcttggaagcaaaacttcaggggaaaaagacaacatatggaattgaccacaattgaatttacaagtgaagtggctttacagaggaatcaggggatgtttytgagagaggaaattcattaaattctaacttgaatattttctgtttgcctttaagtcagagcaaaggctttgagtcccagcttcccagtttgtgaccttgagcaattgcttaacttttccaaagcctccaatagtcttcactctaaaataaaagataatcatatgagatattgtatgcagggtatttacaaggagcctggtacttggtgtacctaatgtatgttagttattattattaaattagaggagcaaaaatttctctagcattgactgctcctgacataatcacaccgaagaggggatacacgatgataaaaccttcctgcagtagtggctatagaaatgatgacggggagaagatctggaaaatattccaaagaaggctacagatagatacattttttccattggaattaggcaatggagttaaacagaagttacaatatggttgaaataaatgtatttttttwaaaaaagatttctctttccttaattattaaaaaatatacaattttgtagaaaattttaaacaaagtataaagaaaaaaataaaaatcattcataatcctatcaaagaagcattgttaattttttctatatatcttctttttccacgtgtatacttggaaattaaattttctaaaataattttcaggaaaaacaaattttaattaattgagcttctactaaataggactgaaaagcaaaacctggactagaattctctctcggtgtgtgtgtgtgtgtgtgtgtgtgtgtgtgtgtgtctgtgtgtacatgtgtatgtgctgtgtatacatgtgtatgtggtgtagcgttcccctgattcttaacttattaccagtggacaaccaccgtggaactagagtctagtcattcttaacctttttgggggaatcacagtctcttttttgaatctgatgaaaatcaaggaccgtttttacagaaacgttctcatctgtgcatacatgagacattttgcattgcatagaatttccgagggttcacagatactttgaagcccaaaagtgatccacagaccccagattgagaactcctccrctatgccatgcttaagcttatttctgtgtatcttctttctgaggagcaggcagatgggtcatctttacaatgtgaagttcttggcatttttattttgttttgtttttctgcactacgatggagcaagcaacactggaggcaactggctaaatgcaaactcatgaagcaagaccaaaatggctggatagatagatgctgtttggttttgacaacctagaaataaccttgaagaaatcctatggagaagtcttaaagaggaagattggattttgtagactcaaagaatgtgtcatggtttggcttaatctaagccatttttattcttcttttcttgtgtttgggtctattatctgtctgtagaatttatacagtgagactgctggggaaagtcttatgtctaattatttgctgtgctgtgtggagtgtactgcagacagtcaataaacaatcaatagtaattgtagcctgcctcagagacaggagttagaaacttcaactggcttaggtgcatggtatttttcattaattttcttctgctagtttttttctctaatttaaagcctaaatttaaagattaaatagaaaagctttctttgcttatgagcacaagtaggcactgtttttaaaagaaggaatatataatcccaggtgttttacctctgttaatgagaaagatgtctgtttgcttcagattgaatgagcaaagaagaggacaaggatatttgcatggttaaatgcctatgagcccttccttcagaaagtaatattcccctgatgtcaattacttttatacggacatctggatgtttatcatgagagtgtacagatgtcaactttttcagtattatagctggaaatgtggtgataacttgactttgatttgagtaaacataaaatatctaacatttaaagtcagaagttcacttcaggaaggggtttaaactgacatttattaaaaagaatggttccttggaaaaaacatcagaaccatccctaaagatacagtcactctgataaagtaaacagagtcccagttatgctctgtgtaacaaataacagaacttgaacatgacatttatctgttccttaaacttacagaagctggctctgaagatattgacatacttcccaatggtctggctttttttagtgtggtgagtgtcttcttccttccccaaattcagcagaggagatacaagggtatttgatgagggctgcagaacagtaagttgcttttaaaattcattttccaaaatgcattctgaagaaaagagaggtcaaacaagatcttggaaaacttcctccagcttttctaaatgtagagatgaagactctttgcccattgagatagtgttctttatttccccattgcattgcactaaaatattccaatgcaatctgtgttttgttttgttttttcttttttaattttttttattttttgagacgsagtcttgttctggttgccccggctggagtgcagtggcatgatctcagcttactgcaacctccgcctcccgggttcaagcaattcttttgcctcagcctcccgagtagctgggattacaggcgcccgccaccatgcccggctaatttttgtatttttagtagagatggggtttcgccgtgttggccaggctggtctcaaacacctgacctcaggtgatcgcctgcctcagcctcccaaagtgctggcattacgggagtgagccaccacgcccagcgcaatctgtgttttaaatgtgcactattaagagggatatttgaggtcttactgtggatactcaatactaacattatactattttaaatacagcatctactcatctttctattactattcaacttgaagcaaatattcttgccattattatttattttcaaatattatacyaaccttgcccttttgctttctttcttttttcccctgaatagccaatcataagtggaaagtcattgagtttatttacacccttcattttgccttgattcttgtaagctgaaaaacaatatcctttctgggtatacaatagaaagactttaaaaacaattggcttgtgaatattgttgtgaatattgttgaaactagcttgtaacaatgtccattctaattggaaatccagataaggggacagatgaggaggttctgaccacctacctccctggcttgggcagacataggagttcttggcatcttcataggtccagtttttctggaggaagaagtaaccaactctgacacctgactgtaattattccatttcctctcaacatccattattttcaggctctgagactcaagagggatgtgaaatactgggagatacttagaagggagtcaccacactaataaaatagttgttagacttatgagaaaggtgagagaactcaggttggagtagaatgagaattagaacactcttcaggttcctgatggtttttatgtgaaagacagtgagcagctggttattaccactgaggcaataaagagatactgtgggctttagcagaaacaccagtatatrtatttagtttttaaaataaggttttaaaaggaatgttttatttaattgcctacacagaatgaataaagtgatatttatagtaggactctgggtttgtttaggagcacatgcttgcacatgtgtggcttaggaaaaaccactgggaccactagtctaaaatattcataagtaaagatgcaaacattctgaataaagtagaaggcagttgcattgatttttttatttgtttatttgtgttttttgttgttgttttgcaaggatgtgttcttggagatttttataatctagaattcacctatttcaagatttctctccagcccccatagtaataamtctgaagtaggagggatgaggtctccaaacacataaatctacagccattttagcttgggggcatgttatagttacaaagatcttatagccatatcaatagaactttttctgctttttttctgttaccctcctttgctcatttgactttttttaaaatttagaaacattcccagtttgctgctgtttttcatttacttggcattgtctctaataaaacctagagtgtactctcttctaaataaagaggtcctacattgtggaggttgttcattcttcttcctagcattttagctcatctaacccaacctattttacagttatgggttgagggtcacctcaaaactaatgtcacacttcatgaagaattggatgacatagaataaaatataaaaaatgtaaacaatgtgagtgtgcttaacaccactgaactgtacacttaaaaatggtgaaagtgatgaatgttgtatgtattttatcataattaaaaataaatttttaaaaagagaaaaaatacttaaataaataaggagtgcgaacataaccatgactagttatcaccatctgatagtgcttcctttgcatgtaaatcatgcttttgttttggggacattcataaagaatagggattaactgaagtggcactgccatgtaacaatagcataattccagtttgttctacttaccaggcttgccctccatgaaaatatacaattgtagataatcttttttaattggagagatttcctcttatgtccaattttatacataaagtaagacttttttattgtgtgcctaaatttgtgtaaatatgactgcatcgtattagtaaactgaattaggtagtgcattcacataaaatttaacatcaccaagaaggctttaccttaagaatgtaatgatgaatcaccattttagatagactgataggtaatttattaactgatttaaaagagaaaagacctatatcatctcagtgagtaccaaaaagcatttaataaaattcaatactcattcctaaagttccaagcaaactagaaagataaggaaaattcccacaaaactacagcaaacatcattcttgatggtgaagcattggctgcatttgcattaatgctcagaacaggaagaaaatacccaacaccacaaccatcagtaatctactagagttcttagtaattcagtaaaacgagaaaaagaaatgtgagatagaaaagaaaaagacaaaactgtcattagagaagcagggactggctcaattgcccaggctgatgtgcagtagtgcaatcatagctcactgcagcctgaactcctaaactcctgygctcaagaggtccttccacctcagccttccgagcagctaggactacaagtgctcaccataacactcagctaattttttttttttttttttttttttttgtagagacagagtcttgctatgttgcccaggctggtctcaaactgctggcctcaagcagtcctcccacgtcagcctcccaaagtgctggaattataggcatgagccaccaggcctgacctaaagctgtagtaatttaaaaagtgttatattggcacaggaatagacatgagacattaaaataacaaaacagagagtccctaaatagaccaatatgtaaatgtcagagatctagcacatgataaaggtgatattttgaatcagtgggagaaggatggactgtatgccaggcactgttccaggcactgggatctagcagtgaacaaatttccacagtcagtatgtagatgtcacttttctccaccctcagctctccctggaatcacctagtccaccaaccttctgattactctctgaagagaataaatccctgatcttcttttcagttattttcaggctttcagtattccacctccccgttattattttttctgttatcttttctctgttttttgagtttttgtggctttatgccactactttaaccacaatctctatttatccttcatgtacagttcccatgttagtccataaaaatacttaagcttttgtatttaacatttttcaccgttttggaaagggtctaaaattcccaggactccacagctttgcaccagataagcctggaggaatactaatgatggatctaaaagaagaaaaaccaagggcacgggaattaagaatcagtcgtgggtttgatttggcctcattcaatccacatggcatcagcactttcatagacaacggtaagagccaatgggctaccaacatttagtaacgtgtgatggttcacaaatgactgtgaaaaatagatttggatcatatttmtaggaagagaagaacaattaactcatgagtgatttctgtattcttcattacaaagaacttgttcatttgcctcttcagctggcagtaagttatgctacattttgaaattcctaacaggtaacacctgamagaatgtttagatttcataatcttttcatatacctacgatcatcacatttaaaaaagaactgtatttttgaattaaagtagaaacagattatgcatgaattctgtatatggagtaggaaacactttcttaaaggtcagggagccaatgatcagaaataacaccagacggacagcaataggaaagacagagaatgatctgttaggtcgtctaacagcttatacattcaacctttccttgcctgtggtatttaaatgtcagtgcctgcccagaggtcccrtagttatgtcttgtaaattaactctgttctttcaattctttagatgacacagtttatctctttgttgtaaaccacccagaattcaagaatacagtggaaatttttaaatttgaagaagsagaaaattctctgttgcatctgaaaacagtcaaacatgagcttcttccaaggtacttcctcattttgttccttctctaatttatccccagcatttgcaaacaatccctatggtgggttgtcctgtcatcttttataagygctaatgtatatattagctaatatgtaagagctaaagagcttatatttccttatttataaatgtgtgtgtatagtttccttataaaccagggcaagcatggcatatgaaagttgatgtcactcatactattcactgttctatgcggactcctttgagaaatgatgaagtgcccgactacagggtgatactcttcaggcccatcttgagggtagaaggcaaaccctaacattttttcctgctgtcaccctccatcttagatgactcatcacccagatgagtgtcttgccaaggaagaatggcctgttttttattgggtttgtatgctttgcatgggactttataccaatcgctttcatagggttagtgatggttgcatgctagtaatcccacagaattagagccactcaagttgagagtgagtcattacacttcaagaacataaagctggttgaaaatgtggctaaragagaatcatgtgtacccccacccccagttcagtgtgtattagcctactgcttcttttagtttaaacttgatgaatatttttaatttctaatgaaatttcatttctaatgaaattaaaaatattgcctatctagggcctatctatgcctatctagggcataagcatgtaacttccaatcattccttccaaaaatgcacttgataaaaaaaaataggagcataaataccatccaagcattatggtgctctttcagaaaaatgagacctaccttccctgtagctctatatttttcatttagcaaagaataaagcagctctttcagaaatttttgcatagagtaattggaatttaaatttaataacaccctcacctaactggtcttaaaatgaaattgtttttagcatataaatctctcacctgaagcattgtactatggcaattttatcatccatctctctgcaagtgtttattgagtgcctgttcattctcggcatgtcagctttgtgaagcaggtagaaattgaacagtcaaccttagtttgactaataactaagccagggaaattagaaaaatccaggaactgagtaaatggaagctaggtaaatgttactgactgcctaaccagctcaccagccaatcaggctctctccagctctgtactgtggacagctctgtccttacgtataattgttaaaccctacatttcttgctgtcaaaaaacatgccctgatggcactaagttctttcttctcttatggtaatcctgccataattgctaaatgacctgtgttcagattacctggtaccatacaaaattgttctctggcaacaatattatagtatattgtatatgactatagtygtgatttttagctcrtcttttcctcttaccaaaaatttaaagcacatgttgcataaatcttaygagtacttaatatttaatatggagaccaacaggccttttrtttcctctcacatgctatttttctttttcagtgtgaatgacatcacagctsttggaccggcacatttctatgccacaaatgaccactacttctctgatcctttcttaaagtatttagaaacatacttgaacttacactgggcaaatgttgtttactacagtccaaatgaagttaaagtggtagcagaaggatttgattcagcaaatgggatcaatatttcacctgatgataagtatggccccttatagaatatcttcatttttcttcagttgtggtgctggccaaattctttactttgctttctttgtcaatgtgaaaatagttttcttgacatttatggtatattatacatataatatatagatacactatatatataattatatatgttttgtatatatatttacatatacttagtcacatgtatttatatgcaaatacaataccatatttaagtaaactatataatacagtaatatatatgtatttatatataatatataaagtttggaatacatcattgtcaaatttaattttataaatataaattttaaagtgtgatcatactgatgcatacatattgaagtatcaggtatttccttttaaataaatgtattatttttattggctatayattattccattataaggatgatcttaaactaatttaaccaattctctattgatggatatgtgtataggggtggggagttctacataaaaaatattttatacttcttatttaccatggaattttaaacaagtattttttttaaagaaaaagtccctaggagagtgttttttttttgttttgttttttggagatggagtctcactccgtcgcccaggctggagtgcaatggcatgatctcagctcacctcaacctccgcctcctgggttcaagtgattctcctgcctcagcctcccaagtagctgggattataggcatgcgccaccatgcttggctaattttgtatttttagtagagatgaggtttctccatgttggtcaggctagtcttgaacctccaacctcaggtgatccgcccacctcagcctcccgaagtgctgggattacaggcatatgccaccacacctggctctaagagagtattataacataatggttaaacttgcagattttggactcatacaggcctgggttcaaatcccacccagggcactggctaaatggttctatgagctacttttctgtagaacagacccctagaaatagaactatttgctcaracagtgtgattcttttaaatgttaactttaatagatattgccaaattgtcctccagaattatctcattatttttatatgcacaaccacaacctataagagaagatattaaattcttgatagctttcttatctactgcctcagcacactgaaaaatttaaactactacaaatacaacataaaataaatttggcactccttgacaactaaatgcccttatttttgtaatccaatttctcctcctttcttgttgactatagaaaaagaatgtagaatcatttaatttaaattgtctctaactgacctgatccaacctctgcagccaaatctgtttttcactcttatatttccattatgagagtcaaactttccaatcacccaagctaacaaaaaaataacaataatgaaaagggagaatcagcttttactcctctttcaccattcctatccagcctgtaggcaggtcctgttggttctmcctgtgcctccttcctctacccccaaactcctttccctttgagtgagacctgcctartttaggttgtcatcctctctgactagcatatgagactttcttccaatttgttttctgtctacttggatttttttcactcttgccaattttgtctgtctatctctattagccttgaagggctccccaaagagggaactctgtcttcctcacctttgactccttatgccagtacagtgccaggcacaaagcaaatgctcaggaattgtggaacagaactgaccatttgttgccactttattattctaagatttcagtggaatccaattgcttatcaaatcaaggcagggtaaagggttggactttgtttaacaggccacctccaacctcccttttctactatttccatgctttctatgctttagacaaagaactcattgttttaaacattccttcctcttcttgctcctgtgattctgctcttgtgcttgcttctgcctgggaagtgcctcctccgtcctcatctcaaatctcatctctctttacacagccactgcagatgccccttccttggtgagcctttctgtgtcctcggaagttagctatttctagacctgaactatttctcatgcttattaggtgtttaatgtgtacaaaccagtgagatttgttccaacacactataaactttcaaggagagaggctgtgtcttcttcatgtttatatctgctrcaacactgagttcatggcttttcacacataattgctcaacagagcaggtgccatggaaagtcaattcaatgagtaaaattacctcaaaatagtcygttaattcactcacctttgawgtagacagattattctgcattgatacttatctcttactcttaaaattcgctatgtattaataaatattttattgaatattaaggaatgatcactattttaataagatgttctttaccatatatttctatatgtacatgataattagaagtatcaaattatattgtggaatgtaaaagcttttcttctgaagccaagcatttgttttattgtcatttcagtggcaaatatggacttcatattcaaaatgatgttctatattatttttccttacaagctttttgaaaaacaatttaataattccatgattgttgtagcaccactgaattgattctgaaagcttactttttaaataaaaattgacctttatcaagcattccttgagggcccatgattgattaacttcttggcaggttattaagacttattctttcacactgtattaatgaagctttatattggcatggagctctaaccactgtgtcctttctgcaaaggtatatctatgttgctgacatattggctcatgaaattcatgttttggaaaaacacactaatatgaatttaactcagttgaaggtaaaatatttatttttacatatagacagtaatctattatgctttgcaatgacatagtttttcyataagagtaccacacgtagaacaaaatatggatgccagtgtagctattctgggtttttaaatactccctacaactagagaaagctcctgtttccagcgatcwcaagaactgaccatgattacatgcagcagcaggttgagagtgatattcatcagatttagggcccattccatgaagtattgatggcagtggaagaattccaataagaattttcacaattgaaaatactaatagatgaattctcaaatgaaggtttatgcacagtgtcagttctttcaataataaatgaaggtagaaattgggttccacaccattattattttcttcctactcaacaacacatattttaggttgattaagaatttcctatcttgctttgattgagttccttgagctaactgatcattgtgcatcttttaaaggaaaaggagttcagtttttaagatagatttttacagagaccgattatcaccctaactttcttaatttcagggaagaagaaaagtggctccaaaccagtttttaatacattccttttaagcaatattggtgttagaaggtggaagcagggcgatgtgtaatttcctcacatgcatagaggcaggaaggttacctctaaattatttaatcaagtttctcatgtcatttagatwttgacaatttctcatttggaaggtacttgagctggatacactggtggataatttatctattgatccttcctcgggggacatctgggtaggctgtcatcctaatggccagaagctcttcgtgtatgacccgaacaatcctccctcgtcagaggtttttatattttcagttttttaaacttaattattcaagtccttttgaactaataatacaataaattgtcacagggatgatttgtttagttattttaaagcaataatataataagcttatgtcgtggttttgtaattgcgttaagccaataattggcagaatgttacattgttcaaatactttaagaaaggtaatcttttgatgtattaaattatggtggaaactagtcaaaaggcatttttataaagacatgtgcccttcttgggtggtatactggcaatttttaaaatatctgatttattgtcagctcaccacatgatgtgatatttgttcatgttgaagtagtgtgaaagtaggcacattagtatgaaagtatttctattaaagctgaattgctataataacactaaatcctgtgttggcatggaataactagatggttttaagaaagtactttctttgaagattggagaaagtactttaatttaaacattaaaaagattggtaactgctattttcaacagcatgtccccttaatcagtgtgtcattgtggaaaacagggcttattgatgattgagtgacatgcatgtacggtggtcttatattcatactttgtatcccctgaataggttctccgcatccagaacattctatstgagaagcctacagtgactacagtttatgccaacaatgggtctgttctccaaggaagttctgtagcctcagtgtatgatgggaagctgctcataggcactttataccacagagccttgtattgtgaactctaaattgtacttttggcatgaaagtgcgataacttaacaattaattttctatgaattgctaattctgagggaatttaaccagcaacattgacccagaaatgtatggcatgtgtagttaattttattccagtaaggaacggcccttttagttcttagagcacttttaacaaaaaaggaaaatgaacaggttctttaaaatgccaagcaagggacagaaaagaaagctgctttcgaataaagtgaatacattttgcacaaagtaagcctcacctttgccttccaactgccagaacatggattccactgaaatagagtgaattatatttccttaaaatgtgagtgacctcacttctggcactgtgactactatggctgtttagaactactgwtaacgtattttgatgttttgtacttacatctttgtttaccattaaaaagttggagttatattaaagactaactaaaatcccagttttgtctgtgtttaattctgaaggcatatggctaggagaaatgggaaagcagctgcttccttatggagtttggataggcaagcatggccatattaatttctcttgtggaaagctgaaagtgaatggactcttaatttgaaacaacaacaacaaaaatcaatgaaatattgcaactcaaattcccagttcctaaggaggtttccatcagctctcttccttaatgggagtccactttagagacaaagaggaaataagggttgggacaggaaggtcttgccacctcctcattgaacagaactgtgaactaaagccaggagaatgaagtcagtcrtccgtgaccacatggttaagcagcagcaatgctaggawcagggccgcgtgcccagctcacagagggagagtttttctgctcactgtacctcctataaaatcatcataagccctagagagagactttcatgtgtttctttccattgtaatttatcaaaccactttacttcacttctcatactttttccctatcatcatcatgaaaatatttgtcagttaattacaatatgccaaacaatgcaatgaaagtattacattcgttatcttatttaatcctaattgcagcctggagtaagtattgatattatatcactgttaacatttcacagatattcagtctatttctgatgccagagcctgtaccgctaaccactacatgatgctactgccatagaacgaactagtattttattactgtttttcctgatgtatacagtttcttcatgttttgtagatatgtttgagttctgcttttagatgaatcatttaatggattttaaatttaaatttcagtagtattcttaaatttggcctgtatccatttggcctgtgttgttatttatatatttaagtagtttgctacatattgtattggatttatttcatgctaaaataattattttcttttttgtttacattgtccatgggaaaatgctaagtcacagatgaatacagcaagattaaatattgcagacctagggatccaaatgaagaactagatgttttagattttatgagattatatcagactatctaaaaagctacatttataaaaagtactggaatacagtaggcataaaacaaacttggtttctattgcatttattacaaattttagaacaaaaccatgtcctttgcagcaacatggatgcagctagaggtcatcctaagcaaattaatgcaggaacagaaaaccaaatattgcatgtcctcacttataagtgggagctaaacattgaatacacatagacaaaaatgggaacaacagacactggggaccactagacagaagggagaatgaggctatgggctgaaaaactaactgttgggtactatgctcatcacttgggtgacaggaccatccatatcccaaacctcagcatcatgcagtatacccaggtaacaactctacacctgtactctttcactaccccctcaaaaaacactggggagtacaatttgctggatcatatggtagaagtatgtttaattttgaaggaaactgccaaattattccaagtggctatactgctttgcatttgcaccaagcagtgaatgagagctcctattactccacatcctggccagcatttggtggtgtcagtattttggattatactattatgaagtggtatctcattttgatttccaattacctgatgacataaaatgttgaacattatgcttgtttgctatctgtatgtcttctctgataaggtgcctgtttataccattggcccattttaaaaatcttccttttgttgttgttttgttttcttattaagttttaagagtgctttgaatatttggaataacaatcttttgttaggtatgtctcttgcaaatattttctcccagtctgttgcttgtcttctcattctcttgacagtgtgttctgcagaggatatttatttttaaaaacaaaatcagggcacctctataagataatatagccacttcaaatgatactacagaatattagcatagacatgtactcacagtgtattttgaataaagcatgcaagtattttaaaaaaatttatttggacaaaagtatatgtaagttaataagcacatgtatggccagccacggtggctcactcctgtaatcccagcactttgggaggttgaggtgggcggatcacctgaggtcgggagtttgagaccagcttgaccaacatggagaaaccccgtctctactaaaaatacaaaaattagccgggcgtggtggtgcatgcctgtaatcccagctactcgggaggctgaggtaggagaatcctttgaacccggaaggcagaggtaggttgcggtgagccaaggtaacaccactgcactccagcatgggcaacaagagcaaaactctgtctcaaacaacaacaacaacaacagcaaaaaaaaaaaaaaaaaaaaaaaaagcacatatattatttatcttagaaataaaaaaaatgaataatctctgatttttggcttctctggaccatgaggaattctatcaaactcagtatattgtgcacttatttatggtgtcttctctctgatcttatactgagctgaacaattgaaaacaactgaaactgtaattgggatatgacaccatgaggtgaatataggtcttacaggtgtgtatgtgttaattctttttactccaagattccgtttagtgacaataattgtttttttacttttacaaaacctcagctcttttataacaaatgtgaacatgaatacttaatacaaggagtaagaaagattaaatataagctataatacagtatttttttcatgttgcatatggattaatccttaattgcaactcatataaagctgattcttttctctggactttgatttgctcagtttgagtcctatcttggagtcacagccaacctaggctagtgaatatctactctactcagcaaagcaatgaaaaagtaacagcttaaaagtaacccaccgccacaccagccacttctacctttctgtggctacttgtagttttcattactcacactgttttccagggaaggatttctgggtgtgagagaaggagctgggtgggagaatcccagtagcattctcttttagctttctgcccctgcttttcagcacttttcttctactgtgttttaattttcattctctttttatgagtttaagtacactttgagatatttaaggagatctgtatttatttttctgtgaactttttttttccttcaaggatgctggcctttttctatgaatttctagttcttcatgtgtaaaggagggaattatttttccagttcataactaaatcatccattatgcaattcttgacagggattgaaaacatcaggaaatgatgttttccattagaagagaaagcagtacagatattttcaaacttttaaaatggaacctggttgtcccatcataggcagtattgagtgcagaagacattactcagacctttcttaagaaagggctaatataaaaaatacatttattacatgaattgattcaaggcctgaaaatgatgattaggataaacatgacttttgtcactccactttgaagaaaactctccagatttctcctacaatataaaatggaaaccacagctttaaatggactctctgaggctgggaacagtggctgacacttgtaatcccagcattttgggaggctgaggcaggaggatcacttcagcccaggagttcatgaccagtccgggctacatagcaagacccccatctctatgttaaaaaaaaaaaaactttaaaaaaaattactacagctttatatataagatatatgktggcacctgctgtagtcccaggtacatgagaggctgaggtgggaggatcacatgagcctgggaagtagaggctgcagtgagccatgatcacaccactgcactcaagcctggccagcagagtgagaccatttctctaaaaattgtttaaaaatgaattccctgtttttctattcatattgcttctgtttcttggtccccatatccataaatacagccctctttagcagattctccaagcctagacacctttcatttctccctctccctcaccacccctttgctcatatccaaacaattgccagtccctccacctaaacatttctcaaatccatacaattctaagaactttgagaaacaatctcctcaccttctccaatcaccctcacatatctcacccagaaaggcatctaactatctcctagcctccaggaagggtaagtgctccacctgctccataatccactctcatcattgtgtagcaatgtttctaaaacacctgccaaaacatgttacttccagtggcttcccaatgccccttagaatataattcaggtttcttaacttggcctacaatctgccttcctctccagattcaattctcaccatcttcttcccaaatctttaagctcagtgattctcaaagcatggtccctgggccagcagcatcagcatcacctgcaaacttgttagagatgcaaattctcaagccccaccccaaatctaacaaatctcaaactctgggtctaggactcagcaatctctcttttaaggagccctccaggtgattcttaggcctgctgaagtttgagaaccactgctgtatccatactggactatttctgttccaattcccctacttgcggataccccgacctctttctgtgaacctcaccaccctttctccacttaattaactccttctccttgtcatacaatctgacaagttcatgtaatatgttgaatctaccttgagatgtgttccaaactagagtcgctgaggggctaccagatattgatgaaaaatcccctgaagacagttaaagtggaagataaatctggaaagaaccttcctggcaaagtgtggcccctcaaggatccccccattcacttggtgcttacatagtgaaatgtgagcctgctggaaccctggtgctcatcctgctaaatacactcagcgcagatgattcctagcacaccacaggttgcacctgaagtcctgagtgggggaaccttccccatggtgagttgcaggaagtcaccaaacaaggtatcagactttcactacctgacttcattattaagtgcatcttcagaatgaaattgagaattttatttaaattcagatatacctaaatatttaatacttaaataagtataaatttaaaataataaattttctaaataatagaagtcatttcttaaaataatacaaatatctggtcctctagcatttctctcttctgagcagcactagactcattaatgccatgtagtcgtacccaggttttaaacagtggtttctatggcttaggacaatgtttcctaatgttctaaaatccatatcctctttttaaaaaacagctttattgcaatataatcataatctcttttgatttgttgctctttttctctatcgccacctctttttcttggcaagattcactgatagaaacaatctttttaaattaaaaatgtagcgattgtaaacatgatcaagatataaagtttgaaaattttaaacattacagagggtcgtacagtaaaagcaaagtctccttccatactcactgacctccccactctccacgaccccaatcttctgctctcaaagtaactactcttcagtttatgtctagattgtttatatatatacacacacacacacacacacacacacacatatgtggataatatgtaattcccctaattttataccttagaattataccacatgtatattctgcatcccccttaatggcattttgattatcaatggtgtgggactccctagatctatatatagtattgtgttacttactgtttaaacgtatagcattgaatttggtctacattagctctttgaaagccccactatacatataaggaaagaagggtccagaggtggtgataagtgatttcaaaagattaaagggccaactacaaatggaattggatcttgaatttaggccttttgaatttatctgtcctgctctttcaaagtcaacaaaccccttttacaatactgatgtacctgtggcctcttgaccaagtcaatttggcctattgccaagagcag

SEQ ID NO: 93386 - DNA, 35452 bp, Homo sapiens
  misc_feature (1)...(35452): n = A,T,C or G
tgctgtcttccatcacctccagatgggaccatctagttgcaggaaaacaagctcagggctcctactgattctatattatggtgagttgtataattatttcattatatattacaatgcaataataatagcaataaagtgcacaagaaatgtaatacactcgaatcatcccaaaccagcaccaacccattgccccctacacatccctgccttgtgtctatggaaaaattgtcttccatgaaaccagttcctggtgccaaaaaggttgggaactgctgctgtagggagtcacctacagctcctaactcaattcattgtctcaggcctcaattcctgtatcattccagcaaatgatcctgaaggaagacagagatccagggggagccagggtcattagctgcctctgcagaccgaggaagcatgtgctcaggaggaggtgtttcagtgtgatgactgagagcatggactctggggcgcagacttgagcttggactttggatgcatctcttactaacagtgatacaacagcctacttacctgagcttcccttccttatgtgtagaatgggaataataataataatagcacccgcctcagaggttaccataaaattgtgaagataactcatataaagcagccctcagtgacaacagtatttggattgcaggggagtctgggtgtctgttatcacagttgttataaaccacaacagggagctctgtcccccttgcctagtgagattcaaaagctgggaagctgatgctagacctagttcagatcgtcttctctagaatgtcttccacagtctcattcggggcttcctcaatgctgacttgtaacttactgatagcatttcttccagggcaccacattatttcttgtttgcgttatttccccagtcaggcctctcttggctagtgtttgaattgtattagtcttttctccttttccaccccttaatttttcattcccaactgttggcatgaggacacttgcattctgtatggaaggaattaagtgctaatctgtggtgccataaagaaatgtcttctctttgtagggtgtaataatgatctctgctgtgttagcaaggtcagtgctttggacttctaggactagtagcctaaacttgtacgagttttagatgctcaggaacactacttcttattctttcttctctcttctcttctgttcttcccccctcctccccctcctccccctcctccccctccttcccctccttcttctcctcctcttcttccccctcctcctttcttcctcctttcctccccctcctcctcctcttcttcttcctccttctcctccttcctctccttcctctccttccttcctccttcttctccttccttgccccttcttcttctccttccttcccccttcttcttctccttccttcccccttcttctcccccttccttcccccttcttctcccttccccttattttctgccttcccctcttcctcctgctcctcctcctccttctggagtctcactctgttgcccaggctggagtgcagtgatgctatcactgcttactgcagctttgagctccagggctcaagccatcctcccacttcagcctccccagtaggagggactacaggtgcacaacaccatgcccagctaatttaagttttttgttttttttttttaagacagagtcttggccgggcatggtggctcacgcctataatcccagcactttgggaggccgaggtgggccaatcacttgaggtcaggagtttgaggccagcctggccaacatggtgaaaccctgtctctactaaaaatacaaaaatatnnnnnnnnnnnnnnnnnnnntttttcttttttttttttttttttttgaaacgggagtcttgctctgtcacccaggctggagtgcagtggcgtgatctcggctcactgcaagctccacctgctgggttcatgccattctcctgcctcagcctcctgagtagctgggactgcaggtgcccgccaccatgcctggctaatttttttgtatttttagtagagacggggtttcactgtgttagccaggatggtctcgatctcctgacctcatgatccgcctgccttggcgcccaaagtgctgggattataggcatgagccactgtgccctgcctttttttttttttttttgacagagtctcgctctgttgaccaggctggagtgcagtggcatgatctcagctcactgcaaccttcacctcccaggttcaagtgattcccctgcctcagccctctgagtagctggaattacaggtgcctgccaccatggcccgctaatctttgtatttttagtagagatggggtttcaccatgttggccagactggtcttaaactcctcacctcaagtgatccacccacctcagcctcccaaagtgttgggattacaggcgtaagccactgtgcctggcctcaggaacacttcttaatgatttttttttcttgccttaagaaaacttgaagcaacttcttttgttagtctttttagtcttctcccttccttcactattgttgttattattttagagtcagggtctcactctgtcatccagactggagtgcagtggcatgatcataactcactgcaacctcaaagactcctgagctcaagggatccttctacctcagcctccagagtagctgggactgtagacatgcaccaccacacctggctaatttttaatttttttttttttttttttttttgagacagagtcttgctctgttgcccaggctggagtgcaatggcgtgatctcggctcagtgcaaactccgcctcccaggttcaagcaattctcctgtctcagcctcttgagtagctgggattataggcacccaccacaatgcctggctaatttttgtatttttagtaaagacagggtttcaccatgttggccaggctagtttcaaactcctgatctcaggtgatctgcccacctcggcctcccaaagtgctggtattacaggcgtgagccaccacgcccagccttaaatttttttttttagagattggatctcgctttgttgcctaggctggtctcaaactcgtgggctcaagcaagcctcctgcctcagcctcccaaagtgctgggattataggtgtgagccacgcgtctggccctcccttcctttatagaggaagaaataggcaaagaaaagttaggaggtaagcaggaagcgagtcttcttaaatggaatcataggtgagtttgagatttacaggagaggctcaaacgggtgatttggaggatgcacctgggcccagaaaaagacacaagaacatctggctgtctggactgtataaaggagtgaagacttctctttacaacaaccataaatagttttggatgtgaatttctgaagcttaaggaacaaaatattcagcaaaatctctgggtcacagatgattggctccttgctctggaatagcaatgcttaatgttgagaagcttcaaacctttgaaatctgtcattgcccaaagcctgagaataactcactaaatcccaggttgacctccctatagcatcagcttgcagttcatgacaaataaggcagggagagaatttatagagttaattactaggcttggttctattaaatgtgcaaagcacacatgcaaggggctggagctttgacatgagtggagagacttgaattctttcgcagctggaatgtgccggaacttcccaaaggcttgaaagaatgcctagaatttattttttcttttatggtcactgttatttctcacagaggcaagtgaatcttcccaagctaccatgacgggagtcgaggagctcctggcaggcttgtggggaacaaagccagccagctctccatggcttgggcgggcagggatccctgactttctctcacatggggggccgacaggagctgttgtaaatctttaaagccaaaaggaaaattaacgagcgcagcacagagcaggaccttgtcagctcggtaatgggtggtgggaggaagaattctgctgcttcctcctgggcattaagtgtaactcaaaaactcctgttttgtggccattgtccaattataacagctttctactctggagaatttagtcattgactgctttcaagtcacctgggggaaaacagtattcaatacgatcaagaggatgaggtctcttgttctgaattttccctttagtgatggaaacaaaatacttctctgaatccatttagggcattgagcactcccaaaagaagccctacaatggagagaaagagcggggattattagagagatcttctgaaggacctcccccactagaatggagagtgtagaatgcagagtagggattttgtgtcatgcgctgctatatctccagaacctagaactggtcctatcgcacaggaggctgacaagaaataggtgctaaagtaacgaatgaagatctacaatccaacaaatgacactgttcgggagctcagagctttaaagcagtgtgatgtagttgcaggagcgtagggtgtggaatcaggcagatatagtgttgttggattgtagatcttcatttgctcatttagcacctataggtttattcattaacttagcacctataggttttggctctgctagtttgctagctgtctggcctatggcaagttactttactccccttaatctcgtggtcttcatctgtaaaatgaaataataatcccaacttcaaagttgttctgaggattccttgagatgatgactgtgatggtgtttgacactctgaaaatgctgatcccaaccctatctctccttaaatcatgtcagttcagtaaggaatttacataatgaactatctattcagtgggagagttagaaagcggaagcatctgtttattgccacaaaaatttatagattaagtttgggcaacatagggagaacctatatcttcttaaaaaaaaaaaaattatccgggcatggtggcaaatgcctgtagtcccaactactcgggtgggaggatcacttgagccaccgggggtcaaggctgcagtgagctgtgatcttgccacggcattccaatcaagatgatagagcgacaccctgtcttaaaaaaagttgatagtttatacatttatttattcatttacagatctgtagattacaaattactcgtgatgtcttaaggtatttgttgttttgttcttacacgtgtgttattttgtgtttacaaaaggaaaagacatttcataaagctattgaatcccgaaaagtcaactttaattttatttttattttttgaggcaggggctcactctgttgcccaggttagagttaggtggcgtaataatggttcactgcagccacgatcttccgggctcaagcaatcctcttacctcaacctcccaactagctgggaccataggtgcgtggcaccatgcccggctaatttttaaatttttttgattaattaagtgggatctccctatgctacccaggccagttttgaactcctagggtcaagggatcctcctgcctcagcctcccaaagtgctgggattatagatgtaagcctgaacaatatgaggctttaaacactacttctcaaagagccttagccagttctggtaggataataacctcggggcaagtgaaaacttggagaggcaggttgttcctaaacttaatcttctctcttgaagcatttggtgaaacctataaaatttgggggcgtgcaaattaagtgtacttgtaaatatggtctgaaaaaatgcattcactgtatttttgcttcccactgtttagtataacatttatcagagaggcagaaaacatgcggataaaaatatccagttgtgtattctcagttggtatcaaaagctaggtcactgaaggtcactgcccagcaagtccccatgtgtaagagagtgttggtatgtaagagtgtttctgatgttaaggaattctgtttgctgtgatgcgagttgtgtacatctccttgatttttctccccatatgtaaccaaaaaaatgctatcctggattttatttctctttcacaggaatgggaaggaaaagtgtggagtccgtgtggatttctcttattttatctgtggcttgaatgtacatttctgagagagggtaagtgaatccactctccatgttttcctttctcaatgttacttcctgttcacctttctccttattcttaagcctctgagggttacaatggggtgtgtgtgcaggactgctactgcctaagggaaaattacaaagctgcctaggcagcctgatttatgaggcattgaaaggcacatctgaccaaaaatatccccmccactggcctgccaccagtgcctgaaatacctatgattagaatcacccattaaaatgttttctgcaggccgggcatggtggctcacgtctgtaatcccagcactatgggaagccgaggcgggcggatcacctgaggtcaggagttggagaccagcctggccaacatggtgaaactccatctctactaaaaatacaaaaatgagccgggcgtggtggcgggcgcctgtaataccagctacctgggaggctgaggcaggagaatygcttgaacccagggggtggaggttgcagtgagctgaggttgctccactgcactccagcctgggtgacagagtgagactatctcaaaaaaaaaaaaaaaaagaaagaaaaaaaagtttgcagacatgcctggcttctttgggtcatgaaggcattgtgttaggagaaaattgggaagtgggaaagtgggaaagtattgcattataatgatttatattatgaacctatcaatctcttggtcaagagtaacatcttgataagtaagtagactgaggctggagggaaagttgggagttgagagctttgtccagcatcttggtgtacaccctgtgcaggatgaagtcgacaggtagctggggagagattgtacaaagtggattgaggggtagagatagcaaagacaaatttaggtatttcacaggtctatacaaggccaggttaggaagtaagggtacataattgccagaggaatctcctttctgactgactttaaggaatctctcttaccgactctacagggctgttatgtgaggttctttcaattttccttttccatcatcttagttttggggtaaccataacaggactaatgattctgttattcataaaataatatttgtgacaaaggccaagtagattcatatccgacaaatccaagtggatttgtcgagtctattctgtaaaagtgtccagagcagtgcttctcaaagtcttgtctgtagaccacctctatctgagttaccacaggtgcttatgaaaatctccctccccgggccccatctagacctttggaaacaagactctctgaggtagaggcctgggtctctgcattaaaaacagctgtggggccgggcgcggtggcgcacgcctgtaatcccagcactttgggaggccgaggcgggcggatcacgaggtcaggagatcgagaccgtcctggctaacacggtgaaaccccgtctctactaaaaatacaaaaaattagccgggcgtggtggtgggcgcctgtagtccccgctactcgggaggctgaggcaggataatggcgtgaacccgggaggcggaggttgcagtgagccgagatcgtgccactgcactccagcctgggccacagattaagactcggtctaaaaaaaaaaaaatcaattttagtatatggtaaaagtaatgggtttccctaatttcctggttaccattgtttacggtttctgtattatttcaccttctgtagcttttctggctcttcaaacacaattaacagcaggaaaattagatggaaaatttttgtaataaatattcagaaataccttacataaatcatggtgtctagcaatggaagaattgattaactgaatatattctaccttgaaatattctgcatatttttactagaacaaactgcctttttttatttttattttttaatttgagacagagttttgctctgttgcccaggctggagggcagtggtgtcatctcagctcactgcagcctccaccacctgcaaactgcctttttctagctgttgctttccttgattctcttatatcattatcttttgtttcctgcccctatctccctccccttggttgacaaagtgcctacattctctattttttcccatttccttgtctctctctggtgtaattccttctcattcatcttgcaagcagaatttctctatacagcaaaggtcagagctgacaggactgatctgaaatgctgttgaatttcatagttgctcattcaagatcattactgatacatgcaaaagtggaccttctgccaaaatcgacctcagaaaatcagaccaagaggaaaagggcaaaggtaaagaagagactcttgctgggcagcggctgatgcctgtaatcctagcactttgggaggctgaggagggaggattgcttaagcccaggagttcgagaccagcctgggcaacatagccagaacccagtctctacaaataattaaaaaacaatcagctgggtgtggtggcgtgcatccagctgggaccacaggctactcaagaggctgaggcaaggggattgcttgagtccaggaggttgaggctgcagtgagctgtgatcacgccaccacactccggcctgtgtgacagagtgagaccttgtctcgaaaaaattaaaaaaaaaaaaaaaaaaaaaaaaaagaagggactcttaccatttccatttcctcttaatataaatgacattaggcagcattactctgatggcgctgtaaccataggaaggagtagaaaatgacacagccacatagtggtatgatagaatacattacaatttggagtgtgtaaaaaaaaaaccggaagaaaatgctgattttcaattctcttccctcaactaaagaaacaggcgtgaaggaaaatggtgcagttggcattatctcacatggactcctttctaaatgcaagaatgcccttttaggagctgaaatatgaacactgtgagttagaatgcatgggttcaaattcagacttcacaattattatctgactgtccttgaacaatttaatcagtctcctgcacctctgtttcttcatctgagaaatgggaataataatagcatgcacctcaggggtggttaggagcataaaatggggataacacctgtaaagcactaagaaaagtgccttgcatgtagtaaactcttaattgctgcttgctagcattgatatattttttcttttttgagacagtgtcttgctctgttgcccaggctggagtatggcggcaagatcatggctcactgcagcctcgacctcctgggctcaagtgatcctcacctcagcctcctgaatagctaggactataggcacacaccaccatgccctgctaattgttttatttttttggagagacgtggtctcactatgttacccaggctggtctcgaactcctgagctcaagcaatcctctcaccttggccttccaaagtgctgggattattttttattcaccaagtttgaaatctttggtagtgtcctagctgaggaggcatccagggagtttctgggcagaatagttaaccgatactgtgaaaatctgctaacagtggttgttttgctttttgggaagcagcgttccttgtctggctgctgttcccccctggtcacatgggcacactatgattaaatcattcctagtaaatcttggatattcttggatttaataataaattaattactaatgatcacactttggaacatgtttccctgcctgtgacatactaagaaactagaaacgtattcagcatttaccaaaacactcttcctttttttttttaagacagggtctcactctgtggcccaggctggagtgcagtgttgcaattatggccttgatctcccaggctcaaatgatcctcccacctcagcctcccaggtagctgggattacaggcatgcaccaccacacccagctaattttttgtgggttttgtagagatgaggtcctcctatgttgccgaggctggtcttaaactcttgggctcaagtgatccgcccaccttggcctcaccaagtactggcattacaggcgtgagtcaccgcacctggccaaaaccctctcttaatggaacatacatctcacattctggaaatatctattatcccagtgcatatttctttctttctcatgactaacattctgcttttttagttattcacatacataaactgactgataataaatctgggaatttgtcatttaaaaaaatgcacatttcaaacacaatcagtaatcctcaaacagtagagacatgtttacatttctttggttaaagtgtaggaacacagggactagggaatcattttttaaaaagtattttcagacaaatcattttctgagagacttaaaaaaagaaactgtcagtcatttgaggcatacccttttgcttctattccatttttatcataccaatctctcttgcaaaattgatgttattcataaatgttttccttccaaactgtgggaaataagatgtgagtttggccctttgataaagttaggctcagggactgcttatcattgaaacaatgagcacaaaagcgattcagtcctgggacttctcacaaaactcagcgggccaggcggtgctcactcttgttctcaggcattccaggggagtggcagagggacagccagcacgagacattttcaaggttgtttttcccaccctttagaattggtaaatctccgatcgtttagaaaaggatttgttttgcaagaacctaaagtgtccccaagaactatgtttacccataataggccttgctctctgtttaacagagccagatggacactgctatttggctcatggtcatatccccacagatttgacctcatttagaggacactattaaaagattatcctattattgnnnnnnnnnnnnnnnnnnnnnnnnnnnnnnnnnnnnnnnnnnnnnnnnnnnnnnnnnnnnnnnnnnnnnnnnnnnnnnnnnnnnnnnnnnnnnnnnnnnnnnnnnnnnnnnnnnnnnnnnnnnnnnnnnnnnnnnnnnnnnnnnnnnnnnnnnnnnnnnnnnnnnnnnnnnnnnnnnnnnnnnnnnnnnnnnnnnnnnnnnnnnnnnnnnnnnnnnnnnnnnnnnnnnnnnnnnnnnnnnnnatgttgggatgttgggatgttgggatgatgggatgatgggatgttgggatgatgggatgttggaatgttgggatgatgggatgatgggatgttgggataatgggatgttgggatgatgggatgatgggatgtgaggatgttgggatgttgggatgatgggatgatgggatgttgggatgatgggatgtggggatgttgggatgatgggatgatgggatgttgggatgatgggacgatgggatgttgggatattgggatgatgggatgttgggatgatgggatgttgggatgatgggatgttgggatgatgggatgatgggatgttgggataatggaatgttgggatgatgggatgatgggatgtcaggatgttgggatgttgggatgatgggatgatgggatgttgggatgatgggatgttgggatgttgggatgatgggatgtcgggatgttgggatgatgggatgatgggatgttgggataatgggatgttgggatgatgggatgatgggatgtggggatgttgggatgttgggatgatgggatgatgggatgttgggatgatgggatgttgggatgttgggatgatggcatgttgggatgatgggatgatgggaatgggaatggggtcatgagggggacagctccattttcttctttgcatttacaaaatggggaacataaggtttctttcttttccttttcctttttttttccactttggaagccaaatgatgctcataggaaatttaaaactgcactggaaggctgcaagtgatttgagaattaagaccttaagaaacggttttaatagtaacctatctttttgaatgttgctggaaaaggtacttgaaagagcaatgaaggaagcagattctagtcaaaggggactgggaagacactgggacccaacaatttggtaaactagaaaaaattaaactttcagttctgattttacttgaacacactttaaaaacaattggttaaatttttttttataaaataaattacaggtcgggtgcagtggctcacgcctgtaatcccagcattttgggaggccaaggcaggtggatcacctgaggtcaggagttcgagaccaacctggccaacatggtgaaactctgtctccactaaaaatacaaaaattagtcaggcgcggtggtgagtgcctgtaatcccagctactcgggagactgaggcaggagaattgcttgaacccgggaggcgaaggctgcagtgagccaagatcaggccactgcactccagcctgggtaatggagcaagactccgtctcaaaaaaaaaaaaattacaaaagtagtacatgattagtgaaagaaagtcaagcaatacaaatgtgtgtaaaataagaaaggaaaaatctccttcattctttgccagacagggaccaatactgttataatctgtctctctttcataacttttatttatgtatttgagacagggtcttaatcagtcacccaggctggaatacagtggtatgatcatagctcactgtaaccttgaattcactgtaaccttgaactcctatgctcaagacatcctgctgcctcaccctcctgagtagctgaaactacaggtgggcaccatcatacctggctatttttctttttttaagagatgggggtctcactcattgcccaggttggtcccaaactcctggccttacgaatcctcccatctcagcctctaaaagtgctatgattgcagttgtgagccactgtgtctggccctctttcagaactttaaaaacactatatatactataaatgtgtttttggggtggggctaattatgtatgttctgcgatttttttaacttaatgttttatggacttttttctactctttttaaaaaaattctactctttggccgggcatggtggctcatgcctgtaatcccagcactttgggaggcccagatgggcagatcacgaggtcaggagatcgagaccatcctggctaacacggtgaaaccccgtctctactaaaaatataaaaaatagccgggcgtgttggcgggcgcctgtagtcccagctactcgggaggctgaggcaggagaatggcatgaacccgggaggcggagcttgcagtgagccgagatcgcgccactgcactccagcctgggggacagagcgagactccagcctgggggatrgagcgagactccctctcaaaaaacaaaacaaacaaaacaaaacaaaacaaaaatttctactctttttgaagtgggtattcgttattttaaataaagtgaaatggaaaattctgtatctgatgtatttaaaaaatattttttggcatgctatacttaccaacatgttttataagttgcttctaaatgataaccgtactagatagtggtccacctaccaggataagataggataggtaagaagctaagagacatgctgcaggtgaaaaagcagatttcataagactatgtttagtataattccaatgatataaaacgtacatatgtatgcacagaaaacagtctatgttatagacaccagagtgctaatggctcttatcccaggatggctggcgtataaatatttttttcccgttatgctttttctgtgttttcaacaatgaacatttattacttttaaaattagttaaaattaatgtaatataaaaatcacaatgtatctgatgaaaaaagtttgtgtctaaaggctacaggaaataaatccatctgagttagcttccactccattccaaaaccccggagtaacagaaagtcgggtcttcttttattttcttatattaatgaattagatttaagttccctcattatgagaagataatctttagcatcactgaaagagttaagaaatgagacaaaaatcagatcatattcctttattacatatatgaaatataaaaacaaattaacaaagcaatatatatatatatttgcaagtccacaggacttcagagaaaaaaaggttctgtatgtgaaattattcatatggcactgtgttcatgttttgtatattcaagtacaaaagaaactatgtatagtggttatgcgtgggtacagaagatgaataataatgaaaaactgtgattttttgactatcacatacattgtgttaaaaaacaggtaaatataatgactattactgttaagaaagacaaggaggaraactgtttcaatgttcaggtttaaatactaagcacaaaaatataacaaattctgtgtctacaataatttttgaagtgtatacaagtgcattgcaaatgagctctttaaaatttaaagtccatttcccctttagccaagcatatgtctacatttatgatttctttctcttattttaaagtctcttctggtttagttttttaaaaagtttcatcatggctgtcatcttggaatctagcctccagctcaaagctgagacttcacgcatacatattctcctttctggttgcatcttcacctagtttctccaagtattcagagttaaatagcacaacttcttttatatgktcacttttgtccacatgtagtggcagtgctgctgcttcagtaggctttctcacacacccttttccttctttcaacagcagtcaccaaacgttcacaacacaagtggtaggtagtaaagtgctttatacaaggaaatactatatacacatggagaggttccatttaacacctacagaccaaagttcatgcgtaacacacaagagaaggctctttaacaaacaccttttctgatagtagggttagggattccttaaaacgtcattcattactttaagtagcatcaaacgtaagtaacatmgctgaagctggaaggcgtccttgttagaggtactgcccttaatggattactgctaaatgtcatgctgctattaaaatattcttaatagttaagaatttcagaatcagtcccatagaaaacagatatcagtgtaggggttttcatttctcttcatgaaataaaactgtatttaaacatgggtccagaagagataarttagataagacccatgcattcaaacatttctatatgttttggcactttaaaaaattccagtttcctgtctgaggtcttcttgctctaaagtttgtgttttgtacatagacaagtgccattatgtgctatccatcttaatgctacttgcactctctttttaaaatatccatgacttttcttccaagagaaggtttccagtgctggacaaagcttttcatattcacaattagtttgcctgttcttatatcctcatgtcctgctacaaggtattccaaacctaaaaaagaacaaaattaggggctatacagtatcatactttgttgaagggagagatgtgactccagcaggttttcttttgcatttattttgagacaaggtcttgctctgttacccaggctggagtgtagtggcataatcctggctcactgcagcctcaatctcctgggtttaggtaatcctccctcctcagcctcccaagtasttggtactacagttgtgygccaccactcccagctaattttttcatattttttgtcgagatggggtttcatcatgttgcccaggctggtctcgagctcctgaactcaagccatctgcccacctcggcctcccaaagtgctgggattacaggtgtgagccaccacgcctgcctgactccagcagtttyatatattcagggttggaataaggagtaagaaacattaatagctgccatttagtaagcatttactatgcttagtgcatgtatgctttacatgtatgatctcatttagctttgaaaataaccctgtgaggtagataattttttccttcttgttttgcaaatgaggaaactgaggctcagcaaggctaagaaacttgttcgatatctttttgtaagtatagcagcatctggactcaaactcaggtcatgctgagtctagaacctttcctttgtactataccatgctctatgacaaaagaactgagggttctaaggacacttatcatactgccctagatcagtacatcttggatactcactgtgtatggtagtgtatattaaggaggttttttttttgtttttgttttgttttgttttgattttggatggaatctcgctctgttgtccaggctggagtacaggggtgccgtcttggctcactgcaacctctgcctcctgggtttaagcaattcttgtgcctcggcttcccaaatagctgggattgcaggcatgcaccaccatgcctggctaatttttgttatttttagtagagacagggttttaccatgttggccaggctggtctcgaactcctgacctcaggtgatcygcctgcctcggcctcccaaagtgctgggattataggcatgagccactgtgcccagcctaaggaggatttttataaaagtgaaacaagcatttgggaaaacatataggaaagaagctatgaatttagaaaataacacatattccctatataaagcctatgtgtttttggaataggatgtttgtttgtcatacattaaaaaaaaaactaaataaatgataaaacttgcctagatcttgtgatgaccttgtattcaaaattcgtttcaagctttagataacaaattttagctaatatatccaagaaatgaaaggacagtctcatcacctatagattagtaaaaagaaatacaataattgcccttagttaatgtttgtaataacgtagattttggtatttaggaacgatttttaaaaattatagggtagataaaataattatgtttataaaataaaaactttccaatataaaatagaggcacacttttaaaaacgaaattaagtgaatgctagatgctaaaattcaactgaaaatatcaatttaatttcacaagttgattcattgctcatttttcactgaaatgactgagaaaaaaatgtcatccaagtagtaatgaacacctgtaacaaccatacaggcttcttggaaaacggcttattccaggttcagggcaggaagttgagcatgggacatcttattgtattaaaaaacaagaaagctttcaaagatgaatgtgtgtctttttaaaaggacacagcagctagcaggaaggggttataacttgtcaaagttgtggtaagttgagcaccaagaaacataataattgtgtttatgaaaacacattaaatccatagaaatccataattccaaaatgacactaaaaaatgagaaagccagagaaaaattaacttgtcatctttagaggtagctgttaaaaccatttcttactttgaaaattagaaattacagggaaggaatgtagcatttatcctgtctttacagtaagaactgtatttcatgataacctagttgcccagcttgggagagaaagccctcttacggaagaatgccagctaataagagaagagaattcaaaagaattagaaaaacatcatttctcagactctaatgaaattattgattcaggaaaggattatcagttggcgataaagtcattaaatgaatgattaatggaaagctggatgcttgtagaatgctacataatatcacactcactcttttctatctctaaaggtaaaacaaaactttggcaatggagagatcagactgccttcattgtaatccaaaggtcaagcttagagacactgatgggaggttatccaggtaccatgtgcatttgacatgattcaacatgaagcacaccatgatctctataatggactctagccaaaatgtttgtcttgaatcaatcaagcctttctttagagattacagaagatagaagagatagaggaataagctaaacaccaccataaatgaaccaaccacacaaatgttgatggtcagataatggatagggcatctgacctggtttcctcaacaagtcataaaaaaggaactgtgctagaataaaaaagagttgaaggactgaaaaactagatataacgtgtgatcctggattgaatactggcaaggacacatcagctgtagaggacattttgggatcagttgggaaatagaaatatgacctgagtattagataacatgaaaatcaactgaaattgaaggtaaagcttattaacagaataatgcaggttacagaatggagcatatactatgatatcgttttggttaaaaaatataatacatacacacagaggaagattggaaaggatttgcctaagctattaacagagatgatctctgggggatagaaatgtgaaatttaaaaatttcccctaaacatctcccctcccctccccttccctcccctctccttctgttcttcctttttctttcttttttttttttttttgacagggtctcactctgtcacccaggctgacgtgcagtggcaccatctgaactctgtagcctccacctccctaggctcaggtaatcctcccacctctgccttctgagtagctgggacaacaggctcatgccactaaacctggctaatttttgtattttctgttagagatggggtttcaccatgttgcccaggctgccctcgaactcctaggctcaagcaatccacccacctcaacctcccaaagtgctgggattacaggtgtgaaccactgcaccctgctaaaagattattaaaagaaactcatcctaaacttcaaaaaagctattatggtgttttcagaaaaagagaaaaaggaaaataatgacacagagaggtttcaaacactggagagtacaatgtaaaatgaatgaaaaggcatttaaattataaaaggcaaccttaacttctgcatgaaaaagaatctcaatatttaattaacagactagttaaaaatataatagccttaaattgtttgtataatgtctaaaataataaactcctcatttaaaaatacaataatcaatttttaagaaacttcaaggttagggctggatgcagtggctctcgcctgtaatcccagtgctttgggaggccgaggtgggaggactgcttgaggccaggagtttgagaccagtttgagaccatagcaagaccctgtctacaaaaacacaaacaaacaaaaattagctgggtttggtggcatgtctatagtcctagctactcaagaggctgaggcgggaggattgcttgagcctgggaggtcgaggctgcagtgagcagtgatagtaccaccactctagcctgggcaacagagcagagaaccctgtctttaaaaaaagaaaaaaaaagaaagaaatcaatctcagggttaagtctagtatttttacatgaatttactttgaaactacaaatagaataaacaggaatttaccattaaagtataaatataagttaaattgataaaaacaatactgaataaaaccataaattatgaagcagcatcacaccaaaaacaaatatgcaaaacaatgttcttttatacctcttattagcatttrtattttattttcctatctctagggttttgacatctactttgctacacgtctgagaacacgragtttattttgtatccatagaaaaagaaratacaatactttagtgctagttttggtgttctaaaatatatgactgatgaatgagtaaatgtatgcatgaattaagaatgaatgaatatgcagggatacccaataggattgtttcttttccaaagtagccaaggaagcaggttggcgtgtaaggtttcagttttcttatcagcyttctttggccttggctgttgaacttgtaaaaatggaaaaacaaagtaaaatgaaagagtgtctggttttgctttggcaagttccagtcttttcttcaaagcaagtaaacatgttttcaagaattctttaaataattgcgcttatgttttcaattgtgatgaactcagttgattctttgacttggcttggcagaaacctgattaggaagtatagttcacttcctggagggtggctcacatggtcaaagcttttgtttttaatgtctcactaaactgggcagactttttttttcttttgccaagacagtaggaaagctcttataagagatgcctctaagcacaaatcactgggaaatagaacttacatgaattatttttagtgtcctgtattcaaagctcaggattcttattacttcaatttgttctttggaattttatttatgtatttttaatttcttttgagatagggtcttgctctgtttgcccaggctggagtgcagtggctcaatcatggctcactgcagttttgacctcccyggctcaagtgatcctcctacctcagccttccaagtagttgggactacaggaatttgccaccacacccagctaattatttaaaaaattttttgtggatactgggtctcactatgttgtccaaactggtcttgaactcctgggctcaagctatcctcccaccttggcctcctaaagtactgagattacaggcgtgaaccaccatgcccagtctatttatttatttatataatttaaaacattatttttcacagtttccttattaaaatctaaattaatttaaatatattattgaaagggtagaaaaggatgtgagagattggtcaacacttggccaaaatcaaaagttctgtatcaatgttgagtttgtttagactgaggggatattttattgttagtttatgctctctttctctttctctctcagttatctgcttctctcaaatttattaatcaaagaccgcaaaagactttgtttttttgagatggagtcttgctctgtcacccaggctggagtacagtggtgcgatctcagctcactgcaacctctgcctcctgggttcaagtgattctcctgcctcagcctcctgggtagctgggactacaggcacataccaccatactgggctaatttttgtatttttagtagagatggggtttcactgtgttggccaggttgggcacaaaagacttcttattaatgtaacaatgagtttatatggggaaggaataaactcatataaacaatgagtttatatggggaagaacataaataatgcacctgtttcatcagtgcygctaagacacagatgacaatcacacaagcagggagatgcagaggattttttgaattatgatttgttttattagaacctgctaagtattatgttaccattatctgggtactaatggtaggtattgaagatactatgatcaaaagcctaaatcccatcctcaaatttgatgagggagacagagaaataagcagcttataacccaggataaccatgcgcttggggcaagaacccctgtgcttatttatttgtcttcacttctgctataacatttaaaggtgcaaatcaaatttctctccatttcaagttgctctaaaatcctacagtttttgttttgtttatttctgctgtttctaatttgaaaccagaaatatcatttcatgaaaaacaagatgatgagaacttgagarctgttttctctccaagagaaacagatgcttttcaagcaatagtcgaaatgaattcaatattatttccacagatggaattttgcatttgaacttcctttgggaacaggttctactgtaataggacctagctttcagataaagagtaagtggcagataaattcatgaaagtgctttctatgcaactggcacctggaaccaatctgagcctcctcttttaggatagagagtattatatttctggattttaaaatattaaacttttatagagcacatggaagagaaataatttttcgatgttagttcaaagaattccatttggattttccgcaggagtcagatggtgaaagggagagatgttcttgctgagtttgtttatgttgtgcttcagaggatgtaagacaagcagcaaatcagcagagacaaggtaggtactaagataggaaagtctaatactcaccaggattgaggattggacaagtgcatcctctgtccgtccatgattctggatataatgttcgctttcctcggaaaatcttcagtttggtagattttaagacctttttaatcttcacattgacctcaacatgagtacctttatcatgagctgataaaatctttatttttagcactgttaacacagaagtcaaaatgcatagaatttcatattatcatttgaagtttgaataacactcaagtatgcatttcagaatataatggaaaggtgaattgatgatgaggatgtgaaaatttgctttaaaaatcattaggcattaacttggatggagttagaagccattattctaaggaaagtaactcaggaatggaaaaccaaacctcattatattctcatttgtaagtgggagctaagctatgaggatgcaaagacctaagaatgatataatatactttggggactcagggggaagagaggggataagggataaaagactatatattgggtacagtgtacactgcttggatgatgggtgtactaaaatctcagaaatcaccactaaagaactcatccatgtaaccaaaaaccacctgttcccccaaaactattgaaataaaataaaataaaaatactgaattaaaaaaatcataggctcattcagttttgcactggctttatctcgtttatctatattaactatattcttatttgttaggcaatttcaaatgtgactccctccaatatcattatcctaagagaatatcaaccatttgcctattgcaattataatcttaaatacattcagctaccacatctaaacagagagaggaaacataggaagtagaattatcctggcttttatttaggttctgactatattattcttttgtggctgattgtgtttaatgttatgatagagagaaaaatgctactcctagaatatattttgcatattccaaagagattatataatatgattgactacttaatattcttctcctggaataaaatgcaagctgactggagttagggaagctgtcccttaatgggtgtccaacctcttgacttccctgggccacactggaccacacataaagtacactaacactaatgatagctgatgaactgaaacaaaaatctgtgcataatttttgtgatatccgccaccacagataaaccaaaaagtcttcacattcaaagggctggacacccatgcatgatgatggagctccagtattctgtatgacttatgattctattacgccctcccattgatgaaattgatatggctggggattaagtaatggaataatttggggtcggaaagaaagtaaagctaaggatcactgagctactcaggaacactagggaacgtagggaagttctttttttttttttttgagatggagtcttgctctgtcatccaggctggagtacaatggtgcgatcttggctcactgcaacctccgcctccgaggttcaagcaattcttcctgcctcagcctcccgagtagctgggattacaggccaccacgcccggctaattttcatatatatatattttttcacagggaagttcttatcggcttatccacatctccatggaagagtgtgtgtaatgagagcactctatcttggctggtctcatactctgcgaatacagcgtcagacagctatctttatggagtcatcacattttagacttctaaggggtcttaaaagctcatgtattttatacacgaggaagcaagttttaagaaattaaggccaggtgcagggactcatgcctgtaatcccagcactttgggaggctgaggtaggcggatcacctgaggtcaggactttgagaccagcctggccaacatacagtgaaatcctgtctctactaaaaaatacaaaaaatttagctgggtgtggtggtgcatgcttgtagtcccagctacttgggaagctgagccaggagaaatgcttgaaactgggaggcagaggttgcagtgagtccagatcacgccactgcactccagcctgggcgacagagcaaaactccatctctcaaaaataaataaataaataaataaataaataaataaaacaaataaataaagtgaacctttcaagttcacataactggttggctagaggtagagtttgggctagaaccctgatgagataaatgcatgaaggacagggagcatagtgcccggcgtgtggctaacgctcagtaaatgttcgctattattattccactagacttgtaagctaaaagagagcagggaccttgtctgtcacttctattgctcaatagatatttgctaaaggagtaagcaagtaagtcaagtgtttttttttttttttttctattaagccagggaatggggaggaggaaaccaattttttccaagtcttagcagtattgcacttaataagaccaagatgtttcattacattaagagcgttcaaattcttcttaagtagaaaattaatgcagttgtattaaaagattggttatttgtaaattcagagagctaccaagttgatgtgataaggaaaaccagttgatattttcactgaatgaactgactttgaactaaattatcatattctttgctcttaatagtcaatgccattccctctaaactgcctttcctttattgagcgctgtacatttcaagttttcttctattgtttagccaagttagaaagtagagagggaagtgtacatataattttagataagattcatgaggtttttaccacttatttactttttaaaatcttgtatgagattagagacaatgttatccagaacctaaatacttggtttcataaatgatgacttaaaattttctcctcattgtagtgtatatttcaggccatatatattatagaccaataaaaagtctcaggctgggtgtggtggctcacgcctgtcatcccagcactttgggaggccgaggcaggcagatcatttgaggtcagaagtccaaaaccagcctggccaacatggtgaaaccccatctctgctaaaaatacaaaaattaggtcaggcgtggtggctcacgcctataatcccagcactttgggaggccgaggcaggcggatcacgaggtcaggagttcgagaccagcctgaccaacaygggataaccctgtctctactaaaaatacaaaaattagccgggcatggtggcacatgcctgtagtcccagctacctgggaggctgaggcaggagaattgcttgaacctgggaggtggaggttgtgggcgtggtggcatatgcctgtaatcccagctattcaggtgrttgaggtatgagaatcgcttgaacccagaaggtggaggttgcagtgagtctagattgtgccactgcactctaggctgggcaacaaagcragactctgtctaaaaaaaaaaaaaaaagtctcagacactaggcaagaatgtgttggcaagatatgatatcttaatatatttaatagtaaatataaagccatttgaagatagtaacagtctttacttaggcagtgccatttccctttttgtacaggatgtattttcctgttatttgaaagataggggtatctagagtatacagagagggtggggaagagacccaggtggacagctggtctcagtgcctcacaagtaagacatcatctccctccccctaccatttaccgagcatcamatatgtgctagataatgtgctgcatgcttttcaaacatctcattccacgaggaaggtggcatgatccctattttacagatgaggaaacaaatttggagaggttaagtctcccacccaataagccagaaatcaaactcacataggtctgagtccaaagcctgtgctctcaactataatgaaatgctgccttaaactgatttctactcagtattactgtacgacaaacgaacacaagagtcactgaagtggctagaaatgtcccttttggatgaataaggcaagaagtatccacgagaaaggatttcatgtcatgatttcttctctctgctctctgcctctttttcttatggtataataactctacctttgctctacaagcattctgtcctccctgggacatccatcaccaactacatcaggaaaatctagctcaagaccagaacactgtgtttagtgttattatgtaagactaatgctttgtgctttcatttatacacaatgtcatcagtcaggcctcccattttcttaaaaattytctgaacttagtgtgaataggttctcagaagcattcaaggatttcagactcaccatatgaatatttcattccacagaatgccttggcatttcctaatgtctgttccttacattcgcatttacctatggaaagtaaattaaaaatggtgttagttattagaaaagcaaagaaagaaaaaataagagatcagcaagtgtawccagataacacatcccttaagccttgagtgatgcatacagtgtaatctgtaagtaccaaggaaccacgaaagtcattcaaaagaagtagagtctctttctaaattagttatcttccaataaagtattcatccaagagaaatacagaaggtagaaacagtgatgtatttcaatgcttgtaattgatgttgtgataaatacagtctagtattaatattccatgctaacaggaaggaaaaactgaatggaaaacaattgtctttctgcagttaatgttcaccaccacaaaagtgaaattaaataaactgattgggcagtcccttgaaggtaatgtcgttcaatttttttgttgttatccatttaaaaagtatttattgagcacttttggtatgcaaggcatggtgcttcgcacttcagcaccataaagataagcaagatacaattcttgccttaaggcttgcaattcagtaaggtgaagaaaccaagtgtacaaaaagtgataaagtgataagtggtctsggagaggtacaatatacttgggtggaagagtcacatgtgtctgggaagatgggaaaaaacttcttggatcaagaaggatttaaaaggatcccaatagtttaaattatatattgccactattacatgtgagagatttgccaggccctatggaagactttcaaaatgcctttgtgcatagtttattttatgtatgdatgtatgtatgtatgtatgtatgtatgtatgtatatatttatttatttatttatctatcgagatggagtctcattctgtcactcaagctggagtgcagtggcgtgatctcagctcattgcaacctctgtctcccgggttcaagcaattctcctgtctcagcttcctgagtagctgggactacaggtgcacaccaccacgcctggctaatttttatatttttagtagagacggagtttcaccatattggtcaagctggtcttgaactcctgacctcagatgatccactagcctcggcctcccaaagtgctgggattacaggtgtgagccactgcgcccagcctgtacatagtttatatgtagcaggggaccccaaacccctggccgtggactggtactggtttgtggcctgttaggaaccgggtcacacagcagraggtgagcagcttgagagagagctgattttcatctgaatttacagccacttcccatcactcaaattaccgcctgagctccgcctcctgttagatgagcagcggcattagatgctcataaaagtgcccaccctactgtgaactgtgcatgtgagggctctaggttgtgctctccttatgagaatctaatgcctgatggtctgaggtggaacagcttcatcctgaaaccatcccctgcccctgccatccatggaaaaattgtcttccatgaaaccrctccctggtgcccaaaaggttggggaccacagatatatagcattctcatactcatttatatattcgtttcctctctagactgtgtcccttcaagacaatggctatatcttatcaaccttacatttctggagcccagcatggataggatttgcactcactgatttaacaattagatatactttttcccctttcctgccccctcctgccctcatgcactgcatttcataggcattgagtggtcataacagcagctagtgcttactgaggagcacttactgtataccaggccgttttaagcattttacattaatttactcatttaatattctcataggtagaaatctgggaagattatagagataaaagagtgagcagccaggtgtggtgactcatgcttgtaatcccagcactttgggaggtcgatatgggtggactgcttgagcccaggagtctaagaccaggctaggtaacgtagtaagacattgtctctacaaaaaagattaaaaattgtcgagcacgcaggcgcaatggtcgggttgcggggggcgggcggggggagggaggggaggcgggggcagggggcgggctgtgattctagaatctgaaccccagctggcactgcctcccaagcccgccgccatggccgcctacaaactggtgctgatccagcatggagagtgcatggaacctggagatccacttcagcagctggtacgactcygacctgagcccggcaggccaccaggaggtgaagcgcaggcgggcaggcgctgctagatgttggctatgagtttgacatctgcttcacctcagtgcagaagagagcgacccggaccctctggacagtgctagatgccattgatcagatgtggcccacctgtaatgaggacttggcgcctcaatgagcggcactatgggggtctgaccgatctcggtaaagcagaaactgctgcaaagcatggtgaggcccaggtgaagatctggaggtgctcctatgatgtcccaccaccctgctggagcctgaccatcctttctacagcaacatcagtaaggatcgtaggtatgcagacctcacagatgatcagctatcctcctgtgagagtctgaagracactattgccagckctctgcccttttggaataaagaaatagttccccagatcaaggaagggaaatgggtactgattgcagcccatggcaacagcctccggggcattgtcaagcatctggaaggtctctctgaagaggctatcatggagctgaacctgctgactggtattcccattgtctgtaaattggacaagagctcgaagcccatcaggtgcatggagttcctgggggatgaagggaccctgtgtaaagccatggaagctgtggctgcccagggcaaggccaagaagtgaaggccggcgggcggactactgtccccaggagcaccctccttgcctggtgtgtccctctgctcatccctcctgcacacgccacactgaccacatctgtaggcatcttgagctgtagctgcagatgaggaccagtggctcccattttcgttttagccatttttgtctcctgcacccactcccttcattcattctagtcagaatagcacttctagggcatgggttctcagtccaagctgtggaaaagctccccttgtccaagagagtttaaaggtagtgacttgggtttttgcgaccgctttgtttactaagaacttgtgggggaggaaccatgctaagccatgaccaatgaggagaagcaagagagcctgtctgtccccaagagccagtcctctgctcttctgtagtcaggccactgcctgggagctctagtcattccagtggaagatgaatgtaactcgcatggtgatgtgacagctgtttcctccctgaccccagaggagatggctctagaaggttgggatcaatcctgaatttagcttaggtgttacatttacttttataaaaaaaaaaagtatagtatatataaataatacaaaaccataatccttctcggatctcttgtggcagttgaaatagtcccacatgtggtcatcagaaagtaagccattcctcatactaatatgggataagctccttgacctcagaggagtaggagtgcttcctgctgtgtgttttagaatccctctgctgccttgtttcatggcagtaaaatgcctcttggtcctgtccaagtgtgtctttcactgactgatttctgaatcatgttctagttgctcggccacatgggtccagtgctcatttgagcatcactgtactaaatcctttctccaggaatgagtataataaaggagttatgtgcaattaaaaaaattggcctggtgtggtagtatgtgcctgtagtcccagctacccgtggaggggagcattggtggcactgaggtgggaggattgcttgagcccaggaggtcaaggctgcagtaagccatgatggcaccactgcactccagcctggacaacaaagtgagactctgccaaaaaaaaaaagaaaagaaattgtagtaacctaagtgaatagcctatggcctttgataattccacaaagcagaagagtacagtaactactgtgctataaaacctaatggaactccaaatggcatatactgttcctcaacacaatgcttttctctttaacccttcagcctagaagagcagacataggtctattgtttgatgacctttctttggctgctttccaatacttctttttcatatgcttagagctcaaacaatatttgttgatcaggcttcagcccagatgtgttttcttaaaagaaatctggaagggaagaaaagcttgtttagttatgctaggttattaggacattaaaaaaaaaaagagcattgtttacagttctgtggtactagttaaggccagttttgttatttaggaagtgaaattttacatctggtataagaagtggtagaaattaagggtgttttgttggtaaagtatattatactcctagttgaaagctgtttttatggaaacttatgggaggtatataggtaggtagattgttttcagtgcttagaacacttgttgaaaaaggtgctcagaagcaccattctatacccaatgcagggaactcaataaagtcttcctcaatctggcgttcatccagatgaatttcagagactctctggggacatcacagacctaacagctgctgtggacatgagagtctgcagtcattctggtgccagcactttatgtgcttggctggaatgctgccaactctctaataacatgcatgatgggcttagtgaatgtcctatagtcctaaaaactggattattacagatttggtttagcaaacttggagaattataaaaagtcattgtgtgcttagaaaaatagaagaacacctttaaaagtggctattaaagttaaaatcataaaattccagactacatagcattaaggcaaaaaaaattcatagtaaagacttgttttctttttcaaatgctgaaaagataaatatgataacttcatgttgccttctctttcgcaccttctttcctgttgtgattgaacatgaagccattaggaaaattatcacgagattatgttaagtgaaaaaaccatgatacagatgggcaaataaccttgtttctcagatttaggttcttgattcttgaagggtccatatgttctctatgagaaggttttaaaactgtgatttctttctgatctaaaatgtggattgatgggtggatagaatttaggtggcgggtatgtgaatgcacaacttctaaaacttttctggatgtctgaaatttttcataataaaatgttgggaaaattatcacagacattctcaatcaacacaactttgtgaattcatacttcagcacatcctcagctccaagcacatagcaatattagataaaggacggaaaaaaagacatagcctgcatcaaaaactagatatttatctctgtggactagaaatgaatgttttcaatttgttgatacttcttgaatttaaaaaaaatgtaaagaaagaaaagaaatgaatgaatgtgcattcgggggatagggctttggggtctgctttcagaatcaggcagcagtggtcaggagttcagatacaaaggagttaataggacaaaaaagagatcacagtcagactcactttttaaagacagattgggtaaggctctccttgctaatgaaaggaggctgggaaaaaacaataaaccaaccacgtacacaaaactccaaactattattcatggccacttgatgacattcttaaaaagggctctgcatttcatccagcatctagtcctgcaaattatgtagctagtccttaagtgacctagaaatgaatccaagttgccctcctggttttcaaagaatagatataatacaatgaaattagattagagataatcagtaaacaaatattcttttttgtttttttgtttttgagatggagtctccctctgtcacccaggctggagtgcagtagcctgatctcactttactgcaacctctgccttccaggttcaagtgattctcctgccttagcctcccaagtagctgggatcacaggtacgcgccaccacacccagctaatttttttgtatttttaagtagagacggggttttgtcatgttggccaggctggtctccaactcctgacctcaggtgatccacccacttcggcctcccaaagtgctgggattgcaggtgtgagccactgtgcccagccccgggtaaaaaaaaaaaatattctaaaaaccctgatgtttgaacaattaaatatcctagacaactcaatggattaaagcgaaattcttaatggaaattagaaaaacattagaacttgaatgataatgaagatactacatataaaggccaataggatccagctaaaagatcttataaggaaatgtataaccttaagagtacttgctaaaaataagaaagactaaaagtaagtgagttaataatcactggactcacaaaggcagaaaaggactaaaaaagcaaacttagagaaaacataaaaaaaaaataaagataagagcagaattagtgaaataaagaaaaattaaataggttggatcaagttaaccaaaagttaatctctgagagaagcaaattaagatcagtataagacaataagaaaaaaggcacagataagcttagggacaaaaagaagattaaggacagattgagtaaaggttaaataaattatgagtgaataccatgtataactctatgccaatacaattttttaaaattaaaataattggtggctgggcaaggtggctcacgcctgtaatcccagcacttcgggaggctgaggtgggtggatcttaaggtcaggagatctagaccatcttggctgacactgtgaaaccccatctctactaaaaatacaaaaaattagctgggcatggtggcatgcgcctgtagtcccagctacttgggaggctgagaattgcttgaacccgggaggcagaggttgcagtgagccgagattgcaccactgcactccagcctgggtgacagagtgagactccaactcaaaaaaaaaaagaatcggtaattttctagaaaactttgattaccaacaccaaatcacaaataaaacaaattaataaccatgacagatattgaatcagtaatactttcgtctactcatagacactgtgtctcaatggttttatagataaattctaacaaaaattcaagtaacagatgattctatttttatataaataattgcagagaatagaaaaaaaacgtagtgggtaaggggacctcctaactttctcaaatatacaatgcaatacattaaattataggccaatatcagttataaacatcaatatgaaaatccyaagcaagcaaataaataaatgaaagataaaaaccctagcagatcaaattcagcaacgtatgaataaaaatacatcacagcaaataaaacttatcctaagactaaaagaatagcttgataataattgccattctgacaaacaacagatgctggcaaggctgtagagaaataggaatgcatttacactgttggcaggagtgtaaactagttcaaccattgtggaagacagtgtggtgattcctcaagggtctagaaccagaaatatcatttggcccagcaatcccattactgggtatacacccaaaggattctaaatcattctactataaagacacctgcacacgtatgtttattgcagcactatttacaatagcaaagacttggagccaacccaaatgaccatcaatgatagactggataaagaaaatgtgacacatatacaccatggaatactacgcagccataaaaaaggatgagttcatgtcctttgcagggacgtggatgaagctggaagccatcattctcagcaaactaacacaggaacagaaaaccaaacaccatatattctcacttataagtgggagttgaacaatgagaacacatggacacaggtaggggaacaacacacactggggcctattaggggtgtggggggcgaggggagggagagcattaggacaaatacctaatgcgtgcagggcttaaaacctagatgaggggttgataggtgcagcaaaccactatggcacatgtatacctatgtaacaaacctgcacactctgcacatgtatcctagaacttaaagtaaaaaaaaaaaaaaaaaaagaatagtttgataccggaaaaaaattattttcaaataccacattgatagattacaggaggaaaaccatctgattttctcaaaagatgcagagaaggcattcagctaaaagcaaaactcattaacgataaaattagaaatagaagagaatgacatttacttgataaaggctacctatcaaaaatcgatatcaagttttatagtggtgaaaatttcaaactatttccatcaaatttgggaaaacattgtactgcagtaaaaaaaaatgatgcatgagaactacacaagtgagacaaaactgtccttatttgtcaataatatgatggcctacattagaaaatccaagataatccatacatactggaatcagtaaacaagttcagcaaagtcgctggatacaagctcaaaatacaaaaaaaaagtgacacatatacatttatatcctttatatcaataatcatttaaaaatacaaaaaaagtgacacatatacaccatggaatactatgcagccataaaaaatgatttttaagaatcattttaaaaattcaggtaaagaacactttcccaatagcaataaaatctaaaggtatctaggagtaaatttaatgaaagacaggtaaaaccattttggagaaaagtgacaaatgctattgaaaggccttaaagaggaccttaatatatagaaaggtatcttcatgtttgggactactcaatattacaaagctatcacttttttcaaaatgatccataaagtcaatgcaattgcaataaaaatcccaacagagccttttgtgggatttaataaacttaatct

SEQ ID NO: 93387 - DNA, 17932 bp, Homo sapiens
ttaccagaaattttaaatatacacaaaaatagacattataatgaacccctttgtgccagcagctgccagcgtaagtaattatgaacacctgctgttcttggtaacataacttggaatcttatttcctccttggaaactggaggagacacacactataaaacactataaccagaatgatcatttcaaattgcaaactggattgtgtcaaccgcccttccttctccctcaagaccctttaatagaatcctctggtcctgggatgaagatggagcagagctcctaccccagacctggacagctgtctctagacttcttttaagtgagagaaaagtacacttctcttgtttaagccacttttattttgggttttctctgatgtcagtagttctcaaaactggctacacaatggaatcaatggaagagcttaaacacaaaacaaaacaacaacaaaaccagataacccagaacaacacccagggactcctagcaatgtggagtgttgctcaggtgtttccaaagactctcccaggtggtgctgatccacaggcatagttgagaaccactgtttcatcatatgcatccaatctaactctaactggtacaggctcggctgaaaggtcatcttctcccaagaagtctggggaggaactcagggctgcctcttctgtttccacagagcttggtgctaatctttattaagtgtatcaggctgggcatagtgactgatgcctgtaatcccaacactttgggaggctgagtcgggaggattcattgagcccaggagtttgagaccagcctgggtaatatgggtgagaccctatctctaagaaaaattttaaaattagccgagtgtggtggaggtcagaaactcaaagtgtctccttggactaaaatcaaggtgttggcagggacgagtttcttctagagacactgggggagaagcctgtcccttgccttttccaactgcttgcatttgttgtcttgtgacagcatcacctgacctctgcttccatccccacatctctttctctgactcctgtttcccttcgataaggacccttgtgattacattaggccctggctatacaatctagaataatctcccacctccagatcattaactacaatatcctcttttgccgtgtaaggtaatgtcttcataggtaccaggtgttaggacattgacgtctttaggggccattattctgtctaccacaatcagtgtacataaggtgaagcaatagggagtggtgaggcctgtggcaaactggaaaatgaaagccctgcctaaagggggcagctactacgtgcatctctagttgagccactgttccatatccacgtgcaggcctgatagtactaagtcttccaatgtttcaagaaaaaatagaaaagtacattttaatgtcaaatatctcaatgtttaagcattagaaagcataaaacggggaaaaaaaaccccacaactctgctggggccaaatagaacatgtatgctggcttgagacttgggctaccagtttgtggtgtctagtctggagcttcttcctcactaggacagttaaggcagcattactttattttgtgctgcttgtcaccttgtcagtgggagaagagacaggcaggtgtgaagcccaggctctctctcaggccccagggtggtgttggtatttcccttccatttaccacccacgttcctcccttgacctctgtccaaactcctcctcatctctccaaaagaaggagctcccaaggytgcacgtggctctgccttcaattactgtttatttcatttgcatgtggcttttctccttgaccttaacatgaggaggggagccacagccagggcagcgtagtaaaagctgagccttttgctctgctagggtgaactctaactgtgctttacaggtgctattgccacacgtaagcactgcaacagtcttctctccctgccccaccggaccccaacctcctcctcctctcagttgggtcttccttagtctcaatgatgctgtcagttaaggtgtggtcaagaaaatggaagccactctaggtgttttgagtaggaagagattaatattaacacaagtgttgggaggctgggaagtgaagggcactaagctattgtcaagaaatctggaagtgctaggattatagggaggctactaccagtgttctctgcagtccacagtcatgaacggagcactccttaggggggccttcaaagccttgggtagaaatccacctctgcagatgcccacgcaccagctgcatgttttgcttccaggccagtgttatttgtgtgattgtgcaagagcttggcttctagtctgcacttggatactaatcccctaatcccttccaaagggaccttgggcaagtcccttttcctttttgggtctcagtttcttcaaccataaaaatgaggtgaaggggaaggaagacagagagggaggagaacagagtttgtggcaaatactcaggggttagttatgttcaacaacattcagacttgctcatgttcacagagagtaagcttcacttagaggatcacttaggaaaaaagaaaaaagtatatattggtttgatttttaaatgtatctttatttttaaatttccatttcctgcaaatgcctcagtgtcttgacctagtcttgcctcttccgttcaaatacagaaaatgattatgctcagtgtagaagaaacactcagtgcagctttcagtccttttgtttggaatctagctgatctgtacgtcattctcagagctggattcttcttcagtaacttcttagacatataaggctctacaacgctgaaggatagaaattgcttctcttctcccaccagcccagtgtaaacacatccctggacgacactgacctgactgtggcttgtgttatctcaccctttccccttcaatccacacaggctccaggtccaatatccttacaaagggcctggatctttttttgttaattaaaaagctgaatccatcacattcctggaaaatagtcaaccctctgcaaaaataatttgtgcattttaccttcagctactgcacattcattcttctctccaaaccataaatgtcaagcactgtggaagtttttttttttttttttttgaggaggggtaaataccttgcaacaggaccactttggtgagttctgatgccagtcacagcttagaaagtgtcaaaggtgggcatgctggatagaatctagacataacacatttgcaggcaaagtcactttctggaaataaccatgacggagtcaaagactcctcagaaaccacttaggccagtgcttcccaaatatggttatatatcagaagcatatgaggaacttggccaggcgcagtggctcatgcctgtaatccccgcactttgggaggctgagcagggcggatcacttgaggtcaggagtttgagaccagcctggtcaacatagtgaaaccccgtctctactaaaaatacaaaaattagctggcatggtggcacgctcctgtagtcccagctactcaggagtctgaggcaggagactcacctgaattggggaggcggaggcggcagtgagccgagatggcactgttgtactccagcctgggtgacagagtaagactccatctcaaaacaaaacaaaacaaaacaaaacaaaaaaggaagcatatgagaaacttaacaaaaacttctgggctccaacctacatctaataatttagactctctgaaggcaaggtccaggagattgttaaaaaacaaaaacaaaaacacaaacaaacaaaaaaaactaagctccccactcaattctgatgtatagctaagtttgggagccccttgtctagttcttatctgaactaggattttgccacatggttatctgtccttccctgtactcctccagtgatgggaggcccactgcctttcaagggagcccctcccagccttagccagttctgctttttctgggagttattcctctgtattcttcactggtctggctctgccttctaggaccccacagatcctatctggttttgcccttcagagatttggacggcacagccttgtctttcaagttctaaagggtgaacatcccagttccttcagctgctcctcaaggggcacagcctccaaccttgccgcatgggggtcacttcctgtctgcagctggcctctcagacctgccacagtttccaatgcactctaacatgaggactgatactcattttgccataaactcactccctctatcaatgaggcctcttaaggattggtcagttaatcattaagtcaatcagtcctggagtgctatgccaagtgcccaaggggagctaggctgtccacgtgctgtgggggaggcaggagggccttggcaaggggctcatgccgttgctggagaaacccgaggaaagcatgggcatcaaggtgataagatgccaatcatagtgccttcatggatggctaacttttgcagcaagggctgtgaacatcctaaggatgatatggtagcaaaagattccatagagatgtagcttaaggaaagaactaagtgaattaggtccaagcagtcgcatgtgagcaccctagatcagtggagaggcagggatttaatacaaggaactgggtgcttacagacctgctgcaagtgccggaggcagaagcaagccttagccagaccaggaccaactctcaggacaatatggacgtggcccaccagcctcgtgcctgtctgaggctacttcagacaccctcctgcagcctccattcaaagagcaggaagccaggtcaaggagcggctacagccacagcggccggtccacagccagaaagctggagaagggacaaggaatgctgccgcagaacatctcccatttctgctatcctgctagtgccaccctacaggggcaggacaataccctccaatgcgtgcccgccttccacatccggcagagtactactaattggcagcacctagtccacatccagaactctaactgcaaatgaggctgggaaacatggcggttagctttgggacctccctagccagaaggaaggtgcagcgagggtggagcgagtgagatgcatgttcagtggtccatcttggcaacctttatagcaacaaaatggagacaattaaatgtccaacagtttacccctacaacagaattctatgccaccttggagaggatgatgtcatctgtaattagtgataggagaaaacttcaaaatacagcgctaagtttttaaattttttttaaagcagcacaacagaggttactatatgattttatttttattaaaataattttgaaagatgcagaggaaacaatactagcaggacgaacaccgtaataatggctaccgtaggtgaagagattacaggtgatatttttcttcttttttcatcctttcctgtgttttccaagctttctacactgtgcatacattctttttgtccttaggacaaaaatgtactttgaaaaatgcccaaatataaaatcttcttgaaggaactgaagaaaggagcaatgaaagtggaggacagaaattagtgaatcctggacaaaaaaagtgagggagaggcgaggcagagaaggggttaaggggagtctcaaggatggcagtcgattaagcagcgtcttgcagcggggagaaatgcaaagtgtagttggggatcggtctccgaaaactttgctgtgtgacctggggaagcccctgcccctctctgggtatctctgtttccgctcccaaaccagtgccttaggaccctagatctgagcaacgtggacactgggcttgcggagacccgagggagggagcgctgaagcggtgcgggctgccgggggtagaggggcggggaccgggaaagaccgggctgggcgagggaggagcggccttggccggcgacaggacgtaggcagcgccccaggcgcaggcggagcctcattggccgctgagccccgggctgcgcggaggcgggacctgcggccagccctgggcggccatgtggacagagctgggagggccggaaccagaacccaagcgtgatcctgaaccggagcccgagcctgctgcaggtaactaacgctggtctcccctcggctccctcgggaagccgcagctcctggctccgcgtgggggctttcctctctgggccgcggcgtccgcatctgggggctggcctttccgccgttgcactgtaggactctccccacgtcccctaatcccatcccccgcctctgggtgacgctacaggagccccgaggacacagacgcccccagaccttaccacgttagctcgacctcaacactcctgcccactcggcccacttcaacagagggcccctgaccatagcccagaggcttggacaagcccaaaggttgcgccctttcccccgcagaaggggtgaggtgggcgccgctgcagttcccgcggatagagagggtccggtccttcccgctgtgggtgaactgtaaaaaaytgcctgtattcaggaggatatgcaaagctaggtttgtggaagtctggggtgaggctcctatactttcttgctgtgtgtcctcggtgagtccctgaacctctctgatgcccagccttcttccagaatgggggtcatcatcaaccctgaccacccagggactgcagagaggcttggcaaatttcccgtgagaagacagcctgcaaactgtaaagcatgatgctctgtgagctgtgatcttcctatcagcaagtggaggccccagcaagaaccccatataggccccaagagtaggaacggccttggtgtggctgcaaaggtttgccagccttggcctatgaccacctctcctgactgcttcacccctccaatccttaccccatgggttggtgactcccctttcccctacctccttttggtctcctcaccctcagagccaggcctgttggtggcaagggggctgtgtcccagcatatggcaaagtcctgagctaaatggaaccctgggcacccctggcagatctgctgactcagcttccccctgtgggatatgatgaggtttctcttcaaataatctgatcaatcttttattctttaattcttagtatcccccccyttttttttttcatttttctcctttttgcctttgttagatgcccaggcatgccacagtaccaagcgttatcagtacyagcycacattcctttgcttatttggaaagaagactaactttctagctcattacagacaccctttcccctttctctccactttcttttacgtgcccactctatctaaaataaatcaaatgtttagccaaccgggattagtttagattgtacgacctgaccccagccaatggggaaagggtacaggggcaggacttgcatcaggaataaaggctctcgtgcccctttgttcaggtgtgctctcatggcaactggccaaggaggcatccctctgcgcagaagtaaaattgctttgctaagaatcctgtgttcgagtgttcaatttccttaggattttgagcattattcctaacacccgcaaggggaagggaaactttcttggtcagcattgattattattattttttttagatacagtcttgytctgttacccaggctggagtgcagtgscacaatcatggctcactgcagcctcaacctcctgggctcaggtgattgcccccacctcagcctcccaagcagctagaactacaggcatgcaccactatgctcggcaaatttatttttgtttttttgtagagacacggttcttgctatgtgctcaggctggtctcaaactcctggcctcaagcagtccttccacttcggcctaccaaagcgttaccagcrtaagccaccacgcccatcacattgatttttatggggccggggacctacatggagccttgctttcctgattgagttttttgttcctctccctgcccaggggtggagggtgagaggctgggggtgaagggacaggcaggtgcaattccattttaccrctgggcggagcaagactcatgagacatcaaaggcagagagattcaaattctgactgaagaataactgcttcaactaatctgggaacactacactctgtttaattttcatttaatatgtattatatgccgtttaagttttataacagtagttgttttaacgaagtctacactcttcagagttgtagcttttcttctcagctgcctcctgacttgctgcacctctgggaaagctgaaaagggatgctgagacctgtggttgggggatgctgggctaggtcaatttctgaggcacggccagttctgatgtcctgagtggagcttgccagggtttttatatgcaagacatcattcaacataaccccatgaggcatttcacatatgggggaactgaggcacagaggtgaaatgaagcaagtccctctcagagaacaaccatctccaagtccctttgatttctactcaagtcttaggtcaattcttagacagcctttgtggcaatttcagtgttttctcagtgtatcattcagtactgtgtgttgagccgctgctctgtagcaggcatacctctaggctcggggacrtagcagtgaatggaacagaaaaataagttcctgtgctcatggagcttgcattttaytggggggagacagacaaacatataagcctgtaaagatagtatttgggatgtgagatagagaaggagtaaagcagggtagcggggatagagagtgttggggtgggaagggttgcaattttttaaagggtggtcagggaaggccttgctgagacagtggcttttgagacccagcagaggtgagggagtgagctgaggataggcgggacgtgatggagttggcccagagagttcatcagggccctcacagctcttacagtctgtgtttttagaggtgacagtcctttatgctggaatcttgaaatgtttgagctggtgggcccttgggtaccgccacctgccttctcccacctgttcaccctggtttcttttgtccctctccagagtgtcagcatgctgcgcttcctggcaccccggctgcttagcctccagggcaggaccgcccgctactcctcggcagcagccctcccaagccccattctgaacccagacatcccctacaaccagctgttcatcaacaatgaatggcaagatgcagtcagcaagaagaccttcccgacggtcaaccctaccacyggggaggtcatygggcacgtggctgaaggtgaccgggctgatgtggatcgggccgtgaaagcagcccgggaagycttccgcctggggtccccatggcgccggatggatgcctctgagcggggccggctgctgaacckcctggcagacctagtggagcgggatcgagtctacttggcctcactcgagaccttggacaatgggaagcctttccaagagtcttacgccttggacttggatgaggtcatcaaggtgtatcggtactttgctggctgggctgacaagtggcatggcaagaccatccccatggatggccagcatttctgcttcacccggcatgagcccgttggtgtctgtggccagatcatcccgtggaacttccccttggtcatgcagggttggaaacttgccccggcactcgccacaggcaacactgtggttatgaaggtggcagagcagaccyccctctctgccctgtatttggcctccctcatcaaggaggcaggctttccccctggggtggtgaacatcatcacggggtatggcccaacagcaggtgcggccatcgcccagcacrtggatgttgacaaagttgccttcaccggttccaccgaggtgggccacctgatccagaaagcagctggcgattccaacctcaagagagtcaccctggagctgggtggtaagagccccagcatcgtgctggccgatgctgacatggagcatgccgtggagcagtgccacgaagccctgttcttcaacatgggccagtgctgctgtgctggctcccggaccttcgtggaagaatccatctacaatgagtttctcgagagaaccgtggagaaagcaaagcagaggaaagtggggaacccctttgagctggacacccagcaggggcctcaggtggacaaggagcagtttgaacgagtcctaggctacatccagcttggccagaaggagggcgcaaaactcctctgtggcggagagcgtttcggggagcgtggtttcttcatcaagcctactgtctttggtggcgtgcaggatgacatgagaattgccaaagaggagatctttgggcctgtgcagcccctgttcaagttcaagaagattgaggaggtggttgagagggccaacaacaccaggtatggcctggctgcggctgtgttcacccgggatctggacaaggccatgtacttcacccaggcactccaggccgggaccgtgtgggyaaacacctacaacatcgtcacctgccacacgccatttggagggtttaaggaatctggaaacgggagggagctgggtgaggatgggcttaaggcctacacagaggtaaagacggtcaccatcaaggttcctcagaagaactcgtaagagcagctgtcagggaggcccagtcacagtccagcaattccacaaccaccttgacsaatgcttgccaagctgttttaaagccaagaacaccctttctttgttccaaattaactcttagaagaaaccccacaaataaagcaattcaatcaaggctgttctatttaaatcagagatggggaccaggctcagagttctacctatctaacccccaaccacagcccccttggtggcccatgagttgcttccatgaaatcttaggagtctctggaggacagattaaaaaccagtgatctgtaatttgtagctcttcctgctgatccaaggactttcccatgggtgcgcttgatggtttagtggatcgactcaactcagaacacaagcttggaaagtgttaggggttttgaactaggtggatactaaatctcggccccactcttcattggcttaacctaaaaaccagaggtgcttttccttgtctgtgtgccagttgctggctgttttagttgcttgcccttcattttgctactgattttccttaatttgtgggaaggagtaggcaaagaatatgcttacatgattacacctgtaaagtaagcccaaacatcccaaatgtccatcaactgatgagtggattaataaaatgtttccatggaatattccttggattactcagccataaaaaggaatgaagtactgacacatgctgtgacatcagtgaaccctgaaaacatccttctcagtgaaacaagccagagagatgtacaaggctacagactgtatgattccatttatatgaaatatacatactaggcaaatccatggagatggaacatagattagtggttgccaggggatagaggagtaattgttagtgggcatgggatttgtttttgggaggttttgaaaatgttctggagttgaacaatagtaatggttgcatgatttggtaaaaatactaaaaactatggaattgtttaattatggtatatgaattaatttctttctttttttcttttttttttttttttttgacacggagtctcactctgtcgcccaggctggagtgcagtggtgtgatctcgtctcactgcaacctccgcctcccagattcaagcgattctcctgtctcagcctcctgagtagctgggattataggtacatgccatcacacctggctaatttttgtatttttagtagagatgaggtttcaccattttggccaggctgatcttgaactcctgacctcaggtgatccacccgcctcagcctcccaaagtgctgggattacaggtgggagccacaacacccggccatgaattaactccgttaaaaaataaacgtatacattctgtgagcaaatccattttgtctccatattgtcctgctgctgaacattttatagagtgtgggggatggaagggacccaggtggtctagtcaacccccagtcaggtgcaaaagtcccctccccaatgtttctgtttttgttttctcttggatgggtgacaaagtgcaactgtaagacccgtagagaaaaactctggttcctgctcagaatgggcccatcttgttggactcgtttccacagccccccaccccttccaaaccatacccacccttcaagccaagcctagcatgggggccaccttgacatgctggggatttccagagtttcaaacctcagagttcataatgtttattgttagtcttgctacattcattccccaactgatgggagtgaaggcaaatccaagccagccaggccacaatacagaagcagaatgctgagcctccctctctcggtccatctttctagaccatgctgcttacaagccaccttacgttcaagtccccccattcctgtaaatgcacaccccactcatctctgcttcccaggctcaagcaatcctcccacctgagcctcccaagtagctgggactacaggcactcaccaccatgcctggctaattttttttttttttttggtattttttgtagagatgaggtttcaccatgtttcccaggcttgtctcaaactcctggtctcaagcaaccctcctgccacggcctcccaaagtgctggaattacaggcatgagccaccatgcctggccccagtcaactcttaaacatcctattgtcttacctaggcaacatgatgattttgtttattatcataacttgggtttggctggaaactgctgcttgagggttcagagtctgtttggttccctcacctcccttcctaggacctcctttctacaccatttgtctacagctaaggtgaccctgacactcccccatagtgcaccttctacggatttctctgggaggctgttggcacctctgttgcacagcagcgaaagtttctcataaacgcactgggacatggaaatgggcggctgggtgtctctaatgattaatgtgcaacatcacaatattttaacaactccattccttatttaagtttcaatactccttaaccaaagacgagctctgtagacagtgttccagtatggaatgggattggaaaagacaatcttcatggtcccttgttttgagccctgaaattctgagagtgaggagcctgtaggtcagattgttaataaactcagccatcacggctcctccacccatttttaaattcttttaaaaatttatttatttatttatttatttattcattcattcattcattgagatagggtctcattctgttgtccagggtgggtgcagtggcacgatcatggcgcactgcagcctccacctcttgggctcaagcaatcctcacacctcagcctcctgagtagctgggactacaggcatatgtcatgatgcctggctgatttgtgtattttttggagagacagggttttgcctcatagcccaggctggtcttgaagtcctgagttcaaatgatctgcccaccttggcctcccaaagtgctgggattacaggcgtgagccagcaagcccagtcccctccactcattttaccactgtgctgaatgcacagacttgtgagcagggaggtttaactgggtgtcctcattcaggccagacactgcccaccagactcacacttgggagatgttgcaattctggggcttccatccacttagcaaactctcaccaagatcttactccataaacactatgccaggcaccttgccatgctatggaagcctcacaaccatcctataaagcaggtagtggagtaatggagttaccaccccacttttttcaggtgagggaaaggaagtggagaggtttaatagggaactcttctggaatcagttccccatgagcatgcacgagggaccagagagcggcgcatactggcaagcacatggaaccaaccctccaagcctggagaacccacggcaaagcccagcaagccctacacacccaagccagccactgtgctggatgcatcagagctgctgctcagtcccaccggttctcctcagacccggggccatttaggaactttcatttgggttggctccattctgggtgtgaggctgacctctggtggccacctgattcattaattcacacaagtaactctttggtttaagaaaaaacaaaggggttgggtggggggcgatggtcctgctctaggcctattgttgggggaaagagaattgagtaagacagtcccttccctgcaggagctcacagttgggcaggggagacaattacagagccgggtggacagtgcagtgagaagcacagaggccgtgagatcatgagcggaaagcaagcctctgtatcaagcacacacggtgggccacctcccttcatgcttctttcttttttttaatttcgtgatggagtctcgctctgtctaccaggctggagtgcagtggcgcaatcttggctcactgcaacctctgcctcctgggtgcctcctgagtagctgggattacaagcagacaccaccacgtccggctaatttttgtagttttagtagagacagggtttcactttctaactgccatcagggccctcagtattattcttctgcacttgatagacatcaagcctgggaggtgttcagcagtgagtggagacaggctcaagctcaggtcctctgattctgccagacaccgctgcctcccagggctcccagctcagttcaggcacaggcccagtgggagtgggcatggggtcctgctaaatgactagcaggggaccagagggataagggaaggatgctcctggagtctgagaaatatggagggttggaggaagggcaagtttttccatgaggaggaaagaggcagggaggaaaagcatgggggcagggggcaggcaggggctggactgtgaaggggctcgtgcatcctttcagaaagctcacacttggtctagcaatgggagggtgctttttggttttgcttttgttttttaaacagggtctccctctgccacacaggctggagcacagttgcttgatcatagctcactacagcttcaaactcctgggctcaagcgatcctcccacctgagcctcccaagtaactgggactacaggtgtgtgccaccatgctgggttaatttttttaacattttgtagagatgggggacatctcgctgtgtagcccaggctggtcttgaactcctggcctcaagcaatcctcctgcctcagccacccaaagtgctgagattacaggtgtgagccaccatgtctggctgcccccgagggcttttaaaggaaagtgataggatcacattcggtttctgaagctggctctgcttcaatgtggaggatagattgagggagttgacctggagtcagcacctctcaggacattgttgcttgcgcccaaagtgatgctggcacaccagggtgtggggtgggggcagagtctggacagccagaaggcaggcttcagggcatgatgacagatggacaacttggcacaagagaggagagaaagttgggtaacctcatgtttctggctgcagtaaccacgtggggggtagtgccagccactgcaaccaccctggaggttgcacgtttagggacacggtgggactcttacttatgtattcctttgtttaacacattttatggaatgttgtctatgtgctaggaactattctaggggcagaggatacagcaggaaactaaaaaaaaaataaaatcctgaacatcctttctgatagaagaggcagaccatatgcaaaacaggtgaaatcgttagtctgtcaggaggtgaagggtattatagagaacaacagtgctgggaagggaatagggaagtgggtgggatggagtagacattgtaattttcagtaaggtgctcagaggtcgtctcaccaagagactggagcatgcctggaggctccaggaacacaggagaaggccaggtggctggcatggagcaagccaggtggggaaataggacagagaagtcacagcctgaggggggcagagggctggtgtttggaggtcaccgtgtggatggactgacgggggcctttactctgaggaaggagccaccagaggcttttgggcacagcggcaacatgatatgacttgttttaaaaggatcactggggccgctatgttgagaacagtttgtaaggggagcaaaatcatttgaccttaagaatgccaacaaggagtgaacagagaatgaggaggagcaggaggaagacccaggagagatgaggcaagaagccaaggaaggcggggtactttccgggggagggagcccccagcaaagcctgaggctcccaagaggtcaagtaggaggagcactgagcaatgtccctggctgcagccaccaggactccctgtagaccttggtaagagcaggtggtggagttgggcacagaagccagaaaacctgggttgagagtgtcacttaatcctcccaagcgccaatgatctgtacattagtcctggagttaggaagaccctcaagggaaagcaagaagtcctggtatgaggccctttgagagcctctggtgcatcccacctcacttagccagaaatgtggacagagcaacttggacaagttgctcccagccaagcgttcttcccatgtgtactggcataatgttagccgccacaacaaataaccccccaaatttgagggttcaatacgacgactatttagttttgcttatgtaacagtctaatgcaggtacctggcaaattggtattttccttccacatggagattcagggacaccggttcctttcgtcttgtggttccaccatgtacaacggttcttaacctttttttttttttttttttttgagacggagcctttgctctgttgcccaggctggagtacagtggtgcgatctcggttcactgcaacctctgcttcctgggttcaagcaattccccctgcctcagcctcccgagtagctgggattacaggtgcctaccaccatgcccgactaatttttgtatttttagtagagacacagtttcaccatgttggccaggctggtctcgaactcctgacctcaggtgatctgccggcctcggcctcccaaagtgctgggattacaggcatgagccaccgcacctggcctgttcttaaccatttttatgttttgcgttcctttgaaaagctaatcaaagcaatagaccttttcaccatgaaaaggatgtacacgcacatgcacacagtttgcacactttcaaggagttcacagaatctgtgaatctacctatagaatcccaaggggtccagggatccaagtgaaaacccctgtctggggcctcagagatctccgtgtcagctggtaaatggggaagaaagtgcagaaaaggcacagcgactttttgagagccctgggctctgcatggaacacatcgcctctactcacatttcactagctacatgacccagcctaggtgcaagaggagacgggaagtatagtctgtsacaggacagttcaacactgtggaagaccctcggttttgctggcagttcgccccagctctgccgcccatggcacgtccgtggagatatgccaacaggagactgcttctcacaaggatgttttttgagtttaatgctctcgtgggtcatttgctgcctcccatccagccgtgctcacactgttcctttttcttggagccctacttaagggccaccccctccaggacagttcctctgaacttctcatttaagcaatctcaccctttgagctaaccttttgcgctaacagctgtggcagcacatgctctcttagcctctgaagaggtctctgggcacccttcatttagtcttgtactgaggcagctctcgttggttgaaacgggtctaatgtttttgtcctgctagactatgtctcacatactctgagcatgtttgatttatc

SEQ ID NO: 93388 - DNA, 12778 bp, Homo sapiens
gtcctcacatggcagaaggcagaagggcaagggggcaaaaggggaccaactcccttagtcaagtctctgtggaagggcacctaatccattcagaaaaaaggagcccccatgcctaatcatctggagtgtcccacctctcaataccatcacattggcaactcctgaatattagagggaacgtgtgtgaaccctagaagatatgtaatcctcttgagggctgatacggtttggctgtgtccctccccaaatctcatcttgaattgtagctcccataatccccacgtgtcgtgagagggacccaatgggagataactgaaccatgggtgcagtttcccccatactgttcttgtggtgctgaataagtctcacgagatctgatggttttataaaggattatttccccttctgcttggctctcagtctctctcttgcctgctgccatgtaagacatgtctttcaccttccaccatgattgtgaagcctccccagccacatggaactgtgagtccattaaacttctttttctttataaattacccagtgttgagtatatctttattagcagcatgagaacagactaatacaaaggtgatacatttgatgtgcagactgaggctctgatcacctgcctgttctgagaaaccgtgggctttcaatacaatggccacaaacatcctccccagaggccttcttcccacagcccctgccacccttcaaccctccccctgagcttcccctactaattatgtccattttgtgcaccacccacctaggctcccattctcatagaacattttccccttcccctcaaatttataagagtgtcaagcggccctgcccctggaactcctgcattcttcatggaagaagcccatcagcattttgtgagcctctcctgaagggagataatgcccagcttcatcaccagatgaccttccttttcaatggtagcttcctcctcttgtatggccacagagaacattcatgaccacatcccatcaaatgccaaagttgtctgaagcccctgggctccagggacctgtaaccccacccatcacaggacacggttttgtgggccctaacatgaacagaagcatgatatcagcatgatattagtctctaggcccagccaggagcattcattcacagagaaggcaaggaccccagtttcttttttaacttttcttcattccataatttttttatatagaatgctttttaaggatccagaaagttctgatcctatccccacatatccctggccacgaagaaaataaaccgatatcctttgccacaaggcacatttcctatacattatctttagaccaaaactgatcactgataaaatacaggtctgtcatggggttaagtagcccttagattattctgtgaaaaacagaatactggatgagaggatttcgctgacccttcccaatctaagatcaattattctgatcccaaatactttcattttccttttgtcttcagtttggcaatgagacacagccaccttggcaaggaggtgaaagagaaggacaggtggacatgtaaagaagaggccacgagttcgggtctctttcggaaggtttgtgtgcttgttggttctgtatcgtgctgttcatctctccccgctcaaatctttagagttgactggagattctgaagatatatctggtattcaaatttcctctcacttctctgatcatttctagagaccccttggtgatagaagaaagcaagccatgtcaacagcagggttggggaatattttcctgctgttccagctgtgcttatcagaggcctcttccctgccctagacagctcgaaatggagctgaattgggatttgtaaaagtaaacaatgcaaagcccaagttgttgttttttctatcacccaatggatgagaggctgtgagtaagaactgtagagaactcaacaagactgcttttcctaaggctgacggagaagccagttgtggcggctggttccggcagggagggagtgaagctcctcagctgaggccgactacactgcagctccgtcaacgaccctggaagagggttgcctctgttgactaccaaagtctcctcctctgtcatccttgggaatgttttcaaaacatctacaaatactgttttattttctagaagcaaacacatgttttaaatagcctgggttttcttcataccctgtggtcagagacccatgaaactctaggctgctttccccagatacacactccggctaactcgagaatccacctacaggttgaggtaaattctgtcagtctagttggctcatcctaaatcatgcctttaacttttaagtaaacagaccctttatttataaaggcttcatttaaaagccaacaacattcattatagaatagagcagtcatagctgtcttagatacagattgccattcgtacggtcaccaacgtcatcacatccttgggaaggccactccataaaaaggaccggttcactgggttgaagtcatactacctcctgggagcaagctgggtgagcacattcctgggtgccatcttaacaactgcaaagctatatagagattataaagtccctctcaccctctcctgcttctagcctctccctggcagaaatacccacagaaatcctgaaccaagaaaacgctttcattaggaccccgaccttctgtttaaaatggcaaagttatactctgctatttttctagtaaattacaaaacaggtaaagttggaaacagacacatacagactatgactgacaaccaatctgtcggtaaattgggtggcatttagaaatgtcttcctacttagaaggttcctacttctacttagaaggttaaattcgtgaaaaaagaacagagctggctggtcacagtggctaatgcctgtaatcccagcactttgggaggctgaggcaggcggatcacctgaggtcaggagttcaagaccagcctggccaacatggtgaaaccctgtctttaccaaaaaaaattacaaaaaattagctgggcatggtggtgggcgcctgtaatcccagctactcgggaggctgaggcagggagaattgcttgaacccgggagtggtggctatagtgagccaagatcatgccactgcactccagcctgggcgacaaagcaacactgcatctcaaaaaaaaaaaaaaaaaaaaaaaaaagagctgttgcattgtttttgactatatgaaataaagttgctttgccttctttaacaaaagtaggaagaggcttcctccctaaccctttacagccttacctaatcaaggttgggatccatccaaacacagcactgggcaccggacagccgcctgtctactgtgtagctgatgcccttgaagtggccacaatggtagcaacccataaccctgttcgtcttgctaccttcatttgaggactgaagcatccagtaaacaagggtccagggtaaatgggtggctgcagaatgtgacatggcaatagattccctagcagtaacattccatgggaggcgcaaaactacagaaaactcaggtagcaatttatgatgaagactgtagtttttcattcatctaatcagagcaacagaaatacatgtctgagagaacatctcacagcagcatcaaagaacctacaaactaggaagtgagctggggctacctgacaatgtgacttttcagctatcaaaacaatcaaggaaaatctaatactctgtatgctggcaaatgctgagcctaagaatgtttctggggctggggggttgcaggaagacaggcacatgcacgtgcacacacacacacacacacacacacacacacgcacatttaggcctatgtaaatattcactcatctatacgtattttgagggttcagttcacagtggttccgaatcacttcagcttgctttgggtgcagttcatgtctccaatccttgtagcgccacatatccttaagtttaactgaatttaaacagtagactcaaaatatagaatgatagcacaatgattctttgacttctaaagtcaaaaaaccagaatttgagttatttcatgttatgaactgaacgtatccccccaaaatttggagccctaatccccaaagcgatggtatcaggagggggcctttgggaagtgattaggtcatgagggtggaggtctcatggataagattagcacctttataacaacagacatgacagagatgatctctctctctccaccatgtgatcttggacttcccagcctccagaacggtaagaaataaattcctgttgcttaagccacccagtctatgatgtttctgtttatagcagcctgagctaagccacttcgattttattgttctatcttaccactttgtgtttaaaatttaaaaagtgaacacaatatatttctttaagctgcagctatgttttttaaaagaaaaacatacttaagaagtgtattcaatattttccttaagttgaatattatcttttaaattgaaatgtatatactttaaattgtcttaaaactaaagaataaaccagcccccggcccagctgacgggagcgcagagtcccggctccgcagggtcrcgccgagccaaacgagccccagcagcgcccaggtgtgagcccgcgtcctcgctgtggccgctactgcgggccgcggcgtttttattcaggcaatgcttaagggaagccggcagcgcccggtgcattgtgggagccgttcacggcccattttccgggaggaggcggagggcgcaaagcaagcgggtgaatccctaaagaacccagccaacgccttccttacaccttatacaaaaatcaattcaagatggattaaagacttaaacgttagacctaaaaccataaaaaccctagaagaaaacctaggcattaccattcaggacataggcatgggcaaggacttcatgtctaaaacaccaaaagcaatggcaacaaaagacaaaattgacaaatgggatctaattaaactaaagagcttctgcacagcaaaagaaactaccatcagagtgaacaggcaacctacaaaatgggagaaaatttttgcaacctactcatctgacaaagattctgtatccagaatctacaatgaactcaaacaaatttacaagaaaaaaacaaacaaccccatcaaaaagtgggcgaaggacatgaacagacacttctcaaaagaagacatttatgcagccaaaaaacacatgaaaaaatgctcaccatcactggccatcagagaaatgcaaatcaaaaccacaatgagataccatctcacaccagttagaatggcaatcattaaaaagtcaggaaacaacaggtgctggagaggatgtggagaaataggaacacttttacaccgttggtgggactgtaaactagttcaaccattgtggaagtcagtgtggtgattcctcagggatctagaagtagaaataccatttgacccagccatcccattactgggtatatacccaaaggactataaatcatgctgctataaagatacatgcacacgtatgtttattgcggcattattcacaatagcaaagacttggaaccaacccaaatgtccaacagtgatagactggattaagaaaatgtggcacttatacactgtggaatactatgcagccataaaaaatgatgagttcatgtcctttgtagggacatggatgaaattggaaatcatcattctcagtaaactatctcaagaacaaaaaaccaaacaccgcgtattctcactcataggtgggaattgaacaatgagatcacatggacacaggaaggggaacatcacactctggggactgttgtggggtggggkgaggggggagggatagcattgggagatatacctaatgctagatgaggagttagtgggtgcagcacaccagcacggcacatgtatacgtatgtaactaacccgcacaatgtgcgcatgtaccctaaaacttaaagtataataaaaaaaataaattaaaaaaaaaaaaaaaaaaagaacccagccaacccgcagagggtggggagggggcaagctgtgaggagagcggacccaagaaccatgtctacgcgtgagtcctttaaccccgaaagttacgaattggacaagagcttccggctaaccagattcactgaactgaagggcacaggctgcaaagtgccccaagatgtcctgcaaaaattgctgtaatctttataggagaaccacttccaagaagatgagcagtttctsggagccgttacgccaaggcttggcattggaatggatactcgtgtcattcctttgaggcacggtgggctttccttggttcaaactacagattacgtttaccggatcgtagacgacccttccatgatgggcaggatagcacgtgccagtgtcttcagtgacctctacgcaatgtgggtcacggaatgtgacaatatgctgatgctccttggagtcagtcmtaaaatgaccgacagggaaagggataaaatgatgtctctgattatccagggttttaaagacgcagctgaggaagcaggaacatctgtaatgggtggccaaaccatactaaacccctggattgccctgggaggagtcgctaccactgtctgccagcccaatgaatttatcayggccagccccaagttggaccagcaacaggggatggtgttccctcctgggatctgtgaggcagcagctgaaggacagataaatttgaagttggagaagacctacacatgcaccacatccctaacctgcagaggcctggagatacagtattagagtccagcccctctgacaacccagaggtatctactgagcattttattcagcaacaacgttcatgctccttaatgacagcacggccggccagactcatcttacaataaaattttgagtacaactatactaccaagggagacactcctttattctaaaattatttcagccatttggttgccctcttcagcaatcagtttaagaaattggggccaggcgcggtggctcatgcctgtaatcccagcactttgggaggccgatgcggcggatcacgaggtcaggagatcaagaccatcctggctaacacagtgaaaccccatctctactaagaatacaaaaaaaattagccgggcgtggtggcgggcgcctgtagtcccagctattccagaggctgaggcaggagaatggcgtgaacccgggaggcggagcttgccgtgagccaagatcgtgcctctgcactccagcctgggcgacagagctaggctccgtctcaaaaaaaaaaaaaaaaaaaaagaaaaagaaaaagaaaaaagaaaaagaaattggagtcaactacatattgatatccagattctaaatattaagtatcaatttctcatttaatcttagacgtcgtggtggaaggaaaaatcagttagcaaataagcaatcccagaaaaagtgtagctatttgatgcctttataccttaagacaatgttgaacacagtgagaaggataggttccttttatttaatgttttttacgaaaaattagtttttcactgcgttccagacctaaatcaatatgtactactttggacattagccttggaagaaggaacagctttttctcttctggcaccacagtgtatctgcatttgattttttcccattgtgcaggagcacctcatgggccacaaagatgcgccttgagagcaccctgggatgaagcttattttaaaaggaacaacaaccaacaccaccaccagccccacaggggctgtccagtgtacattattctcatctccttgtgttatgagtgttggtttttagaacacagtttggaaagtgctaatttagaatattaatgtctttatctttaattttacttttcattctgtaaacatagctagcttataaacaattttgtttcaaatgcactagactttttagctaattcaattgtaagtaactttaattaaaaatggcaagtttatactcattaaaaaaagaataaatgaagatggtaattgattgcatgatcactaacaataatcttgccatgtaaagaaggaggtattaaaaaggattcacttcaaggagtcaatccacaaggtgcatctctgcacttgctgtacccaccacttcctggaacgttcttacccagatacccccatagcatggcttacacttcttcaggcctctgcccaaacaccagcttatccaaggagtcttccttgactaccacccacctccatccgtgtctattgtcctagctggattcatttttcttcatctcaccagtttcctgtcaagctgttaattggttgactcatcacttactgtgtttcttcttcactaagagctccctgttccctgggaacaaaaaaacttcattttctgttgttcacatggtgaatttttgaatccagaacactacctggcctgcccccaagcagactctggggggaaaaatgactaggtgatttctgtatcaattactgaatgctttacactgatttggaatgccacctttattaggaaaagtcacgcctcaatatacttaaggatgaaagctcacatttgcagtctacggagtgcccatattgatgatgggggttgggggagaaaagggaagaatctcagcaaatggaaggccattttcatcagctgggggtgcagctggagccatggcattcactccaccagctctgctcgaggtaagaagcgtcacagacctgcctttgcctttttcttcctatctttaaagaaaatccagagcaccatctagtaagcatgtgcagatttctgaggaacctcagggttccagctataaaaagcattaaataccaaaaggaagtgtgctaagcagctggacacaagacaggacaggaaacaatgaggaacttctagggcaagaagagcaaatcccctcttagctggccacaccctcattccagcctcgcaccatggtggcaattaatagggacattcacctcgctttgctctcagccgtgatgcatctgtattagtcacagctctaaatagaaacactaatctcaaagcatataaggcaaaaatgaacctgtatctaggttttctcctctttgtcattgatctatttggccaccaaggttcatgctgtttaaatgatttcagatttattttaaatacactttaaagctaacagcacaagcttttgcccatttattttatttattgttccttttctctgggctagtttcacttgttcatccaaaatatattcttcaaaataaatagtagaaataccactacaagttccaaaagaaaaaaaaaaaaaacctcacactattttgatggaaattgtgttaaatgtatctgttcatttggggagaactgactgctttgcaatgtgaggtcttccttccacaagatgtgggggtccctgcattaccactctccatgaacagcattccctgctgagtccagaactgtgccacgagctgaggctgttagtgggaaaagagagccgtgaaaaaggagaaagtgccaacccttcgtgtctggacccactaccatccctatgcctgccccctgacaagcccaagcagtctcctgacttcccacacccctcacctctgcatgatccctgaacttccttgtgattgtcattgccagcgcaagtcaatgtcttccttcctcatgaccttaggaatctgccccacaggacccttgacctgtcttgatacaaccccccttctctgttcagagccactggtttctcttgcccctcctacacctttcttttccagctgtcttcctttgactctcctcttcacctacactggggcattcacgcagattaactcttacaacttcaaagccaaaattttgagaggtcacttagcttggggaggtgttttccatagactccatgaaagtgaccttgaacatgggactcagactcagcagggaaatagcctcaaacaggcacagaaagcctaaagcccatggcatctcaaggtcaggcccttctccttctgaccttccctccctagctctctgccctcctcgttcccttcagaagggtccttctctctccctctcacctgaaggctgcctgagaggtgccctgtgaaagtgcttgcttcagcgcttcagtctttcagggtgaagcgctgagaaagtgtctttatcagaacttgacctggctacgtccagctctgggcaacttcttcaccaaccaagtgatgtctctttctccctcaatattctcaaaatcaccaatacagtaacactcacacagagagccccattcagaagctgtaggcacaggccagatggtcacctgggtttgcagtgaacttgtgatgtaatcagcagcatggcactgtccatgagggccacatcaaacagaagaagcatagccgtggctgatgctccactgtccagcccgggaggactggtcttcttcccggaggagggcagttcctaaattcattcatgttatcacttgtcttgtttcctcacatgtgtgaaatgagatgtttttgcaaacctgccgagtcttaatcctaaccccacatattcctttacagcaaaaagatcaccgggcagtccttcccttagatgcttcctatctttggagtgtccttcagttcatcacgcatgtgtggatgagctaatggatggaagtcccattcctgagcacccagggaaaagcatgtcttcctctctgtttccagaacttcatgggagattggtgaacattaagtaacgttaactatgaccttcttccagaacaagttttagaaggggaaggtatctactgaacatttaactatgcaccacgtactccacattaaaattttctctggcttttcagctttacaaaaacctgtaatctccttctcatcttctaagactcagctcagacatctgtcatccagggaatcatctttgtctcccttcagtaacctcatcgcattagcactgctattctcaactccagggtgcttctggaccaaaccaatgtacatcttacatatattgattgatgtctcatgttcccctaaaatgtataaaaccaaactgtactgaccaccatgagcacgtgtctccaggacctcctaaggctgcctcatgggcgcattcttaaccttggcaaaacagactttctaaattgactgagttctgtctcaaatactcttggtttacaagggtcatttcttctcaacacgaccttcagccactgtgtgacagtcatgttatacatgtgaacaaaatttggaggatagaaaaaaatgcgagaagaatatcagtgaattctttcctcgtttggaagtcctcattaggacttagggttagggcactcatctatggttaacaaaattcatatcgcttcacttcaccctcataccagctctgcgtggtcatctgggtagataagattatccccattttacaaatgtagaaactgagactaatgtagatcacggagcctaagatcacctaactgggcaagaaaaccatttgctgctcagaactctcccctctacctcccaaatacctcaactcctgcctttgagtagcaacactcagcttcgtgtcaccataagtgagaaaattttcatgacccaaagtaggaaactcatatcctgttattcctattggatttttttccttcctagcattaatcataatttgtaatcatttttaactctttttgtctgtctccccagcagagtcagcagctccatcagtgcgggtgccatctctatcatgctggccattgaatttctggcccctagcactggctccagaatatgaaggatactccaataaatatccatggccttctgattctgaattccctatcctttccactttaataagcatgttgggaaacgatttctccaaactgtcctactatgtaatcctaaaactgaatcttatcattaccattcaatctttaacctgaaatgtgcactttttgagcagatggaatcacatcaataataacagggtttatgccaccagagtccaagcatttcatgtaaatgggcaatgcctgatgaaatcatgataatactgactagcatttgggatgtgtctggctgctctagttattaaatatatcaactaatatataaaaccctcatgacaactctgtgaggtagggatgactgtattatctccattttataaatggagaaattgagggcaggaggtgcagcactggccccatccttgggataaccactccaacaatgatccttcaaggtcacggcatcttcctctggtgccatcgatgtgcctgctgtctcctgctgaaaacctatttcttttcttttgttttctttgagatggagtttcactcttgttgcccaggctggagtgcaatggagcaatcttggctcattgcaacctctgcctcccaggttcaagtgtttctcctgcctcagcctcccaagtagctgggattacagctactagcaccacaaccaccaccacgcccagctagtttctgtatttttttagtaaggacggggttttaccatgttggccaggctggtctcaaactcctgacctcagatgatcctcccgcctaggcctcccacagtggctgsgattacatgcgtgagccaccgcacctggccctgaaaacttatttatttgtcccagtgtatgtcttgccttggagggcttgaggaagccacaccccaatggggttctgagagtccagtgattcctgccccctaactgccaccctctactgccactgcctcctgctgcggccatggcctcgagcctacaccgtt

SEQ ID NO: 93389 - DNA, 28479 bp, Homo sapiens
ggaaatgtgataccctaacttcttttaacctgattgactctctcttagctgagagagctggacagactccattttggtttcttcacttgcagccccttgtccccctcccttaaggacataactggtgcaagctgactccaagcacatccaagaatgcgcttactgataagatactgaggcaagctgtaccagcagctcctgggaacgcactcggttgacggtgcccaaagcctttgcgtttatcactttgtgataatttaagcccctgcacctggaactgtttattttcttattactgtttctgtaaccatttatctttcaacttttttgcctgttctgcttctgtaaaaaattgcttcagctacactcctcctcccctctttagaccaaggtgtaaaaagatgtgtagccccttcttcggggctgagagaattttgagctctagccgtctctcggttgctggcaataaaggatcactgaattagtctcagactgtggcattctctctataactcagtcggttacaataaaatagcaaaacaagttgccatttcttccatttaactccatgccctcctcctactgtaacccgttttctcttccattgaacaaaagacgttgataaaaataggagctaaagaaaatgcggataggaaatggatattatcagatcaaagggaaatgttgtcaaaacctctcatgagggaagtcttgtctcaattacatcaagggacccattggggaccccaagcaatgtgcaatgcagttctccgggtttatgggtgtataagaatttacaccctggccaaacaagttatagatagttgcttaacatgtaaaaaaagctaataagcaggatctaaggaaattgcgccttggtggaagaaatccagcactgagaccatttcaaagtgttcagatcaattacactgaaatgcctccaattggtagttatacttattagtaataatagaccattttacccactgggtagaggcaatcccattctcacgtgcaacctccagtaatgtagttaaagcgctaattgaaaacatcatacccagatttgaactaatagaaaatactgattcagatactgcaacccatttcactgtgcatgtcattaagaagttagcacaggtactagatatacaytgggaataccatactccttggcatccatcctccacaggaagagtagagtggatgaatcagactctaataaaccacttaacttagttttagaaactcgattgccatggactaaatatactcctattgcttggttaagaatccggactgccccttggaaagatattggcctgtcacctgaggaaacgctctatggaatgccctacttacactccattgctgacatccctatgtttgaaacaaaggatcatttcctcaaaaattatatacttggtctaggctctaccttcttttcccttgggactaaaggtctcctagcacaggcatcacccctggagtttccagaacatcagcattggccttgagaccatgttctcatccaagggtagaagaaaaggaagctcgaaccagcctgggaaggaccctacctagtgctcctatgtactgagactgcagtctggacaacagaaagaggatggactcatcacacccgagtcaagaaggtgccgccacctccagaatcatgaactgtcactccacagcccacccccaccaaattaactctaaaaagagcttaataatcacttatttattctcttttttcttttcaacagaaggtcatcttgtcatcagtgtaactcaggctagtcattttttaacccttcagtttgatgcctgttcagtcatcccgtatggagatgagcaaggtcaaaagaagctagcccatgttgataagtgtctatgtctataccacaaaaaatcaagcatgtataagtatggagtgttaaaagtcccagtggtgactgggcagatgtttggtggactaataagtacaaagggtggagagccaagctccctgcttcaaataaattatgacgaccaaaacaaaaaactccaactagtccctggtcccaccccaccaaattgtaagccatgacactgtaaccccttgttgctgattataaataatccccggaccatggcccaagagccctctatattcaaacagtatgggctaggaggagatgttgaaggacagatccatttcttagagaaatgaatgtgacaatgaaaaatgacactactcttcgttcatttttctttgacaaaataatttttctgtcaattttgtatgtatttaattttaaccaagtaaagcttcttatggacatatattcatcagatttaaaaaatgagtttcttaaaggtgcaaaaccaggaatagcttggtaaattcatgaagctagaaagtagctaatcaaagttcttattaaaccttctggggttgattaagagtagccaaaattatgccaggtgcagtggctcacgcctgtaatcccagcactttgggaggccaaggcaggcagatcccaaggtcaggagattgagaccatcctggccaccatggtgtaacctcgtctctaacaaaaacacaataattagctgggtgtggtggtgtgcacctgtagtcctagctacttgggaggctgaggcaggagaattgcttgaacccgggaggcagaggttgtagtgagctgagattgggcaactgcactccagcctgggtgacagagcgagactccacctaagaaaaaaaaaaaactattagcgaaaattccttgtaacaaatcccctcaagaggtgaaatctatttccctactccttggccccgtcctggccttgagacttgctttgatcaatagaaggtgacagaagtgacactgcacacattccaagggtaggcctcctacaatgctgctacctatgaacaagcccaagttagcctcatggaaaacggaaaacacataaagagggtccctgtcttccctgacaacccagtccacccagtgaggcccacagaggtgaggaaacccagctgataccacgtggttctgagatcggcttatcagctgattcctgcccaaattgccaacccacaaaatcacgagcaaataaatggttgctgtaataaccagttgggttgttacacgaaaacagctaatagatataccttcttaatctcaattatctaaaaaagatatccctcctcactgattcatagctaagtggttctagaaggaatatttttatgaataatacacatttctttattctgtgcatcacatgaaaatggtcagaatcaaaatggagtcactaatgttaaaaaacaaacaaaagactctgacaaatacagctgggaagaccatgaaaagagggttctaatggttgtacacctgaaaaccaaaagtaccacgaaagacggcgaacaccacaaccttgagcaaaggccattccaactgaacagaaaacatactctgcaaggacctctgaacaactgcctgtccaacctcagactaacaccactttcgtgattgatctttggagccaaggctaattaattcaaagaaattagataatcctcattttttccttaaaaaatttttgttttcctttattttcccaaatatacacatagtttactgtggcatgcatactcccattgcagtggtctattcccagagaaatatttttcttttagggacctctctctgttatttaggtttatagtcacaaaggatttactatttcaacaatactagcactgcatatcatccagtatacactgggaaaataaggtgccccatgtgcagatccaggagactttgtgaccaccagattatgaggcatgcatgtatttatttatttatttttgagatggagtctctatctgtcacccaggctggattccagtggcataatcttggctcactgcaatctccacctcctaggttcaagtgattctcaggcctcccaagcagctgggactacagatacgagccacctatgtggctaattttaggatttttagcagacacagggtttcaccatgttggccaggctagtttcaaacacttgagctcaagtgatccacctgccttggcctcccaaaatgctgggattacaggtgtgagacaccatgcccggaccatgcatgtattattaatgttgaagtagataatttaacaaacatcaatgaagtgttaacatttttcactcataggtgcaaaatatcatgccaattgccttctatgagctgtcgtaagccacagcctagagattcaattccatttcaagattcaaccaaagccaactcatcaacaagaacatgtaaaagacagaaaaacccactaccggcaggctgaaacagatgctgtgacgtggccctggcctgtcatggcatgtcacagcatggcacaggcctatatcatgttccctagactgctgactaccaactagttacagctgactccaatcaggtcgggatttgaccatctctgcactgaacctgcaattgtaacttttaaaattgaaacgctgcttctcacctctcctccctagactccatttcacagggaaaccatcacagggaaagaaagcctttgttttttcttccttctttgctttgctttctctctttcttttacacagggtctcactgtgtcgcccaggctggagtgcagtggcacaatctcggctcactgcaacttccacctcctaggttcaagcaattctcctgtctcagcctcccaagtagctgggattacagacatgtgccactgtgtctggagttgattccttccagtggttttgtggtctggctgacttcaagactggagcagcggaccttcacagtgagtgttacagttcttaaagatggcacagacccaaagagtgagcagcaggaagatttattttgaacagcggaagaacaatgcttccacatcctgtaagggtacctaagcgggttgcctaagcgttgctgctgggggctggggtgaccagctttaattcccttatttgtccctacccacttcctgttgattggtccattttacagagtgctgattggtccattttacagagtgctgattggtctattttacagagtgctgattggtccattttacagagcgctgattggtccattatacggagcactgattggtccattttacagagtgctgattagtccattttacaaacctctagctagccacagagcactgattggtgcattttacaatcctagctacagagtgctgattggtgcatcttacaatcctcttgtaagatagaaaatttctccgagtccccacccaacccagaagtccagctggctacacctctcaccaccacacctacctaatttctgtatttttagtagagagggagtatcaccatgttggccaggcttctttcttaatcttttcttttctttctttccttccttcctttcttccttccttcctttctctttctttctttctttctttctttctttctttctttctttctttctttctttctttccttctttcttccttccttctttccttccttccttgctcccttccttcctttactctctttctgtctttttctgtctgttttctctattccttactcttccctcattccttccctccctcccccaactcttctttccttcctttctctctccctccctactttccaactttgggctgtgttgaatttgttgactcatcgtgaacaaacagaaactccaatgatactgttacccaagagaactttgcaaaaggttgtcatgtttaataattcattcacagaatcctcaatctcacaaaagcctggaatggattttctgtttggacagggcagggaagctactgtggccaggctccagctcttcccactgcagctagcacaagccttctaaagcaggatgtggccaggcacagctcatgcctgtaatcccagcactttggcaggccgaggtgggtggatcacctgaggtcaggagtttgaaaccagtctgtctctactaaaaatacaaaagttagatgggagtgatggtgggtgcctgtaatcgcagctattcaggatgctgaggcaggagaattgcttgaacctgggagacagaggttgcagtgagccaagatcacaccactgcactccagcctgggcatcagagcaagactccgtctcaaaaacaaacaaacaaaaagcagtgagaggtgaagccacctggacttcctgggttgagtggagacttggagaacttttctctttagctagcagattgtaaagtcaccaatcagtgctctgtgtctggctaaaggattgttaatgcaccaatcagcactctgtaaaaatgtaccaatctttcatcccatctcatcccatctttcagtcacttcacaaatggttcctagtagatacaaaacagttttttctccaatgggaaaacagaaaacagccactcagtttgctcccaacacccgtttctagccgcttaccacagctaccttggcaagtactctaggagtatgggaaaatgaaaacgacaaactcacacacctttttaacatacacaaccagttctgactacctagccaaggcagattcttcttctgtggaatgtcaacctatatctgcctcccgaccaactggacaggcacctgcaaccttagtcttcctatgtcccaacattaacattgccccaggaaatcagaccctatcagtgcccctcaaaactcaagtccgtcagcacagagccatacagctaatacccctgcttatagggttaggaatggctactgctatgggaaccggaatagccagtttatctacttcattatcctactatcacacactctcaaaggatttctcagacagtttgcaagaaataacaaaatctatccttactctacagttctaaatagactctttgacagcagtgactctccaaaaccactgaggcctaggcctcctcactgctgagaaaggagggctctgcatctttttaggggaagagtattgtttttacactaaccagtcagggataatacgagatgctgcccggcgtttacaggaaaaggcttctgaaatcaggcaatgcctttctaattcttacaccaacctctggagttgggcgacatggcttctcccctttctaggtcccatgaaagccatcttgctattactcacctttgggccctgtatttttaacctccttgtcaaatttgtttcctctaggatcgaggccatcaagctacagatggtcttacaaatggaaccccaagtgaactcaactaacaacttccaccaaggacccctggaccaacccgttggccctttgactggcctaaagagttcccttctgaaggacactacaagtgcagggccccttcttcgcccctatccagcagtaagtggctagagaggtcatcacccaattcccaacagcagttgtggtgtcctgtttagatgggggattgagaggtgaagccagctggacttcctgggtcaagtggggacttggagaacttttctgtctagctagaggattgtaaatgcaccaatcagtgctctgtgtctagctaaaggattgtaaatgcaccaatcagcactctgtaaaaacgcagcaatcagcactctgtaactagctaaagggttgtaaatgcaccaatcagcactctgtaaaatggaacaatctgcaggatgtgggcaaataatggaataaaagctggccaccccagtcagcagcagcagggaaccgctcagatacccttccacaccgtggaaactttgttcttaccctcttgacgaaaaatcttgctgctgctcactctttgggtccacaccacctttaagagctacaacgatcaccacgacagtctgcggcttcattcttgaagtcagcgacaccacaaacccaccagaagggagaaactccagacacatctgaaggaacaaactccagacacaacatctttaacagctgtaacacacactgtgaaggtccacggcttcattcttgaagccagcgagaccacgaaccctctggaaggaaccaactctggacacagcaggacgtgagacttctacctgctcactcagaatcatttccgcaccaaccatggccacgtttgtggagctcagtacaaaagccaagatgcccattgtgggcctgggcacttggagggtaaatatgcaaatctttgcacamctttcttctctggagggctgtttgggtgttttctctttctacattcagccagaaaagcctggaggtcgggtaggggtttggagaggtgaatttcagtcctggagctgggactcgggttgctttcttttctcaaagctgattcaagctgcaatgctgcaagactggctttcccagcagtgatgagaactcctctagcaagtatcaaatttcaagcagagttggacttaaaattgttttccagggcagtttctctctctggctctaggacacttaattgggcacaaggtttccccagagtcttggctgtgggtttgttgtgggctgggtggttgtggagaggatgcagagccagaagtccctggcaccactttgcagatcaccrtgtgggacttgggctagcagcatccctatgacctgggagcttgttagacatgcagaactggctgggtgtggtggctcatgcctgtaatcccagcactttgggagatccagacgagaggactgcttaagcccaggagttggagaccagactgggcaacatagcaagacccartttctacaaataatcaataaattagctgtgcatggtggcatgcagctgtagtcccagccacttgggaggctgaggtggagattgagtgttgagcctgagaggtcaaggctgcagtgagcagtgattgtgccactgcactccagtctgggcaacagagtgagatccygtgtaagagaaagaaagaaagagaaaaaatgcagagtctcaggcttcacccaggctacctaacgggcatctgcactttaacaagttccctaggtggttcctgtacacattgaaatctgcaacatgctgggactgcagagagcctgggctgggagtcgtgagctccacccggctgtttttatgacagctggcaaaacacgctaaggcacattgaggactcagtgaggcaggttcctgggcctctgttaggctaagtttgaagttgttccatcactgcctccctctgccttctttgccatttccatccatgatagcactaccctaactagtgatgagaagcagtctttggagttcctcttctctcctgtccctcatggctaatttccctgctcagacttctgcctctggctctctttccttctgtgcacactgacttttttccctctcctgtgccgagctggagggtaggaccctctgctgcagcactgggtcattctcaggataaagtcttggtctatctgggcgaacagatcacttccagctcgattcatacatactgactcttgcttgaatagcaagatttgccccaaatcagagctttaatcctatataaatggaacaaataatcacttccagatctccagggaatctgctcacccttcataagtttactagacagtttcagaattttggaattgaatgtaagaattatgaagggagctgccttcaacacgtggggatgatagattaaaggattatgaacttagcagtggaggtgaagaagggtgtagtatagcggttggggtcacagggctgcttctagatgccaggtggcagcccgtttcttgcccaggtggtagggtagttgtgcatctctgttttgtgtacttttcaatgtttgttacctcacaatagaagaggtttaaaagactattttgtgagagatcaagttttaagtgctttttgcccccatcattggcttggctaggttagaacaaagtgtgataattgtatttcctttttttcttttctttccttcccttctttctctccctctctctcgttctccctacctcgctctttctttttataggaatggaaaacaaactctattcctataagcttctctatttctcctttttttccaaaatgatcattgtataatggacggcctgtactgagcctgtgtgtcaggtaatgtggttaacttaacattcattacagcatgtcatcaccacmaaggcctyttgtggctggtgctatttttttttccattttgccgacaaggtttagagagattgaatcacctgcttagacccacacacccagtaagtgttggaatctggattgatgctgtaatgaccattatccagatccttatcaccgtttggggaaattgtctgaaaatccctctgggttatttagagtcaagctttcatctgggtcttcagaaagttgtagtggagccatctgcaccaccacacacctgaagacatttcaggactaacctggatgaaaagggaactgacttttagctaggataggacaaaagggcataatcataaaattaattcactttccttcctttcttttgaaaacttttctaaactgtgtatcctcccagatattccctggcaaagaagaccccagcgaagccttggtttggagaaactggaccgtgtggggcaggtgaaggtggtctggggataagagaatatggtggttgctgagtgtggtgtaattccagctactcaggagttgggaggattgtttgaacctgggagtgtgaggccagcctgggcaacatggcaaggtctcatctcttaaaaaaaaaatacatgtgtgatgggcttttctttkgcttttcagtctcttctcggcaaagtgaaagaagcggtgaaggtggccattgatgcagaatatcgccacattgactgtgcctatttctatgagaatcaacatgaggtgggagaagccatccaagagaagatccaagagaaggctgtgatgcgggaggacctgttcatcgtcagcaaggtgcacatggcgcatttggtgggaggccttcacttcaaggcaggcagaagtatctggatcgggtgggcagcaagaactctgtcggccttttctacgtgtacccgttttcatctctgccttgataacatccgtggatacaatactatccatactccaagccgttattgatatttgaacatgtcgtggctgccccacctgcctgcgggttggatttcccatagtgggcttggctccctctgggcctccctgttccccatcagagggatctaccatctgcccagaggcagtcacaggccaagggtgcaggcagggcttgatatgaagcctccctctcagcactgtggtctcagcgactgtgcccctgaggttctcagccagggggtattttggaaaacagtaggagcacttttctattatcacatgtgattttctttattcagtctagtaaaagttgaggtatacmatgttataaaaaaagaaaaggatgttgggtgtgagggtgttgagaatcactggatctatattatatgcaagttgctgaaaaaaaaaaacaaaacactagttctgtgtacttggaaaatgcttacatctggtgggacaaatagaccccactgtgtagcagccaagtctggataaagcccttttaaagttatcacttgggtcctgataggcttgataagggacctatcagatgggtcagataaagggccatctattcccaaaggcctaagaatgcttgacatttaaaagctacacgcaattcctgctctcagagagcccacagctgaggaagagactgagacaggtaaacaaatttcaaatctgtggccacatttacttaaatgatctgagacacttatagagtactaggagagttgaaaaagtcaactgcttttaaaacttaagacatgtcattgaggtgctgagccctggcgatcttccacactgcatcrtggatcttaatcagctttgttatagatggcctgagccaggttagatgaggatgcaaatcaaaaagcagggacaatgagtataatgtggcccttccttttcccagtattactagctcattgctacactctttgcaggtgtggcccactttctttgagagaccccttgtgaggaaagcctttgagaagaccctcaaggacctgaagctgagctatctggacgtctatcttattcactggccacagggattcaaggtttgagtgactccctttctcagcctctagtttctgagctgttgcaggaattcagggacccccaacagagagactggctgaagccatggcagaagaacataaattgtgaagatttcatggacatttcttaattccccacattaatrtttttataatttcttacgcctgtctttactgcaatctctgaacataaattgtgaagatttcatgaacatttatcacttccccaatcagtacttttgtgatttcctatgcctgtctttacttaaatctcttaatcccatcatcttcgtaagctgaggatgaatgtcgcctcaggaccctgtgatgattgcattaactgcacaaattgtttgtagagcatgtgtgtttgaacaatatcaaatatgggcaccttaagaacaggataacagmgatgttcagggaacaagggagataaccttaaagtctggctgcctgtgggccgggcagcacagagccatatttctcttctttcaaaagaaaataggagaaatattgctgaattctttttctcagcaaggaacaaccctgagaaagagaatgcgctcctaggggtaggcctctaaaatggctgctctggggacggctgtcttttacagttgtagataagggatgaaataagccccggactcctgttgtgctcccaggcttattaggacgaggaaattcccacctaataaattttggtcagaccgattgtgtgctctcaaaccctgtctcctgataagacgttatcaatgacaatgcatgcccgaaacttcattagcaattttaattttgccccggtcctgtgatcttgccctgcctccatttgccttgtgatattttattaccttgtgaagtaggtcatctctgtgatccacaccctatttgtatactccctccccttttgaaaatcactaataaaaacttgctggttttgtagcttgagggcatcatggaacctgccgaaacgtgatgtctcccccggacacccagctttaaaaatttctctctttgtaatctttccctttatttctcagaccagccaacacttagggaaatagaaaagaacctacatgaaataacgatgaattatcaggggcggattcacccaatactgagcaggtgccagaaagtagtagctgcaccagggctgcagagtggtgtggactggagcaggagagcttgcacttcataattgggaatggcaggtggtcaggaagagaccttggagcagaaagatgctggctggaagggaggctaaggccatgtgcgctgctgaggtgctcacatgcctgggttatcttgcagttatgtctgagagaagacatgatttctggcagcccagacaagttgtaactgccatatcacctttgtctagattccatgccctggggttgccctcccaggaaacctcttgggttattcttccataactgtattccagggcttaattattttattaagcaaagcacacctggcagtggcatcttggagaaaagtccaagtatggtgatgctggaaggaagccagtagtgatcccagcacccattgcctggggctctgctcttacctgctcctgaggggtgggggagacaaatttccagctctctcccctcctgaccagctggagtgatgatggcctgccatcccgaattccacgcctcttctagaggctgcaaggatagaagttggccaatatcttctccagaaaaccacaccctggagatctaatctttatccagtgatactgaaatgaaagtttgcccttgggtgtgtataggatrtaggtgtgtgaggttaatgtccatggtgataatggtggcttctggaatgtactaacagaggatcttaaagtcaatccagtagtttctaaaaatatagggattaatatgctacagtagatatagagattttatttaaactcacattcttgtagtatgtactccagagcttgaaaaagtggtatgcagatgtggtatttagcaagcatcaggatcctgaaaccttgttgaacagaaccaagtgtcctgatgcagattccagtaaacttttcattctgtatttacagactggggatgactttttccccaaagatgataaaggtaatatgatcagtggaaaaggaacgttcttggatgcctgggaggtargttccagctttgtctaagtgtgctgggagagaaatcctcagttatccatgagattcccattgatatgaaagaggccatgtgcctgatgctttctaatttcatcattgtgattctctagctcttctaatatcctcctcatcacctttggcttttgggtgcatctgatactatttatatttcaagcctactactgagtcttcaaataagactggaaatacaatgtaccccactttggggaatacacatgctgttctcaaaccagggtgaggcatttggaacagagggtttgggcctgggtttgctcatagcagctgagtaacctagggtcagttttgtaactcttgtagggctcagttttctctttaaagaaaaaaggtcttataatacatactactaatatatatctttcggggtgtgataaaacttaagatggtttacgtgccgggaacatcagtcataaagcccatgtaatcatctaaccctaggagacagggttaacatccccatttataaataatgacatttgaaacctagattggttggtgacttgcccaggtcatgtcacaatgtgtgtggcagagctgggattagacccagactcatctgaattgcaagtccaaccaccaaaaccatcagcatggtgcttggtaagcagtgaacacacatccggaaatcagggaactttgtaatcccagcactttgggaagccgaggtggaaggatcatgaggtcagaagtttgagaccagtctggctagcagagtaaaacgctgtctctactaaaaatacaaaaaattagccaggtgtggtggtgtgtgcctggaatgtgagctacttggaaggctgaggcaggagaattgtgtgaacttgggaggtggaggttgcattgagccaagattgcaccattgcactccagcccaggcgtcagtgcaagacaccatcttgaagaaaaaaaraaaaaagaaaaaagaaaatcagggagcctgagtgccctgcttctcagatcaaacccatgacctgtttcacatcatttcatattgaaaatgaattaagggatgaatgttttctctggccattttttattataccattatgtccttttgcaaatgstaatagagaacgaattggagaaataagatataaatgaacagtggcatataactccaagagttaatcatgttatcttggcagctgtctgtgtaggggtgcatgtagttgcgagtttgtattgtgttttacacgggaaaatatattaagcctcacctttctgaaatgcttagaattgacatgattcaattaaatgtagtttkttctgtgtattgtttgttcaaaagcattaatccacaagcacagcattctttttttgatacagattctcactctgtcacacaagctagggtgcagtgacaccatcttggctcactacaacctccctctaccaagtaaaaaccattctcctgccttggccttccaagtagctgggactacatgtgcatgccaccrcacatggataatttttatatttttagtagagatgaggtttcaccatgttggccaggctggtctcaaactcctgacctcaagggatccacccgtctcagcctcccaaagtgttcagattacaggcgtgagctatagcaccaggctgtttgcattacatttgatctgtgtttttgccttagctcctatgatgatatgaagtatggcaagtatgtcaatgtaccctgcttctcacagtgctatgttttcttaatgaacatgaggatgactgctaaagaaaacatttgaaaggcatgaaaagatatcattgatcaagttcagaggctctgatttgaaacgwrcatgcttgaatacgtaagcattggatgtttatgtagacccacaaccagttcagtagaaacctcattgactaccctgaagcagaggggaggaaaaaagtataaagaagtcaagttttaatacgggaaaactaacctgacctatgatgcacaaaagcttttaaattatctaattgctgaatcagaagtttttgggaaacttatgatttcatagcttccaaactctacttcccaatttgaataacttaatctatgctagtggttctcaacgttggctgggcattagaatcacctgaggaatttaaaaatcccaatgtctaggctacaactcagacaaaatcagtaagaaactctgggggatgaaatccaggaatcagtcatttttcttttttaatttagagagagtcttgctctgttgcccagagtagagtacaatggcatgatcatagctcagtgcagccttggactcctgggctcaagtaaacctctgaagtagctgggatcagaggcacacgtcaccgcatccagctaattaaaacaaatttttttttttggtagagacagagtcttgctatgttgcccaggatggactcaaacatctggccttaagcaatcctcctgtctcagcctcccaaagtgctgagattagtcatgagccactgcatccagccagtacctttcaaagctcactagtgattccaaattgcagccaaaattgagaagggctgcataaagtgttccctgaacatgtcatgctcatccctgcctctgagctttgctcctgccttcctgccttcctgtgtcatatgctcatgtttttcccctcttttctctctctcggggtttttgtttgtttgtttgtttgttttttgaggcccagcttatactctacctgaaaggactcccctgacaactgcgggctgtgtgaatctcttccttctctgcctttctgactctgtctatgccactgtcatgttatctgaggcagcctcagtgtcatgattgatggctccatagaagggaactctagcactttaattggactgtaagaatcccagaagaaggaagcacattgtatacttttacatcttgacaacttctgggcaggatctagaacatgtaatagatggctactaaatacatgttgcattggaggctgctgctaacatatatgatatctttgggcaagtttggaaaaygcccaataaaggctaaaaattatacaaagattcccttccttgcatgtccatgcagcttctgtaccaggaagcatggctggatatgcaaacagtgggtcaggttttagccccacacaactccgtggccgggtgcccctgctagggcrtaatttatatgcatgaccttcttgcaaaccaagccatggttggtgtgggagacagtgactcaggacccacaggtgaggcttctccgtatgctgcagcctcttcctgactaacacagcttgcccaggtttgggtgtacaatgtacacacacaacagtagctccctgctatcatttggattcattaaaaattaaatcatctcataagcttacaaatgttgatttttatttatttttttcatgataaaactttcatatttccatggtgtatggaactataattttttatgtgtttctttacgtgtaaggtgagagtggcaagaacataaaatcttyacctgttagtyttagattttcttgggctggggaggggcagtagggctggaaccaatcactgatgggcacccaggccctggactgaaatttcctgtgaatgcttcagctaactctgttgcggtggatcctttagcaatttctgccccagggaagaytaaggcaagccagggtccctgtagtccctctagagctgcccataaggtattcctttctatgataggccatggaggagctggtggacgaggggctggtgaaagcccttggggtctcaaatttcaaccacttccagatcgagaggctcttgaacaaacctggactgaaatataaaccagtgactaaccaggtaaattctattcagtttaagggtaagggtcctgccctattacttcttaaacattgcgggrggaatgttcaatgctatgccctgagtctyatctcaggggtcagtgatcaggacactttggggaggtgtgaggctgatctcaygggtgatttagcaagwatctcagtgsgcasktgtttggcctttgcttggtggactttttttgtgtgtagaactccctaggaacaatgcaaaacagagccggctttccccgtgatgaggattgtttgctgttgcaggttgagtgtcacccatacctcacgcaggagaaactgatccagtactgccactccaagggcatcaccgttacggcctacagccccctgggctctccggatagaccttggtgaggcttccaagtggtgggtctttctcttgataatcttaaaaacattattttataattggtaaatgtcggtatgggtccataagttactggaaagaaaaatgtgtgtaaggtaacacgtttggtacacacaaatgggatggcagtgggaaaaaatgggaattaaacaacaacaacaacaacaagggcgacatgcttgaccctctgggaatatttccagttcagccacccaagggtgaaccaggcttgcaaaatgctgaggcttcagagcccggggaaaggacccaagcttccaggtcctcctgcctgtctcccagatggagaggctctgatgatcagtcttgagaccctcattggagtggtgtccttctgtacayggtagccatggtgattattcacatcagcatctttctgcccstagggccaarcctgargacccttccctgctggaggatcccaagattaaggagattgctgcaaagcacaaaaaaaccrcagcccaggtaccatatttttatttttcttgttatccaacmactcatgcttccagtctcatgtttcatttctcgtgttgtcctcaactgactccttaaaggggaagaacacaggagctgaagccctctaaagtatttcctttgaagtctgttggaacctctaggaaacacaagagctgtcactgaagcaaagatagcttctgtctcacagcttcctgtcaagccctacagcccagtggcaaagcatggctttggagtctagggatrtgggtgcagatgccaactctacctctgatcagccttatgacccccaagctactttcttcattcctaaaaaaggaagatcacagggttgtctctaaggtgaagggagagaaagaggtgggggtctggcacaagtctaatagctgtgaagggctcagtaattattarcgattgtacctgaagccacagtgagctgcagagatgttttattcttcctttccataaaaggaggggtcyttgtagctgagtggaaacatgatgtcccctttctgcacaggttctgatccgtttccatatccagaggaatgtgacagtgatccccaagtctatgacaccagcacacattgttgagaacattcaggtaagtttccggctggtcggscctggtattcctcagtggagtgggggacaggcagaccttctcactaggcttctcacctcatccctgcactgtctttggccccctccttccccaccaccctatcattttccagcccagggagctaggctcggtagagctgagatgaatgacccatgggctaagaacatcctgggggcagtgcctggtaaagccctatcaggtctgagcacagttgtgcctcacaccactgagaagaccctcagttgcccctgagcagctaggccctaggccatacacaagagcagactgtcctggcctacctgctcacctcccagcagcagaggaggtgtgaactgtccttggagaagtgtcctctagaagcacctgtcatggagcacagggcctgtgcacgcctggggtttagtgcctgtgagcctggtctccctccccccagaacactgagcactacaaatactgtggtctttgtgtaggacctaatttagagaaaaatttgtatcccktggacagaatgggaaaaactcctrtggccagtttgtgctgtgaatgtgagctccctccctgctagaatggccggcagtctccagccacagcagtaacagccttaccgatratgtattggaaytctttcctttctaggtctttgactttaaattgagtgatgaggagatggcaaccatactcagcttcaacagaaactggagggcctttgacttcaaggagtaagtggcatggagttaactagaagaattgccaggagtttttctaaactggtagagggttagttggaaggattagaaggttgttgggactacttgtgtcttcaaatactattttggggcagttttgaaagttaaaatttgggtacctgggaatcactgtaagggacacatctctaattgctgcttattgtctgaacttctggatgtagagctagaattgtaagagaaggtgtgttatcaataggcaggaggcagaacattcatttattcattcattcagtcaatatctagtggtcatctgtgtgccaggcattttctaggtgcttgggttatcatactgtacaaagctgctgcctccacaggcttagggagggagggaagaagagacaacagaaataaatcaactcaaaatattgatgtcagacagcaacaaatgctagacagaaaagtaaagtagggcaaagtggacaggaagtggtaggtggtagtgggactgatcctttatacgggttgggtcaagggaagctttgctgtgagggatatgccatatgtatatttgggggaagagcattcttggcagtgataacagcaggtgcaaagtccctgaggtgggattgtgtttagagcattcaagcaagaaggccagggaggctggattaaatcatctccaaatgcctcttaaaggaggtggtgctaactttactttaaatctcagataagttgttgaaaaaaagtctttcactctggctaggcgggaattctacatcatctctttagaatcaatactttctgattaatgtgtctaattacatatatcaaatagaattgtctggcatttattactgcgaggtctgcaattcaatggcaatttgaatttcttcaaatatttgtgtagccaaaaatgatttttcagcttttaaaaatgatttcagtatctcaagcgttgcttgcatgtcatgatattccatatctatcctgcccaccctcagtatcatagcagcctttcctcatcttacaatggcttagtttcatccgtgcttaacaaagtagcagctatttagagtaaaaaggaagggtgaacataagatgtgactctcccccaaactaaaacacttactttcctatgagcatcatttctggtgtaggcaatgggttggtggactcagaagtaaatccacctggcctcaaatccaactctaacactggtttcttcgctgtgtgacattgggcaaatttcttagtttttctaagttggtttctttacctataaagtaggatgataatactaatcgcagctaacatccattgaaccttagcttagaatgtgccagggtcctgagcccttttccrgtggtattatctcatttaatactcataacaatccccaagctgtcaattctgctgttgtttcctacctcatgatgttgtgagagtggattgggacaagacttgtctgtcacctcgcctgacaccaggcttaccgtgagttgtcattacgagtttattctgctgccctgctcactgtctgccctccttcctagcaaaaccctcatatcgatttgaaggaaggtcaaggtgtaagcacccttcttgtgttcttgcagggaggaggctgagagaccacaaataccacagagtccaccagagaagaataccttctcagcgagagttgttgctttkatggaacacagtttctttttttttttctctctctctgtagattctctcatttggaggactttcccttygatgcagaatattgaggttgaatctcctggtgagattacacaggggattctctttcttcrctgaagtgtgactgtctccactcaagaactattttagccaagcttatctgagatcacagtgaactttgtcctgttgtagaccagaatggaggtgctgttttagacatgtatttctgtatgttcaactaggataagaatatcacagaaaagcatggcctgaataagcaaatgacaattttttccacttatctgatctgatcaaatgtctgttaagcaccagaaactctgccaacactgaggatgtaaagataaataataaaaaataatgactttaaccaacatgtattgagagtgtactatgcgccaacacaatttgaagtgttttcctgtgggtgaattcactgaatcctcaaaataacccctttggggtaggtacttttaacatcttcttattcacatttcctggaagaggaaataragatgcagggagggaggaggaccttgctcaaggccacccaggtagtaagtgactgaaccaagtttcaaaggcaggcaggctctgggatccagctcacagcaatcgatggtcatcccttcctcctgagtcttttcctgccacctctcctccttgcctgtctccactcattccctatcatgctctcccaccttgccttcaatacaccatcgtgccaaagagtcaatggcagaacctgcaaactccacaaagatgctagtgttcattgagagaggtgcggcatttccttgggaagtagggtggaaaaacaataaagatacttactattgccattaatctggaacatttctgtttgtcctataataattgcttcttatgaaatattccaactatatagaaatatacaggaaataaactaatgagcatctggccgccaacattaaaatgttaacaattgctagccgggtattgtgctgtagtcccagctactccggaggctgaggtgggagggtcacttgaacctgggaggtggaggttgcagtgagccaagattgcaccactgcacaccagcctgggtgacagagagtgactgtctgaaaaaaaaagaaatgctaaccttttgccatattggctccaaacctttaaaaaaaattaggaaattaggggttaccaatgtagtcgaggaccactttgtgcctctccccatccccattcccctgactccctctcaagaggcaaatgcctatcctaaattggtgagtccccacatcctctggttgaggctggggggtacatctaattcccaagcttccttgctatgttatgacttcccctgggtttgctcagtgagaggtacagttaggagcttgaagggctggagaagggaagagccaggcatttctctctccctctctccctgtctcttgaccttgagtggcatctccagtagaagccacattcctctgtgggctcagctttttcccaggcagcctccaccttgattctatctcctaccagacaaagcttctgggatgaggaagcagccctctttctttgtccttcttccttaggagaggggatctcttcctgctgctgctaaactagttgcctcatctcctttcaatagcccagctcttccatcacgtgtaactgatcacctattataaccaagtattttaatcaaatatccaatatttaaaaaacttagtgtagtttcttttctcctggctggacctttcactggtatacttcccaaccacatttttgtatttttagtatatgtgtacacatccatacacaatgtcatagactgggtgcttttaaaatgtatataaaatgtgtacaattgatacacaggaagcaatttcaacccagagcccagtgatatctctttagtgagcactttgtgaaagttttcttcttcacgtgactgtgattatgatttgcttcataaaaagcttgggtttggggataaaatggttgggtttctattatgtggctttttcttgctttgtttcacttgtatttaaccaaacagaggtaaatttaaaaagttaatgtggagaaattctgtgttttaaaaagcagcttcttagttattctgttttttatctttgtagagaaggagtcttgctctgtttcccaggctggagtggagtgcagtggcatgagtgtagttcactgcaaactttaattactggtgctcaaatgatccccctgccacagcctcctgagtatctgggactactaattatgtcctgctaattattttttgtagagacaggatcttgcaatgttgctatgttgtccaggctggtctcgaactcctggtctcaatgatcctcccacctctgccttccaaagtgctggaatcacaagcatgggccacctcacacagccagttatctgattatattttcagcatttatatctcaagtaatgagaactttgcaggccttggggtcctcaatgtcacaactgtaagaaatacagtgaatccatcctaaaatttattcacaattttgtctcaattgttcagaaataaagccaccatcatcatcaactaaaccaaagctgccattaaggggagagaatctaagatatacactacaggtgtgtgttaaataactcttatgataatgtagggaatttgccttatgaagagaaaagaaggggaataaccacagaggggaagatggtaagtaaggtcagtgtggaaaaggaagggagcttgtcctgggaagtagggaggcaaggagtgaagctcttgtgtttcaagtattctctctactcattgtctaagagagggctggaaaaatgggttgcaactagcatggagattctggaatcactgtgaccatcctgccgggctcaggtagttcagagggctagacttgccctcttgtatttaagtgagatctggcaaatgctgggcagatgatgccaaactataactgggacctaaagggatttggatctcccagccagaccccttaatgcctgactgtccagggctgctccagtcatttcaacaaccttgcaacaactctgcactttacatgattacaaatttggacccagccagtcctggtggttcacacctgtaatcccagcactttgggaggccgaggcaggaggatcgcttgaggccaggaattcgagaccagcctgggcaacatagtgagactgttgctatatgaaatattaaattaacaaatttgcattattgtgagatttaactacttattgcattattgtgagatttaactgtacattagagtttaaaatgtacagatgagagaggcttctgtagaaaatagttttcagtaaaatttgaaagaccctgaagagtgaagattgttggaaataacctttttttttttttgctttaatgcgtgtgcatgactatagacatgtaaattctgaacataaaaatatgcaaaaattaaccagcagtggtggctcacatctataatcccagcactttgggaggccgaggagggtggatcacttgaggtcaggagtttgagaccagcctggccaacatggtgaaaccctgcctctaataaaaatacaaaaattagctgggtgtggtggcacatgcctcaggaggctgaggcatgaaaatcgctttatcccaggaggcagaagttgcagtgagccgggattgtgccattgcactcctgcctgggcgacagagtgggactccgtctcaaaacaaaaacaaaaacaaacaaactaataggagataaacaaacttgaacaaaaccatttggcaattttcatataatcaaaagagcttattcatatcaataagaaaattctaagatgccaaaaagaaagttggtacataaaaattgaccagtacatgacatgaaaaattgtactgactagtaataagaatgcaaattaaaataagtttttttcactatcaaaccaacaaaacttagaaataaaaggaaaatatatctagaaagatatgaatattaacagggtttttttctatattgtatggcaacaggttttttttgttattcttttacataattttcaaaatttccacaatacgaaatgcacttttacaatcaagagaggcattaaggatttagaaaatagcagagatttagctcaattagttattttatacatccactgggaaaaccaaatggaagagacacttttacttgaaactattctcatttaacaagcctttcaattttagaaaatacatattctgaatgtacaatgcagtggaatttgattacatttaatttaaaactctacctagttcatttgtttttcctcatttgttgtcagcattttcccagaaatttcatgaaagttttgcacccttaaaatcttatagtgttgccttccagcacttttgttggttgaaaaatatcaacccccagataagtaagggagagttggtggagaccacgaggaccttgaacgttactaaaaaaattacacaagagaggtgcttgtgccccagggcttttgcccttgctattctcattgcctgggatcttctgccctctgatattagaataattctctgacttgtatttttaatttctttgctgatttatcatcttctcagggaggcctttcttcatcaccctatttaaaattaacccatctcctctgatacttcctcttgcccttctgtgttttcttcttctccttagcatttatcaatatgttatgtattttaaatatttactgtttgcttgcttaccctgtttctacccactggaatgtaagctctatgggagaagggattctcaataatatctgttgaataaatggacagatggaatggatggaacaatggatggatgaatggatggatggagggagggtggcatagatggatggatggaaacatgaaggacggatggaaggatggatgaaaggaaggatggatggaaggatgaatggaaggaaggatgggtagaaggatagagggattggggatagatggatgaaatgatggatggatagaagggtggttggaaggatggatagatggagggagggaggcatggataaatggatggaagcagggaaggaaggatggatggatggatggatggatggatggatggaaggatagttggaaggatagatggatgggaagtgtttttactccaattttactttttaactccaatttcagatttaaaaaaaaactgaagctagatttcttaattgttacaacccataatgcctactcacataatctgaagtaatttcatgaactctacggctagtcataaattgcaaagactgtataacatccttgaactggaactgagataatcattttggaggcagggatgatatgtggagaatgtcaatctttaattcatgattgaagttttacttctgctctcattgaagtctaatagtgagaggtaaaataggaattgaggcaccactaatattctctcctttcaattctgtttgttctactccatggtagaaaatggtgcattgctcttattagcaattccttcctaagtgtgagttgaatatggcttgcatatagtcccaggatctgctttctactaggacacagcattcagaagtcctgagaagcagtgagcagagaacagccatggtactgctatccatgaaccaagagatgctgacagctcaagtgaaaagcaggggtaaaggcagcctatatgtcagactcctggggtatagttaaaggctgtcttgattggaaaaaaactataccctagtgcttcaaccttgggataatcgtgaagactaaaaaaagataatggttcctctatatttactgataagcagaattcacaaccttgctttcttcctataaatagcaatattctcattattctagtttttatttctccattagtgtctgtattagttttcctggtgagagacaggactagctgggtttcctaggctgactaagaattcctaagcctagctggggaaggtgattgcacccacctttaaacactgggcttgtaactcagctcacacccaacaaatcaggtagtaaagagggctcactaaaatacaaattaggctaaaagcaggaggtaaagaaatagtcaaatcatatatcacctgagaccacagtgggagggacaatgatcggggtataaacccaggcattcgagcagggagtggcaacccactttgggtcccctcccattgtatgggagctctgttttcactctattaaatcttgcaactgcacactcttctggtccatgtttgttctggctcaagctgagctttcgctcaccgtccactgctgaacgccactgtcgcagaccctccattgacttcc

SEQ ID NO: 93390 - DNA, 14050 bp, Homo sapiens
aactccaattgcttaacctaggccaagaaaacaaatcccataagccatgaggaccttagagatccaaatattaataggtttttttttgaagcaatatagtcttttttttttttaaccttgcctgtgtccttgacctaagtatcacaagaagcactggcaatggtgcagacaaaatcgaagtggccttccaactgtgtggaattttgaatctcttcttcagttgtgaaacatgaacccaaaggttggctccttggagtttcactgctgtatctattgttaacagtatctgataagatctcttccttttgaatgaagttcaaaagcagttattctctgatttttcttccagtagacaaatccactagttgaggatcatggagaggttgtttaggaagattttgtaggaaggggaccttaacctgttggtgataggaccacgtacaatacatgagtcccttgcagtatcttgtcatgtctgcatggagtaggacagactctagtattggaggtgaaatctctaaatgcatggaccttcccggtatcaactcatagggggataacctatgtgtctccaagaaagtggcctgtatatccgtaaaggatagtggatatactcttggtcaagggagctcaagggtttctgaaattgttgcttattttaatgtaaggatgccatgggtcgtttttgtgggtggtaaggatggtgtagtttttgagtaagagttcttttataaaggtcgccttaaagtgtgtgcctcagtcacttgatataaaaggtgggatgccccagattgaaaacataaaatcaagcagcttgttcacggctgtaagggctgtagcattttggcaaagaaattcttcaactcatcctgaaaacagacatacaatatctaaaacatattcaaatcccagggagagtgaaagccggtgaagtgtcttgtgaaataaaatttaagcaaggccattgatttggactgggctcctgcactaagcctaacagatcaaacagatacggtgtgttgtttgatctgttaggcttagttgtttacaggcttacaatatgttgcagctgagctttaactaattgcaggagactctgtaaccaattaaccaattaagctgcctctgtaccatgcttcttttgtctcctataaatgctatcagattatgtcattggttggagttctctgaatttcctctagttccaaatcgtgcctgatttttgaactgcttttttttgttttgtttttgctttgtttgctttgttttgttctgcttttctttgctcaaataaactcagctaaaatgtacacttgtctaaggttttattccatgtaacagtccgaaggtgtccaaagaggctttggtttctggccatgtcccaactttacagtttttccagagttatatttttgacaggtgacacatgacccaaaagtaagctcagttgccttttcaaagttttcctaccaatgtttacttaagatagtaaccaatttgtctatgccataatgggtgtttcatggagaaatccagataatgtaggggaggaaatatctttcttatttgtcttaagttctaaggcggggctctgtaacagaaggcagattaaaaagtgaaaagcatacacatttatttaatgtaagttttacatggcatggaagccttctggaaatgaaccagtctgagtggatgcttatatactaagttagacaaagaacagtaaattgtgaaaacaagtcaaagggatatgggctagggctgttaatcgtggagaagtggctagggagataagggctagtttaacaaggtttatttgtagttttctctcaacctcagctgcccccatctctggtaataagaatgtcttccttcttccacggagggtccctgttacttgggagcattgtctcctgcttttagaaagatcagagtgcccttcttgcatctgctgtttttcaagagcttttaattcaaaataatccatatgccagaaaggcatattttggggtggtatgttttgaactcctttagaaatatctacttgagatcatctggtgtcaccaagcagcaccaggaattatctgagtgaagagtacaattagatgttttccattctttttcaaaatcaggggctaaatgtcaatattttataatggcctctttgaatcccccagagatttatcctttaaaggtatagatagagtcataagcttggttaaagtagcttctttggcataatgatctgctagagaatttcctttagtttccatattgtctctttttatatggacctctacctatataatagccacttctctaggaagtgggggtgcatctgaaagttccttaacttgctgtccatttctaatgcctattttcttttcttttcttttctttttgagacggagtttttgctcttgttgcccaggctggagtacaatggcacgatctcggctcaccgcaacctctgcctcctgggttcaagcgattctcctgcctcagccttcctgagtggctgggattacaggcatgtgccaccatgcccggctaattttgtatgtttaatagagacagggtttctccatgctggtcaggttggtctcgaactcccaacctcaggtgatccacccgcctcagcctcccaaagtgctgggattacaggtacgagccaccatgcctggtcttctaatgcctattttcaaagcatctcaaaatcatatgctatttcaaaagcatacctgcagtctgtatatatgtttgctctctggtctttgtttaggtgacaaattctagtaaatgcaatacattttgctatctgggctgattttactgcaggtagtagactttttcttaagaagagtttaaaataggggtagcatagcctattaataatgtagggaaccagaatatgccagctcaataattttgagttgattattttgaaaaacagtaaatgcaggaaaaactcaaaaaacagggctcatcatttccacagctgcctctcccctcttccttccctgctgtgaaagaactataaatgtccttttttttttttttaaacagtgtctctctctgtcacccaggctggagtacagtggtacaatcacgactcactgcagcctccatctccagtgttcttccacctcatccccctgagtagctgagactacaggagcatgccaccatgcatggctagttttgtatattttgtagaaaaagggtttcgccaccttgcccaggctggtctcaaactcctaaactcaagcaatctgcctgccttggcctcccacagggctgggattacaggagtgagccactatgcctagccaagtttcccttttgtaagagaaatttccatttatattcccatttgtatggatgtctccctttcctgtgctaggaagaggaggacttaatcacggaggacttatcaatggagaagacaaccaacttgaatttgcttaacaaactttactaaacaacccttatatactatacatttcctagtccgcttgtcgcaacctccccagaaactcaaaatccctttcctatgtgcagagacaaaagtgactccatcttgaatgctaatctaccatgttgacgtctgattaaccatgtcccgggaatgcctcctgatttctactttatttactgtctctagtgtagaaacatgtattcactagaaatcctgcctttagatcaaaacaaccttaacgttatcatgcaaattatgggctatgacaaacacagcattcttgcctgttctgaagagttgcctttcattgtctctatatagcacgtaccccttttccctatggtatataagctctgggtctggggaataacagtgctgagatttacatgtcttgctgctgcccaagacgacacttctggctataagttccccaatagaataaaacacgctttactgacaaactgaatttgtctgcctttctttagtttctaggctccttcagcatttggggccacttcacatatgtggccctttcatggaacactgtcttgtcacttctgcacaattttctttgtcaaaatggcctataaactctcaggtttaattgcttctttgagtcttcacttctttttttatgaagacttccatattcatgtagaatattaatattaaattaaatttttatgccttttctcctgttaaatctgtcttttgtcattttaatttacagggcccccagccctctaggagggtaaaggaagaattgatttttctttcctcagtgtactaacttcaagtttcaattctggggtatgttccatcaataaatcatattaggtccgggttctcaataggagttgctaataaatctgactgacatgcagaatgtttcctactgaggtaagacaatcaagaggctccccttctggtagggacagagggtggcagaattcagtgtgttgcagagatgagtagtaatttatgagagggagagagggatagaatcttataagaggttaatcggctgcctgaagtgtgcagtgagttctcagtcaggtgtaatgcctgtgctgcgtgagaaaccaggaggtcaagcagggagtctagaacaagttcagcagaagcaacaacaaatgttgccatggcatctactgccctaagacaagcggggctatgcctctgcaactgggtcaaggataaggctgcagtaagggcttctgatggttccccattgaagtgcaattaaagctccaagggcttgtctagattgctatgcataaatagacaaaatggcttcctgtagtttcaggattcctagggccaggggctgttgaagagccttattatagttacagaagatctgttcacatctgaactgtggttctgaaatcatcttgctgggtggaggccacttttgtgcagccacgcccagtgccttagtggggtccacctgactaaccaaaccatcccaccaggcgcccttcaggtgagtcctgtgccttatttatgtctgtatcccacagtctaatgaatgaatgaacacattctaacttgactattcaagagaataaaagtattattaaagactcagaaaaataaaatacaggtgggggctgggggagtaaggaaactgtaggggccaaggaaaaattcccctttcaccctccaaaggtttgctgaaaatcaactgacaaaagacagattgataggaaaaaacgcatagaaattgatttgatcgtagttttacacgacacgggagccttcagaagacccaaagataacaggggaaagtgggcattcttacacttggatatcaacaaagtatgaacagctgtgtagaaatatgactggacaacagggcgatctaatgaaaatagactgagtggggaaacccagcaaggcctccctgtctagattcttcttggcctctctgagcattcgtcctttttttctgggtatggggggcaggacgctctctggaatgaggatcttacgacctacaatcacacaaggtaggtcagataatttcactatggccactttttacacagaaaggctgaaacaatctgaatacacagcacgaagggatattttgataattcttagaggtatccaaattgttactcagcaaaaaaacaggtctctttctaggagggcattctgctgctaataaatatgatattctttgtattttttccccaaaaagaatttgagatttgggatttaagtttatctttagttcctctactcaattccgacctacagggtcagtggttactgtagataagaacagccccatcctctcgatgcccccagagcaggggtggagggtgggtgggaagtggccagaactgggtgagcgcaccctagaggcctcctcctcctccctattcagttactccccctttcttctccagatctgggaagccttccagctgggggcagcaggacagcctccattccccccgaccccgcctcccatccccgggagaggtagcgttgggagaatgccctcctagaaagagacttgggttttgctccctaggagccctggaatagctttggccagaattccctatctcccattagaacctctcctttgcgtcctttgttaacctccaagtctacttggtgaaaacgcccacgaagaagtaacaaggactttgttcctagtgtgccaggtttgggcaccagtgctgtagtggctttctctgctgctccttgtgcatcagcagacagatgtggttcacataggaagaaagactaacgtaggcaaagatttgctctttcttcagcagccctagaaagacggcggcctgggtgattcaccactccttcctcacgtccttgattttatttgaactgagctccagatgctcctcccacccttttcctcttggaagccaaacccctttgtaatctgtataaggtccacaccccgggagctgagtgattgcagaaactggccttccatctctctcagacaccaagctgcagatccaggtaagcagcccaagaggtgttctcaggtgccgcttctgcttcagggttgcagaagagggagctagggccagtccacagcactgagaaagattgggtgatgctagcgctgaaaaaatgtggcccaggcaaacatcagckgggggcagaggggtcagggtggaacgtgcaggctgcagagcatccatgggactggagaagaaggagcctccaaattgggggaggccagcgtttctctctggaatacaatggaatcttttatgatgccagtgtcaggcactgkcctgagttcccttatgctccaagacaacaaggctctgtcacccatggccctggatgtcggggatacaatttggttcatgatttattcaaactgatgtttcgatgagccatttgagcactgggtacaaatgtattttggatcaaagaaactccagtattcaaagataggaactgacaggattttaggtcactttgtaggtcaccacctagaggggaggaagacctcgctttggagagtgggaataaaacgctcgtggaaaagggtacacgtgagtgtctcattacacgaaaaacctcaggaagtaggatggacgtctttctggctgacctgaarcagaaagtgtaaaccaggcaagccataggtgggagctggagttctttttctaagagggctcttttccttctctctccttttctcaattaggcttttctgggaaagtgaggccaccatggctctggagaagtctcttgtccggctccttctgcttgtcctgatactgctggtgctgggctgggtccagccttccctgggcaaggaatcccgggccaagaaattccagcggcagcatatggactcagacagttcccccagcagcagctccacctactgtaaccaaatgatgaggcgccggaatatgacacaggggckgtgcaaaccagtgaacacctttgtgcacgagcccctggtagatgtccagaatgtctgtttccaggaaaaggtcacctgcaagaacgggcagggcaactgctacaagagcaactccagcatgcacatcacagactgccgcctgacaaacggctccaggtaccccaactgtgcataccggaccagcccgaaggagagacacatcattgtggcctgtgaagggagcccatatgtgccagtccactttgatgcttctgtggaggactctacctaaggtcagagcagcgagataccccacctccctcaacctcatcctctccamagctgcctcttccctcttccttccctgctgtgraagaagtwactacagttagggctcctattcaacacacacatgcttcyctttcctgagtcccatycctgcgtgattttgggggtgaagagtgggttgtgwggtgggccccatgttaacccctccactctttctttcaataaaacgcagttgcaaacacctgatttctgaagcggttctgtctaggtactgtttctggcattgccttccagcaaggggtaagaactgtaaatctgattcactttggagaacggtgaatggagtaattaaatgccttcccttctgacttggattttagtggcttgagaaaattcctttccttgtagattccctgatgccaaacataaaactgttaagtgtgggctgttttagacaaaagggagctacagcctgggacactgccatgcagggtgaactgacagaggggtgaagctcaaatacaatcattctctggcacagaaggaaggcaagtgtgacctcaggaagatcctgcttagcctcagggtggggaagaggactcaatgaaattatgatcctaaatttccattttccttttttttttttgagtgagctattactaaatcagaaaaatgggcacctcttagttggaaagccagaaccttacattttagagccagaagtgactttggagagcacggaattgagggatagcaagtagatttcagtttgtgtaccaactctaattggaagtgccggtcgggcgtggtggctcacacctataattccagcactttgggaggttgaggcaggtggatcacctgaggtcaggagttcaagaccagcctgaccagtatggtgaaaccccctctctactaaaaatacaaaaagtagtggggcgtggtggcgggtgcctgtaatccagctactagggaggctgaggcaggagaatcacttgaacctgggaggcggaggttgcagtgagctgagatggtgccacttcactccagcctgggcaataagagtgaaactctgtttcaaaaaaaaaaaaaggaagtgcctacccaaaatgctgtagcaaaaaattctggacagtggtgtggttgaacaacagcctctatcgaaggcacgagagggggaagggtgtgtgtgccacacatttgccatccctgaccaaatgtgacccctgcctttccggtgacttgcacatggcttgttgctagttagtggcacagccgggactacaccctaggtttcctgacttccaagccattgttctaactcaggaagccattgctctaactcaggaagaaagctcccctcctcagtaagtgctgtggagcggtagctctctcccagagcttgctggtgggctctcacaggctcccagtgttcttagcctgtgagtccactccactcttggcaacccttcctgacagccactgaaagactacctttggcatctgtcaacacttaacctgggaggcagaggttgcagtgagccgacatcgcgccactgcattccagcctgagtgacagagcaagattccatctcacagggtggggggtggggaagcttgccatataaagaatactttctgcagggcctgtgcggagatccactgtcttgtggctgcctgagacatggcttctatttgtaagtccctattaaatgtttctttctgagaaactgaacttgtcatgaagtgggatttaaggaaccagagagaccagatggcgtgcaggagggtgtttattttaaggtgtacactggcccagcggacttgtgtcctaaaaggctgagcccaagaacaaagaaaatgagtcccttttaagcattttgaggcaggaactaagtgaagcaggcttacagaagtgagaacaaaaggctgctgtgacacttttggaacatgtcttacatctctgtgagaacttggtttgcagcttatgcttatctgtcttgtgaccttgcagctgtgcagggaagaaagaaacaggagtttacagagcctacaaaatatgtggaggatagatatggttaacgtttcttgggacagacagttaatattctcttctaactttaacttcaggggggctacttaaattcttttcagccttggttaatacagcaattcattctatgagctattgttatttctcttattattattacgtatgctattatttgttattttcttagtttcctacttcagtcaagccctttctttggcctctcatctccctcagcccttgggggtacattggcatagacctgctcactgcagaacaaggaaggaggaagcaggagaaaccaaacctgccataccgtgttcttgaacttctggcctccagtgagaaaatgaatttctggctgggcatgctgcctcacgcctgtaaccccagcactttgggaggctgaggcaggaggattgcttgagctcaggagttcaagagcagcctgggcaacatagtgagacccccgtctctacaaaaaaatattaaaaaattagccaggcaaggttgcaaacacctatagtcccagctactcgggaggctgagatggaggatcacttgagccttgggggtcgaggctgcgctccagcctgggcaacaatgagaccctgtctcaaaattttaaaaaataaataaataaataaatgcatttctatcgtttgagccgcccattttgttatggcagccctaggaaatgaatacaccctttaaccaattcttccacttctcttggattgcatccgtagctgccctgacacatccctatggcgggctggtctaaattagatgccacggtggtggggatggggtggctgtggggtgaatagaagtgtctgtggggacaaatgaacatctacttcttcctgggacagctggatggagtggagggactttagaaaccgttaacaggtcttagggaactggccctgcgtcccttctgaggctgctgtaaggggaaaagaaaaagtaggggcatgaaagcccttggcaagatgtgaagcgaggcagccttcgtgcatgcttggtcagttgtgtacctccagctagttagtgtgcaacagccctcacgcttcctctgcaacttctcccctgccatcagctgagctttcatgttctcagttcatgttctcggttcatgagtgttcatgttctcagttactcttggaatatggttcaattcagaaattcccaatgcactattaatgaacatagagagacggatatactattctaccaaaaaaaaaatctgcccttttaaaatccagggaatgtctggacatacacattcttaagtcaaaggaacatttttctagcatttgtgaaagaaggagtgaatgaatggaggttggaaggagtgcagtagttacaaagattggcttattttttatgggtctagcctggattttaaaaacctgagacaggataacaactccaagtgcctgtgggacttctgtaaaatggaaatattcataacacttaattagaagtactgtggtaaagatgacattcagagaaagcgtagtgttcagcgttctgtggacactcagaaagttagccactatcaccgaggcatggggtatggtgtttcagagccttggctctggagtgaaacagacctgtttcacactccactgtgccttttgggagtagtgtggccgcaggcagggaacgtaacttttttaacatcaggttccctatgtaaaatatcatgataaacatggtatcaacttcagagatttgttgaggattagttgaggtcacatataaaaaatatttaggacaatgtctgtccataataaaagctattactcttagaatcaagaatcatacatcctattctatcacttgcatgcaaccaatcaagactggggacagaattgacaatgtctcactacagttttctgtatttataattcaaggtgccaacatatgatttttgtttgtttgagggcctcagatgaaagaggggccaggaacattagtactggaactcacaggagtatgaattctatcatcccaagagaggggataaccagagatctagaaagcacagaagatcaggcagagacagtagaaaggcctaaacttgatttcaagaaccgactctcaaaagagtgagtataaaaccagtgtatacaccaagtacagtcatgtgttgctgaatgatggggatacaatgtgtcattgagtgacttcatcattgttgggaaccttacagactatattacctaaaactaggcagtatagcttgctctacatctaggctatatggtataacctattgctcctaggttacaaacctgttcagcagtttactgtactgaatactataggcaattgtaacacaatggtaaatatttgtgtacataaacatagataagttacagtaaaaatatggtataaaaggtaagaaatggtacacctctgtaagacacttatgtgtggagcttatagaattagaagctacggccaggtgcagtggctcacgcctgtaatcccagcactttgggaggccgaggcgggtggatcatgaggtcaggagttcgaaaccagcctggacaacatggcaaaaccccgtctctactaaaaatacaaaaattagccaggcatggtggcatgtgcctgtaatcccagctactcaggaggctggggcaggagaatcacttgaacctgggaggcagaggttgcagtgagccgagatcgtgccactgcactccagcctgggtgacagagcaagattcggtctcaaaaaaaaaaaaaaaaattaaaagttgctctgggtgagtcagtgggtgagtggtgagtgattgtgcaggcctaggacattgctgtgcactactgtagactttataaacactgtatcattagggcacactgaacttatgaaaaaattttctttcttcaataataaattaaccttagcttactttaacttttaaactttatacatttttaaataaaaaaaattttgactcttttataataacacgtagcttaaaacacattatacagctgtacaaaaatgttttctttgtatccttattctatagcttttttcttcttcttcttttttttttttttgagacaggatctcgctctcttgcccaggctggagagcagtggcacaatcttggctcacggcaacctctgcctccccacctcagcctcctgagtagctggaactacaggcatgtgtcaccatgccagctaagttttgtatattttgtagagacagggtctcaccatgttgctcaggcttatctgttttttttttctatttaaaaaaatttttaaacttttttgttaaaactaagatacaggctgggtatggtggctcacacctgtaatcccagcactttgggaggccgaggcaggtggatcacctgaggtcaggagcttgagaccagcctgaccaacatggcaaaaccccgtctttattaaaaatacaaaaattagctgggcgtggtggcacatgcctgtaatctcagttacttgggaggctgaggcaggagaattgcttgaacccaggaggcagaggttgcagtgagctgagattgcgccattgccactatatatatatgtatatatatattatatatatacacatatatgtatgtatgtgtgtatgtgtgtatatgtgtgtgtatatatatacacacacatatataaattatatatattatattatatatattatattatatatgtgtgtgtatatatacacacgtgtatatatatacacacgtgagtatatatacacgtgcgtatatatacacatgaaatgtaacataacattttcttttttttttttgagttgctctgtctctcaggctggggtgcagtggcatgatgttggctcactgtaacctccacctcctggattcaagagattctcctgcctcagcctcctgagtagctgggactacaggcacacaccactatgcccagctaatttttgtggttttagtagagatggagtttcaccaagttggccaggctggtctcaaactcctgacctcaggtgatccacccgccttagcctcccaaaatgctgggattataggtgcgaagtactgcgcccagcctaacataacattttctaagtaacatttgggtcaaagaagaaatcaaaagaaaaaaattaaaatatatacaatatataaaaaaattgggtgatgataagaaagtacaattaagagaaagttttgtgaaagttgtcagaatcaaaacggagtcactaatgttaaagaaaccctgacaagcctgggtgcagtggctcacgcctgtaatctaaacactttgggtggccaaggtgggcgga

SEQ ID NO: 93391 - DNA, 13479 bp, Homo sapiens
tgtagggaaggaaaaaattttccttctacccctttggttcttggctggggccaccgaaacaaaagtcagattaacaagagaaaaatagaagtttagtaacatgtgcatctcatgcatacatgagagaaattcagaaagcaactcaaagaggtggctagaacttgggcttaaatgccttccgctaaagcaaaggaagaagcatgtcggggagcaacttacagggggatgaccaggaaaagtacagtaaacaagggaaagctttctcatgcagatttaagtcagtaccttctccgctgataagggtttcttttgatttagagtcacctttctctttctggtgaagaaagggagacatccttacaaatgaagatttcccttataaacgcaaatgtcccttacaaaacagcaacgtgcactctattttcagagtttgtcttgtgtatactgcttctcaaaataagcagttcaaaataatattcataataaagaagcatattttggggtggcatattctggtctcctatagtagattctcacaaatacctcatttaagtaactctttaaaacttgcttttattaaagggttagcagatggttgttcaaaatagtataggaggaaagtagatttaagggcaattagtaatagctttgtgttgtttctctggctttcccggtggtccaccccttatttggatagctgcatattgactctccttaggtatctacccttcctcttttgtgtgtagtattggtgaggctgtccactaaggtctgcagtcccctctactgagccaagcgatggttatgagatccaagctagcctaactgaagtctcataggaaacaagaatatgtcaccccaaaatatgcctccaggttgaaagtcctgtcaattagcatttttgctgctctgcatccttactggctttgatgatgtcagttttcactgcattttagtcattcatgtaggtgtgtagtattatcccattgttttaatttgcaattttctaatgacagattgaagggattcacagcccaccaatatggcaaaactgcccttgcagagttatggagtgttgcaagccaggctctaggcagaattgcacattaatcatagcatgctggtacacttcaacccacttccctgtagcttctaatttcccaagtagcatgctgaccacctactccccgattgttcctataggtagaatctccgatactagaatcatgaaatctttttgcttaagaattgcttaaggtgtttttctgatcctgaattccagtgcaacagctaatgctaaccagtctaaagacccctaccaaggaactagcttggcacatgaatgctgagtttcttcatgtccctgtcccatgacttcacctctcacttcttgatgaatcagaaatgctcacattttggcccttgtccagactccttaaaaaccctatcyccaaacccaaaaccaaattgtaggttacctcccatctactcatttggctgccctatgaaaattaaactctctctttttcaatccctgttttcttaatatatccatttgttgtgcatcaagtaacaaatctgttatgatgatagtggcatgaaaattattttaaactgaaaatgtctgaacagacagaagctgcagaaagaaacactatttaaacttaaccagagcctcttgaaaattcagctgccattgatccccttcaaaggtattttcctgtttgaaacgagacagccccttagcaccgggatgtgtaaattagcttccataaacccccatacagggaaacttccagccaggaagaaatcaatctacccatttctattagcatcagaaagcttactagaaccttccatattttccttttgaagccccaacaaaaatcttttattttttattttattttatttttgagacagactttcactcttgttgcccaggctggagtgcagtggcgcaaccttgtctcactgcaacctccgcctgccaggttcaagagattctcctgcctcggcctcccgagtagctgggattacaggtgcccaccaccatgcctgactacattttgtatttttagtagagacggggttttaccatgttggccaggatggtctcaaactcctgacctcaggtgatctgcccacattggcctcccaaagtgctgggattacaggtgtgagccaccatgcccggccaaatctttttttaaaaaatagagatgggggtcttgctatgctgttggtttcaaactccatgcctcaagtgatcctcctgcctcagtctcccagaatgttaggattacaggcatgagccactgcacttggccaaaaacactttttttaaagttggtatataactttacctctggctattcagcaagttactcattatgtaatactcctgtgtgcatgtgtaartaaactttgaattttctcctgttaatctttttctaattcacaagctcctttaccaccatctttaaaacctaaaatgatagaggaaaagtttttctccaaacaatgtgatgctgaacatcttttcattgctcatctgccatctgtatatcttgtttggtgaagtgttggggtacagagaatcatactacaaactatgatgcatggcattctgagcacttttgaattaaagaaattaaattaaagaattaaatttaactagaattaaagaattaaagaaaccaaaacttcttagaagctgcctcaggaccaaagatgttctaatcttctctcattcctcccccagctctcaaatgcagagaggagctctctctggaagttcccttgtctggataaggaaaacttcttccaagaaatgcaattgtcttaagacccccctttctaaaaatctcatcagataaccaggaaatattagccacctgaaaaaaagaagagactagaagtctcttcacaccacactcagatagacctttcatctattcttccaagagcagctccaaaagagtacctaagagactttatctgtataataaggcaacctttgatcatagtgcagttccacccttcaccttcccataactcgtcacccttccattcagcttccaaagagactcatttacaaactattgtctgctatttggggccagttccctaaaaaatatttaaaactcctcaaaattgcctccattttccccatgttcctctcccctatgaagagaatacatgaatttcaactatttagtctttctttgagtctcataatttgtatggttcccatgattatgcacagtaataaatttgtatgcctttttctcctgttaatctgtctattgtcagttcatttcagaagttttgaaccttcagagggagaggaaaaattgtctttgccccataccattcagatgttttgcccatttttcaactaggttgttggttttcttatggttgaggttttttgagttctttgtatattttggataatgttcttttatcagatatatcttttgcaaatatcttctctcagtctctggcttatctttttattctcttaatagtatctgttgcagagcagaagttttcaattttaatgaagttccacttatcaatatttttctttcatggattgtgcttttggtattatatctaaaaaatcattgccaaactcaaggctgcctagattttcttctatgttattttctagaatttttgtagttttgtattttgcattaggtctatggtccattttgaattaacatttgtgccaggcgcggtggctcacgcctgtaatcccagcactttgggaggccgaggtgggtggatcacctgaggtcaggagttcgaggccagcctcaccaacatggtgaaaccctgtctctactaaaaatacaaaattagctgggtgtagtggtgcatgcctgtaatcccaactactccggaggctgaggcaggagaatcacttgaacctgagcggcagaggttgtggtgagctaagatcatgccattgcactccagcctgggcaacaaaagcgaaactccatctcaaaaaaaaattgtgaaagatataaagtacaggtctatgaaaatgtatgaagtctaacctatgaaaagatttattttttgcatgtgtacattcagttctactaccatttgttgaaaagactaacttttctcaattgaaaattgatcctttgtcacagattagttcactgtatttgtgtgggtctacctctgggctttctacttggttccattgacctatttgtctatttttcaccaataacacactgtcttaattgctgtagctttatagtaagttttgaagttgggtcacgtcagttttctgactttgttcttctttttctgcattgtgttgactattctgaatcttttttttttttgagacagagtctcgctctgtcacccaggctggagtgcagtggtgcgatctcggctcactgcaagctccacctcccgggttcaagcgattctcgtgcctcagcctcccaagtagctggtactataggcgcccgccaccaggcctggctaattttttgtatttttagtagaaacggggtttcactgtgttagccaggatggtcttgatctcttgacctcgtgatcagcctgcctcggcctcccaaagtgctgggattacaggcgtgagccaccgtgtccaacctgaatcttttacttttatataaacttcagagtcagtttgtcactatccacaaaataatgtgctgggatattgattgagattgtgctgaatctatagatcaagttgagaggaaatgacatcttaacatattgagtattcctactcatgtacatggaatatctgtgcttcctcaatttctttcattagagttttaaatttttcctcataccaatttttacataatgtattagatttacacctaagtatttcactttctttggtgcaatataaatggtattgtgttttaaatatcaaattgcaattgttcattgctggtatataagaaagcaactgacttttgtatattaaccttgtatcctgcaaccttgctataaacagacattatgtttattctgcagacatttggagccataaaagcatggggcaagagtgttgtactattatatcttgttcaaaaaaagactaatctggaagtaatatgtagaatggattggaaggagaaaaaaacaaggcaaggagtccatgtgggaggcttttatgtgagccctccataagacaatgagtttctgaataagggtgttgcagtaccagtgaaaaggtaagaacagattcaagaggcaaatatcctaaattcggccttcttcttcaggcttacaggtcttttcatacacaattctgtctttgggaggcgcttaacactctcttcacctaacttctaattattcctcaaaattcagttcaggtgttgtgccctccaacaatccttcccctctactatcttcccgtagcctcctgcagtgtcctccatcacactgtaagtgctatttatattaatataatctacttgtctatatacttacctgcctgtctctaatctctttcattaaatcatgagctcctggcagatcacgaggtcaggagatagagaccatcctggctaacacagtgaaaccccgtctctactaaaaatacaaaaaaattagctgggcgtgatggcaggcacctgtagtcccagctactcgggaggctgaggcaggagaatggcatgaacccaggaggtggagcttgcagtgagcaaagatcgcaccactgcactccagcctgggcgacagagcaagactccgtctcaaaaaaaaaaaaaaaaaaaattcatgagctcctgaatttgtgtagcctagtacctggcccaataagtatatgcataaatgaataatgtattcacatctgttgtaggaacttacaacattaccaagtatgtggcaggcattatatcatatttatgtgacatattttctcttaagaaacaggaatcataaagcttcaaaaaaaaaacactgaagcctcagatgaggcaggaagcactcattccatatcaggaagtgatcagttcctcaaaactgtgagttttcagtcatgttgtttctttaagttggtttagccttcctgtatacatgtgataatgatactgttttaaagaacaggtgtgaaagtctaagagtttaatccagactctgcacaagaagttaatctgccaaaccctaggattctccttctgaaagctcagaatatttcttccccttccctatacacacagggctcgaagggttagagaagaaaggcagacaacagcttctgagctttggactaatcacagcctctgttctcagcaggagccccaacactgagaccaggtaagaaagaaagcctcagggctggagcgagtagagcagtaaagacggctgggaggtagtggtcagatagagggtaaatatttcaggagggaagagggaagaaactttctgatatgacagccatcaaatgcatgagtacttgtgaaagaaaatgggataygccaatcaaaggagaggtcatatttctgtttcctgggcttcaggttcttcatagaattgtgagactatgtgagaaagaagattttaaagggagctgtaaaatcttaaaaggcaaaataaaaatctaaatagttatgattaaaaattttgctcttattgcttctcctactataactatcttctctctttctacacagaaaagatggtgctatgctttcctcttcttttactgctgctggttctatggggaccagtgtgtccacttcatgcttggcctaagcgtctcaccaaggctcactggtttgaaattcagcatatacagccaagtcctctccaatgcaacagggcaatgagtggcatcaacaattatacccagcactgtaagcatcaaaatacctttctgcatgactctttccagaaygtggctgctgtctgtgatttgctcagcattgtctgcaaaaatcgtcrgcacaactgccaccagagctcaaagcctgtcaacatgactgactgcagactcacttcaggaaagtatccccagtgccgctatagtgcygctgcccagtacaaattcttcattgttgcctgtgacccccctcagaagagcgatcccccctacaagttggttcctgtacacttagatagtattctstaaggcatccactgcatttcctttcatttgacatagcttctgttacaattgcatccacgttttcttttcttttgttgattttcttgttcccgtagaagaaagaagaaaggtgtttggagaattcgagtgcctaggatgccagaccagagttgagacaaaaagaaataagattattttctgctttgtagttctgtacttttcgagagaagggaatagggaagacagcaaagaaagattcagatttctaaccctgcaacttttgccaagctttattgccctgtgttcacagcaataaaaccacttcctgctgcattctaatgagtgtgtgtttgagatccgctttcaaagcattgttgaccggtactcaraggaacactgttttgactttaagtccctagaaaacttttgaggcctccctggggccccacttccttgcccacaagaaaggacagcgtttgggactttggagcatttcttcaaactctgctcatgactttatatattcccctggaaaccattgtctatgcttaattggaggtagtactgatacctcaaagacagttgatgataactcacacatagattctgtcactggcaactgaaggatcctatgtcttttctatttgtttccgtttttaatcagataatgttttaaatataaggtgatagtagtagtaatagggataataatccattgtagtaaccttagggtcaatcctccattatttattgaaatggataaatagaaagcatagatcaagaaaaaagcactaggcttgtcgtggtggctcacgcctgtaatcccagcactttaggaggctgaggcaggtggatcgtctgaggtcaggagttcaagaccagcctggccaacatggtgaaacgctatctctactaaagatacaaaaaaagtagctgggcgtggtggcagtgcctgtaatcccagctactcgggaggctgaggcaggagaatcgcttgaacccaggaggtagaagttgcagtgagcaaatattgtgtcactgcactccagcctgggcaacagagtgagactcccatctcaaaaacaaaaaaagaaaaagagaaaagcaccaggagacccaatgcagtggctcacaccagtaatcccagcactttgggaggccgaggcaggcagacgacttgaggccaagagtttgagaccagcctggccaatgtggtgaaaccccatctctactaaaaatacaaaaaattagccagacatgatggcaggagcctgtaatcccagctaatcaggagcctgaggcaagagaatcgcttgaacctgggaggcagaggctgtagtgagccgagattgcaccactgcactccagcctgggtgacagagcgaaactcccgtctcaaaaaaaaaaaaaaaaaaaggaaagaaagaaagagaaaaaagcactaggaaactaaaaacattctagtcctatgtaaatactgaaataccacagaagtattggggttttggaacagaacctgaactaagccatttcacagaaggaacttcagtttccttgtcaacctctagagtcattgggctagtgggccagtgtaaatcccaagtgctttgtacagtgatgagtcttcaagtagcagccaaagacaatgaagtttttttgaaaaggctacatattgtagtgtcttcattacctgtgctgcaaatgattctttccaagccagactattagtttaatagatatgctaactcagctcaccttcctttacgctacacatttatgtcatatcttaggaacaaagaatggaatatgaggtttcaggagcctggattccagggtgatgactgatcaagggccctcccattgggaagagattagcaggtcagggcaatatggcacctaagaaggtgggtaccttatagagggaatcctacagtgggacttgagtgctctaactcaaagcagctttcagttgtattcagctttaagccatgttgcatttacattttattgtctcagagtcttcatgtaaagtgtggtggaatggcagggagaatctgtgctcacgtttggtatgaacaagtatacgaaagtagcagcatctgaaaggaaaggggttgaatggatttatatgaacattacctggaaattgccagagattcttaaaggtaatctagtaaaaccaaacaactcaattgctcatgctattgttatttatatagtaaaggtatctcatggattgaatacatctgtgctgcaaaaatttttcaactgtcagaaacattagggaacatgaaatgttacttaaaattagtgaaataaattgtgaggtctaaaatactgcaaatattttgtaacaaatggttaaaaacaaaaatataatgagtgccatcttttgaagagatttgcagcaacaatatctaatcttccccaccctcccatgacaaacctatccccaacaacaattagagtcactttttgttgctgatcaaggaaaaggcaacaatgagggtaacttttcaacaatctattatgcccaaacttttagaaggtattagttctaaacaagtggaatagactgggatggaatctctcatagatttattttcttttctacatgcagttatgtattgcagaagttcaatacataattgctaagaagttcacttagatatatccctagaatatacagaatgatcccaaagcaggcaaagcttagaagtgaattcagcagatgttctagcagctctcaactctggcttcatattagattcacctgggagcttttagaaaaataccaatgacgggatctactaaataaattttatgaacatttaatgaacaattaaatgaatatctgggggtgagacctgggctctaatggatgtttgttaaagatccccatgtaattgtaatgggcagcaaatattggtaacaactgttgatgcaggggtaagcaaactacatctgcagacctctggcctgccgcgcctattttatactgcctggagtagtgtggtttttacttttatttttttttttgagatggagtttggctctgccgcccaggctggagtgcaatggctggatctcggctcactgcaacctccacctcctggattcaagcgattctcctgcctcagccgcctgagtagctgggattacccgccaccacgcccagctaatttgtttgtttgtttgtttgtttgtttgtttgtttgttttttgagacggagtctcattctgtcgcccaggttggagtgcagtggcgcgatctcagttcactgcaagctctgcctgccgggttcacgccattctcctgcctcagcctcccgagtatctgggactacaggcgcccgccaccacgcccggctaattttctgtatttttagtagagacggggtttcaccgtggtcttgatctcctgacttcgtgatccacccgcctcggcctcccaaagtgctgggattacaggcgtgagccaccgtgcttggccgatttttacttttttagggggagaagaaaaaggaggaggaagaggagggggggaagaacaggaagaaggaaggagtagagacgtgagggaggggaaggaaggggaagaagaggaagaagaaggagaggaagtgacacagaccctatgtgttccacaaaagtgaaatatttactgtctggtcctttatagaacaaagtgtgttgattcctggtcttctagactattcaatggatcttgtcctttggctgtggctgaggcaggtggctggaattcagtaggaaggacgacacctggcaggctgagaattttgaactggggcctcaggaaagtaatgatttttttttttttttttttttttttttttttttttgagacggagtctcgctctgtcgcccaggctggagtgcagtggcgcgatctgggctcactgcaagctccgcctcccgggttcccgccattctcctgcctcagcctccccagtagctgggactacaggcgcccgccaccacgcccggctaattttttgtatttttagtagggaccgggtttcaccatgttggccaggatcgtctcgatctcctgacctcgtgatccgcccgcctcgaccttccaaagtgctgggattccaggagtgagccaccgcgcccgaccgtaatgaattcttaatattcctttctgtgccctgtttcagtctttttctgcaatgtactcatttcctctgcttttctttttcacacagtaagtagacagtcatccctttccatctcactttctaattttctctgaaatattatttatttttgaagggattctgactgatcccatccatagatcagacatgaccatcggacagaatcacattgcaaaaaatagcttccaggagcctttcttgtggaccatgcagaagagaggcttagagagaactgcccttaaggctggccaaatggggtctctggcctcgcctgttcctcaggcaccccgttgcatcttggaatacccttctcaacattttctaagtctctcatcagtggctgcagtcagcccaggctggtagtgcctggcctgagatccgcatgggatcctattctctttctctcctttggggctttctcccaccctcaacccttccttccagcacaggaagccctaaggagcttcaggactcatgtctgtagtgttgtcttggggccaggactggttccaggtgagttagccctggttagagatgtcatagttcccagagaaaaggggctagatagacaattcaatactttttctttaaccacacagtgtggaaacagaaattgaataacaatgtactcttgaggaatagaggaaagtttattttaagacaggaggatgtgggaccagtaaaaacattaaaccacttttacagctgtacttagtgagttaggtggatattttaattaatttcgtctgaaaagaaattatacaatctaaaactgattttattgattcttttgatactgtgaatatttcttcaagtcatctttttaatttgtaaagttatttttgaaaatgccattttatctagacagtgctaataaaaacaagaaagtgtttgtccacatttgagtcaagattgcaaaaaaccccacaaaaacccaggtgtagggatggcaatagcaagccaaagagcttcgcaaggaggagaagcagaagctcgtggggatgggaagtctttgggggctcttcatacttgatggatttcgtcaagtttttcccttgctctctctcatgagttcacttcatttttaatgggattatttacttttcaaaaattaaacaatccagataaatacaatatactagtggcatgcaaaagaaataaatattaagtgtttcatttgcttaaaattttaaaataaataaaatataaaaacattggggtccattttattcctttctggtaattcttcttaactcttctcagccgggcgcggtggctcacgcctgtaatcccagcactttgggaggccgaggcgggtagatcatgaggtcaggagatcgagaccatcctggctaacacggtgaaaccccgtctctactaaaaatacaaaaaataagccaggtgtgatggcgggcgcctgtattcccagctactcgggaggctgaggcaggagaatggcgtgaacccgggaggcggagcttgcagtgagccgagatcgcgccactgcactccagcctgggcgacagaacgagactccgtcgcaaaaaaaaaaaaacaataaaacaaaaaaaaactcttctcagatgaaatcatacatttggggtatattcagtcctttttttatactctttaagtataatacattcataagcaaaatatagtgtttcagtgtgcaattttaatacatttgtataaatactatcataaggtacgtatcattctgcaactagtttttttcacccaacagtgtttccaagactcatcaatattaaaatgtgtatttgttgttcctttatttttattgattcattattttcccctctgtattagtataccaccatttatttatctgtcttctggtggatatttaggatgtttccaaattttcactctaacaagcaatgttgcaatgagtatctttgtacatttctccgtgtgcacatgtggtaaattttcactaatatatgcccagatgtggaattgctaagccatattcatgtccaattttaccaaatattgccatattttcttcaaactagttgtggccaattgtattttccaaaatgtccacacagccaggcacagtggctcacacctgtaattccagcactttgggaggctgaggtgggcggatcacttgaggtcaggagtttgaga

SEQ ID NO: 93392 - DNA, 40769 bp, Homo sapiens
  misc_feature (1)...(40769): n = A,T,C or G
atcttgatgaggaaaagctttatcttgggaagcatctatcacaggtcaagtctatgcattgttaccagagtacaagtgtcttgtgtctcctagtaaggagaggcttccttctgccaggctggagagtttaggagaagccaggtattcatagttctcaaatgcatccatccagatgtcccaattccacgtctcagggtctcaatcattccctgttggtgacctaactttaacttaggagatttttcaaggctataggctcaaccttacctttactcctatagtctcagagaaccttagactctgggtctaattttcagcatagtcaaactatggttccaggagacacagctatctttaaaagctgctaggaggccttctgattttcacagtgtactctgtattgatagctgattaacagagactgccattttcttcaaggtttccaaggcagttaacaaaagacagccatcaccacaatacttgtaattacccttgcctctatacctagaggtgctagtgttaatgcacgcctcagtgcagcccactcctctgaaccacatcccagtccaccactgacagtcttagtaacaggatgctgtctgactaggggggagatccagtttcagaatctcactgagggtctgctgtctaggtctccttctcataccgactgacttggtttgtgtgcctgaaagcagagcctgaggcagggatttgggtaaaaaggtagattactcaggagcaagggtggaggggaggagggaaggtgagacgagggggtgttcctgagactgatgctgtgagcaatgggagccccacttcctaggactttcatgcagcacacagaatacctcagagctccctcagctctcatgacccttctgttgagggttcctcctgggggactccatctgtcctgtaattctggtctcacttgagcaaagacagaagggacatttctgccctggggcagaaaatagaaagccagggcccaaccatgcttcaggtggtatgctgtcagtgcaaggggaggctgggcctgcacactactgtccactgcagccatggcttaaatccgaggtgggctgaagttttgtgacctgcatgagagatcacatggtccttgtcttagtcatcgtcatcattatcattgggtataccacctatagaacaagggcagggtattgtaaataatagagtcatcaaaaagtgcatgggcaggaagaggagaatgattctagagaggaggcctgcatggaagaagtggtttttcatggaatctttaagacaatctttaggatttcattgggtaaagaagtcacctaagtgtggtggcccatgcctggccacacccctgtaatcccagagctttgggaggcagaagctggtggatcacttgagaccaggagttggagaccagcctgggaaacatagtgagactccatctctacaaaaatttaaaaaaaattagccaggtgtggtggtgtgcacctgtagtcctagctacttgggagactgaagtgggaggatcgcttgagcccaggagtttgtcatgccactgtgctcaagcctgggtgacagagagacactgtctcaaaaagaaaaaagaaaagaaaagaattcaaggcaaaacactccaggggaggaaaacataataaacactggatatagtgatgggggtgcagtgatgagatgcaggagtggaggtacagtgatggggtgcagtgatgagatacagagatgggatgcagtgatagggtgcagtcatgggcttgcagggatgggagatagtggcctgcagaggtggggtacagtgatgaagtatattggtgagagttcagtggtagggcgcagtaatgggggtacagtgatgtagtacaatggtggggttgcagtgatggaatgcagtgatgcagtgcagtggtggggtgcagtggtggaggtgcagtggtgaggtacactgttaggggtacagtggtagggtgcagtgatggggtgcagtgatggagtgcagcaatggactatagaaatggggagcattggtggagtgcagtggtggggtgcagtgatggggtagcagtggaggtgcaatggtggggtgcagtggtggggtgcagtggtagggtacagcgatgggataatgatggaggtgcagtgatggggtgcagtgatgtgggtgcagtgatggggtgcagcaatggggtgcagtgatggggtgaagtggtgggatacagtgatggggtgcagcaatgggctgtagaaatggggtgcagtgatggggtgcagtgggaggtgcagtgatggggtgcagtggtagggtgcagtgatggtggttaaatggtgggggtgcagtggtgggatgcagtgatggaggtagtggtgggggtgcagtgatgggtgtagtgatggagtgcagtggtagggtacagcgatgggttaatggtggaggtgcagtgatggggttcagtggtgagatgcagtggtggtgtgcagtggtgggggtgcagtcatggggtgctgcaatggggtgtagtgatgggtgcagtggtgggatgcagagatgaggtgcagcaatgggctgtagaaatggggtgcagtggtggggtgcagtgatggggtgcagtggtgggggtagtggtgggggtacagtgatggggtagcagtggggttgcaatgaggcattagtttggaattgtagaatggagccagatgagaaaagatttgaaggtcaagttaaaatgtttgggtttaatatgaatgtgagaggtgtttggagaaacaggttatgagatggaagctctaaggcttcccagctgtgggtccatgtgtggtctgtggggcattgcccggtgacctgattccagcaccagagcaccactcctttgttttgtccacctacaggctggtttccaccctgaggcagctgccattgctcttgtaccttcaaggttcctttagcctccctttatgagaattcaaaagtgggctttgatttttaccacctatcagcaggggtagattaacctatgttttaagccaagctgcttaaagaacaagcccttagccctcatcttggttttctccctcagggtttcagcagagcaatctgggagaacagggagagcctatcaaaggtctgtgtctcccaggggccatccaggccactggcctgtgctactaatggggacatcaaggtccaaggaggtgatgtcaagtggttattcagctttctagaagattgagtaatttttcatggcccaataactgcagaagccagcacatcctcccagatctttctattgccgctcctttcctactccctcctccccgaattgcaaagcctgcagctcgagggcaggaaacctgggctttagttccagctgttctgcttctcagctttgtgatattggaccagtaatcctaccttgcaaaatatcagtttcctcatctacaaaatgagactaatcacattaaattaggtaatagatgcaaataaagcatttagcccagggtctggtacctgtaaggcatcctataaatgaagtctagaggcattgattccttacattatcagtgttcctcacagagtaggtcctgtgcattaggggcctgcgacagaagtggtacctagagagaacagcaaatagaagacatttcattaggaaaccatttcctctatagttctctttgcattctgattttgtggaagagtaagactttggtggtattatagcatgtcatatatatatatatatacacacacacacatacatatatatacacacacacatatatatatatacacacacacacatatgtatacatgtaatgcttgttaatttccatttttagcaaggagaattcttcgcctctctggttaatgatagacaattacatctaactcaatctggtaaagtcctattcagtaatttaaacagtttctttagatagcataatcacttcaaataaatccatagcctctcatatttgctccccaccccacccgcactccttgccaagatggtgtctggctgtgtgagttatgggatgctaataggaccacatgagtgggagggcagagggagcttggacccacttgcagaagtccttgcgttgttgtggtctccacagcaatgtcccactgccggggttcctgggaggaggatgaattcttaagtggtgagctcatggtctgtcctctcatcttgatcaaagcccactgattccccctgactgactcagtgccctacctcaccctgcccagtgctcaacactgtgctccagcacaggccaggttgtggtttcactctgttctcgagtccatgaagcatctctgtagccccctgccttcctcctcctctagctcccagccaggttggtagtcacctccaagttttcttcgaagccacacggtgatgtctggatcaatttcaaggaatttgggatccaagggaaataggaccaccccctgagatctctcttagcccaaccacttctgctctgctgtggctgccccaggttggttgagatgtggaacccttctgtcactatcctcctggagaacccttcactacttagcacacatttcatccttagcacacatttcagcccatcactgcaccccatcactttacctcatcgctgtatccctttaggacctatgtctaagagggggagtcagggcactttgcatcacacatgctttccctacctctgttcccttctcctttccaaaatccactgtacagaaaggccggattttcctgtttgtcttactttggggatcttctccaccatacaccaccctttcgttgtaatggttgctagaggcaaagggaatgttttgtggtatagaaatgcaacatatattggcttgctcttcccaaaagctctttcttattgcactaggtagatacaattttctttaataacagcttttaaaaaatgtcaatttaaagaaaaaaaatcaagtaaattgatagtcaatttggtagtgggaatggtacaaattgtgaagacagaaggtctagggctgagctttgggaagccacagggcacaagtaagaagctgtgatgaatatgtacatggaaaagtcctaggtgtactccaaggaggaagacagtcatggctacaatttgttagaaaataagagaggttggaaaagcaaagcactaaaaagttcaggagaatcaggggaaggttctcggaagaggtggcagttaaattggattttaaagaagaagctggagaagaaagacatccaaaatgggggtggtggtgttggcaacaagctagtttgtgtgaagtgctttaaaacagttgggtgagcagtggtgtacagacttgataatatttctggtcagatgaagggacagatttgaaggccagggagaatcttttcggtggcaactatgaagggccagaggggaaataatataatcgaagaagcctcaaggttgccaaggaggctgtagaccaaatggccattgaagactcttgttggcagggccagccgggctgcttgtctgagctggcagtgcttgtgccttcagagccactcgcttgtcccagcagcaatcttcttcctcttctcagaaacttctcagcttctctgacctgcactgtgtctttctggcatcacaggcaggtctggaaacctcattcatccttgggtctctagaactcataatcttaaaatgtcttgcctggtctggaatgtcttttctgtttcccccatcccggaagtccaaagcctatcaaattatctttccccagctcaatagttaatcatcagcttcttatgtaaatcagaacaggaaagtcttgcttagtcaattcctttgagaatattgttctgatgctgttcttcagtaactctgctgcctctgcctgcctattcagcatttgcctgttaacaggaagctctttctggctcccaactgaagctctctgaggccagcagccgccgtcgatgttcacagagtgcaggcaggcagccaaatgagtgggaattgggtgcacccaggccagatcctaatttgggctatctgggtccttgcagcccccaccaaaggtgagatatccaatgggaaaggagggctctcagaagatggggtgggtgaggattttccactggtagaaatgaagttattcttcagaggtctctgagggccagtggagagctatgtagtactttgatggcatcagtattctgctgttgccgagaacctaggaccagagcttccttcttgggagtgggtagcgcacagaagatcctggttctgcctttgggttgctcacaccctgcaaggggtttagaggggctccatcctgagcactggagaagcgtgaggaacagagcctgtgcttctgcactcctggctgcggcgacaggactttcagtaatgaaatgacattagaaacagtgctaagacacccgggttttgctaagtaagtagctgggcagtttccttcccaaggctccacgttctgtgtggtgactgagacccctgcatgcccagtctcccaaagtgccatctttatgctcctggaagtagacgagttgatttcaggaagtatctgcatgagaattttaaattttcacccatgaatattcatgtgtattcaaaagcatatacctaactcaccaaaatcacaattccataaatgtcattacttggaattcttctaggtaaaattttaaaaggagtttattggaattaaattttaagaaaaaaaaaaaagaagccagcaatcatgcaggtgctgcacagatatgccagcagtggtgctggagggtgtggagtgacagaagtgtaggaacccctgggaagatgagtttgtggcatcccaggatctacagagttcggtatatgtcaatcctgtagaaagaaagcgctctcagcagaagggagatgggtttctgagtgaatgggggaaaattttgttgctaggtactgctgggctcctaggagaaactaagtcagtggtttcatgggggtgacttctacagcaatcttggaaaaagccatggaactggattcatggagagggaacctggataccaccagctgcacaacttctgagtgaaggaagcacatccccactggggagctccagactgggtgggccattgccctgcctgtccccagcctgctcctgattcctcccatgtgttcccgcagggccttctgctgaagggccacagaggaacaccaggctgggatggattcagggcaagcaagtcactgtgctgggaagccctgtgcctgtgaacgtgttcctcggagtcccctttgctgctcccccgctgggatccctgcratttacgaacccgcagcctgcatcgccctgggataacttgcgagaagccacctcctaccctaatttgtaagaccaggttcgggcccacrggtggtttgtgactctgggagtggcaggaattcaggtcatgcagcccagtgtgaaagaagagggattggcatggatgggggaggagggagagagagggcttgagactcgggcgagtggtttrgtaatcccctgactcctaaactggctgatggccaggtcactggaggcatctttaaaaatatacagattctccaagctcccttctgaactttctgaatcagaatatcccgagctgagcccaggaaactattatctgaacgctttttagagactctgatcaccagccagttttttttagaagtgctgaaatgggcgtactgagtcctttggtcagaagggactgtctaggtatcttcttgtgacctctcacccaagcctggctctatggtcagactgggtgagggttttattgagaagaaccacactagaagggtgttagctccagctgtcaaaacggtgcctgatgcaatacctagtccatggtgaactccataaatacccgtggaatgaacatgtggatgtgtctctgtgacgcagggactctgggaggtaaggagctcctggtcactgcagatttccaagctcggttaggtaaccagttaccaggttaattgtggaggggtgaggtgagacttactgggtgggcagtgagacttgaaaatcccctagaatcttccaactctttagattctgtcaagctctcaggttgggccacatgggttcctggcagaagaaattctggtgccaggatattccctaagccacagaagatgaccccatgtggtccaaggactgaggacatcaagctgaaactcatttgtttgtgcgttcattcattcatccaactaatattcattgcgaaccaacttgataactggctctccattaagcttggggacgccgcaggggttgagtcacagctgtcatcatggagcatggagaggggtgatggtggcaggaacgtaaacagtaattgacagctaaaatataagatggcaagggcaaccattagggtgtcagggaagggtgctgaggggaaacaaagacccacctggactagctttgatgggaggtcagagacggctttgctgaaagcgctgaggcctgatcaacaacatacaaaggggcaaggaggcataaacacctgtcaggagaagacgtgcagcaatattgcacactattctattaagaattgattgcgtacacagtatggtagaagcattcacatttacakccttgcttaatcttacggtgtatcatgctctgtgctggtgctctgaggtacagaggtgactaaaacagagtcttaggcttttagctgctcacagttgagctggggatgatgataatgcacacgcacaasctcaggacaagttctggaaaagaatgcaaagtaggtgggtgtttccgaagaagaggtatggtagaactggagaaatctcagaaggcttctgggaggaggtggcaagttggagtgactctaaaacaaagggaagaatgtgagcacgcagatacagggagagagcagtcgaggcaagggcccggcttgagcaaagcctgggtgcaggagtctccctgccagtctatcctgggtggttccaggtagagaggcctggaaatgttcctttgckcrtctggggacagaatagggagccgcrggggcaaagcccttgttattcgactatgtcctgccctctacagtttggggaattgttgggccagcttgggtcgttatgtgtgtctatattatggtggtggcataggagggtggtgtaggcatgggagggtggtgggggtaatggtgcaattattctacaccatgtgctttcctacccaggaaccagatcaatgagaattataatttgcttgcttgtttgttttggaaaccatgggggtttgggcatgattggactttgtaccggtagctgcctcttctgctcaggcagaggagacggccaggcctccccgctgtcagaagaactggcccttcccaggcaagtttgctgataactttttctgagggttttctcctctccttctccaaggtgcctccagaactcagagtggctgctcttagatcaacayatgctcaaggtgcattacccgaaattcggagtgtcagaagactgcctctacctgaacatctatgcgcctgcccacgccgatacaggctccaagctccccgtaaggctgcctgctgtgtgcttcgggctctagctagcaggaccttggcctgggatccaggcagtgcagctacatgtctggaattggaactaccccctgttgggtaaaagggaaatgtaatcacatcaacaatttttaaaaatcattcgaatgatagattcacatgatcagtttttctgattgattctttattggcagtgccttaacttttaatttttattttgttttgttttcccctctgttgcgtatttagtgacctgtaagctttcagaaaagacactgcttaaaaggaatctgacttttttcttaaatttgaggtatcttttttcaaaaagaataattttatcctccaacttttctgtttataatgaagacagtcaggtaatcatgttaagtgtttcatttaagaatataaaatatccccgtgtcagtaagtgggggaaaggcatgttctatgttttagccacaccctctcatcctcttctcttcctcatgcctctgccaggggaaactggctgtcttgtatcataacagtaatgtctattaaatgcttgctgtgtgccaggcacagtacatgatctgatttaactcccatgctaacccagtgggtaaggacgatttggacccattccacagatggagaagacgaggcacaggaagggcataagtgacttgctccatgttgtacacacagtaggcactagattctggcaccaaagccagaggtttgtccacctcccctttcctcagtggctttcttctctttacctgccccgaaggctgtaatctctaatatgaccttaagaaagagaatggaagggatttgttattaaatatataaataragataatgccatttgaatgttttatgttccctgatcccaatttttctaatcaataaaaattttactcttccctcttttttttgggacagagtcttgctctgttgcccaggctggagtgcagttgtgcaaacttggctcactgcgacctttgccatccgggctcaagggattcctgtgcctcagcctcccaagtagctgggattacaggtgcctgccaccatacctggctaattttttgtttagtagagacaggctttcaccatattgcccagggtggtcttgaactcctgagctcaggcaatccacccacgtcaacctcccaaaagtgttgggattacaggcgtgagccactgtgcctgacccttcctctttctcttccttctttcttcatttttcatcctttctcctcctcctcttcctccttcctccttctcccttcctcttcctctttcttcttctccttctcctctttttcttccccctcctcctctcacctcctccattcctcttttctcccctcccctcctctcttctttctgaaggtagagagcttttctctgaaacaccttgggctgcttttgctcttatacatggcttacaatggtttccatcttcccgtgggtcacaggctcactggtatttagtgaacaatttctgagcacttgaaacttgaaatgtgctattgctcattgttctatgagctttagatgcagaattttgtttaaacctcatgataacttcataagtgagatactttccttcttcacattttacagatgagaaaaatgagccttaggctaagtaatctttccaaggtcacacagctagtcagtggcagagctgggagtcaaatcgaggcactcaggtgccagagcccacatgcttaaccctgggccttcttcaaatgacaaaacctcgcaccctgcttagcaagtgggacatttatatttcaccttaagaacgtgtgcctcaaactgcatggggaggggaggtggtgcctggtgggctgactggatgctcttctcccctcctcaggtcttggtgtggttcccaggaggtgccttcaagactggctcagcctccatctttgatgggtccgccctggctgcctatgaggacgtgctggttgtggtcgtccagtaccggctaggaatatttggtttcttcacgtgagtctctccaaatgatggacatcccagatccccaaagggcagcagtgcagtagccatagacagtgcccagcaacctaagaaggagcgagccttccgggacaatgaacaaaactggccctaattacttaggtaatttttgcagctgtagcagataaatcccaaaatgttggtggcttgaaacaataaaaatctctttctcacttgggtaaartttaattgagcatccctgatcggcagacattcttcctcatggtcaaccagggatctggctcatcacatcttgagctctgatgtggattctttagggcctcgatcttctgcatttggtgggtggaccgagacagcatggaggatcatgcaatggagggtctcctggcccagcctgcaggtggcacttgtcacttctgttcactcgccattggcagaactcagtcacatggccacatccagctgcaagcgagctggggccatgtagccccactgtgtgccctggaagaacaggacactgtttgtgtragcagtcggtggtgtctacctgagcctcaccccaggkcttctcgaaygctcacctgagaatcatcactctatcacagtggcttccctcctccaatcasgcctaacatgtactgggctttcactgaaccagccatggggctgtgcacttgccatgcattatttcaactcaccctcaaaataatccttcaaggaaggttctctgttgttattctcatttcacagctggaaaatggaggcccagagaggccaaacaacttcccaggggtcacaaaacagagctaggtctcttgactgcttctattatcctgtctaagacatggcaggagaagtcctgatgagggtccaatgtaaacaaagaggagaagtgagaggtggggccaggattatgcttgcgggtcactgtcacatactatggtaaaggcagcaatgattcaaatatgaatcctgccttacagaggctcctgactatgggagagataatgcagggacaaaaatatccacattaccaagaaggacatggttaattctccaagagtgagaggccatggagctgtggaaacagaggagggagttgcaagggatcagggaggcttcagagaggggtgacattggagttgcaccagaaggatgtggttgggcttgaggagaaggggttcagagaacatgtgcttggcaaagggtgctacctgtgcaaaaactaggaagttgggagggaggtagcaacacatggggatgaagcaatacttttgcagactgcactgggcctgtagccctggaatgtagctctgggagtgctttgcaggcaggagaggctgacggggtgccctgaccagagtaattacacttctagctgctctatatattaggattctgcataagattcctttggtagaagagctttcaataattgcttatcgtatctggttttgatcataggtagatgaagctacagcaggagatggatgcgggaaggcaaggacaggcctgatagggaaaggccttgaatgccaggccatacatggagtttkggctttatccaacacagattgaggaccaggagtacctttcacagagtagtgtaccaggaacctcactctggagcagagtggaggctgagccaggggtgcccagctgcagatagggagccccactgggaggcactgtcttgatgcaggccatggggtcattcaaccacaaaagcaatagctaacatgtatataaygtgaatatgacatgcttattttctgcctggcactgtcaatcttcacaaccatgtggagtgggcactatcattatccccattttagacatgagaagcattgaggcaaagcaggttaagtgatttgcccaaggtcacccagataataagtggccaggctgtgaatcctgtgctcgaggctgagatagtaaccactaaggtataatgcttctcaggataaacagagatggagaaayggggaccagggtgggagccacagtagaatggaggtaaaattggcagggcttgactcttgagcaggggcctgggagagagaaggtggagtgagagccagctcagtggtcatagacagtggaggggacccaggggaaggagcagtctggagaactggaaaatggaggggagtagaatgtgccccagggtgacgtgcactgcatgcatgctttcggtctagacatttctttggttctatggcatttccacttgtttcatttgttctcycattaatcccatcccgggaaacatgcaattgtgcaggggcagcagcatgggggtgtgggatcccaaaactgcagctttctagctcttgggcaagrgggtttarcctctctgtgcctgaattaaagagttgatgtatccgttggtttcctgacagcaggctcacaggtttagtggaagggagctggcatgagctgctgctgtggagaaaagcagcctctgcccaaacacttcccagcagagagggagcacggggttgggggataaacatcgcagtctctctctagcccaccctcatggcacacagctgaggcctgggtgatgtcattcctagaggtcagcttttgaggggcagagcagagaagggtggagaagacccaaaaaagcaaagggagaaaacccagcaccacctacctcataggtgtgagggttgtaggagtattagccttaaagcccttagaacagtgtctggtacatgctgcagctgctgttattgttttttgtttgtttgtttatttttttatttttattttttttgagacagagcctcactctattgcccaggctggagtgcagtggcatgatctcagctcactgcaagctccgcctcccggggtcaagccattctcctgcctcagcctcccgaataactgggactacaggcgcctgccaccgtgtccagctaatttttttgkattttttttttttttttttttagcagagacrgagtttcacyatattagtcaggatggtctcgatctcctgacatcatgatctgcccrcctcggcctcccaaagtgctgggattacaggcatgagccaccgtgcctggcctgttaattgttattgtgactactattaatttagtttcatggaaaattctgtgcycaggaaacttcttgctttctagtacagatcacctctcaggaatggattcatggattccagacaagcctgggcaacacaggattcatggattgggattcatggattctgaggaacctgtgaatacttgaaattgcagctacaatattgaatgtgcatttttcttaggtgcatagctttcatcaaattctcaaagaaatccaaatctcagcaaagtgtgagaactgagtccggtttccccagctcctccaggcctctgactctccgccccmtccccactgacccctgcccacagcctctgctgagaacttccagggctgtgggaaacacaccatggctgaccaagaattctcaccctgcctcttgtcctcagcacatgggatcagcatgctccggggaactgggccttcaaggaccaggtggctgctctgtcctgggtccagaagaacatcgagttcttcggtggggaccccagctctgtgaccatctttggcgagtccgcgggagccataagtgtttctagtcttgtgagttctctgctttgtggtttgaatgaatctcagtgccggaggttccaaaaatgatgatgagtcactaacatttgattgttgccttcatgttgaacaaaccctttaatacacattgtctttttcaagcctcacaacacattatgagttaggggctcagtctcatttcacrtacaggacagctgtcactgggaaagtttaaataaatcacctaaggtcacatagtgagtaataatttgaggaaaaatcccttatatttgtagaggagaaaccctagtattcaattgccagaatggtaatcacttgtttaataggaaactcagctaagacatgaaatgccaaaagatacatgtaaatattttattttaatttaaaccataaaatgtatattccctcaccaacagtttgatacagggccttatgtttgcagagttggtctgctgactcgatttccaacatggattgtcttgcataaaccacctgcaaaattcactgtcctcaaattgcagtttcagtttctttacagtgggcgcaaacttaaagatgcctgcaaagcagtctgactttagsgcatttgggatttgtatacttttcctgcaaatattttactcctttcttgtccacacacaatttgacagcaatataaatagagagatgtttatctatatatctatatctatatctatatatttgtatagtgtattttatatatatacatacacacacatatatggtttttttgttttgttttgttttgagatggagtttcgcttttgttgcccaggctggagtgcaatggtgcaatctaggctcaccagaacctccgcctcctgggttcaaccaattctcttgcctcagcctcctgagtagctgggattacaggcatgtgccaccatgcccagctaattttgtatttttagtagagatggggtttctccatgttggtcaggctggtctcaaactcccgacttcaggtgatccgcccaccttgggttcccaaagtgctgggattacaggcgtgagccaccgtgtccggtgacagcaatattttttttgagacaagttctcactctgttgcccaggctggcaagcagtggggcgatcatagttcattgcagcccaaactcctggtcataggcaatcatcctgccttagcctcccaaggagctaggactacaggcatgcgccaccatgcccagctaattctttttttttattttttaaaatttttttagagatggggtctagctatattgcccaggatggtcttgaacttctgggctcaagtgatcctcttgctttggcttcccaaagtgctgggattacaggcgtgagccactatgcctggcctgacagcaatatttttttagccatcctttatcaagaattttttttycagacataatttgattttctttgtacacatacagttcatttgttctcatgatatttcattgattgtgtaattacaataacaagtgaaattgacaaaacaggtttggaagcaaacacacctgattcttggcaagaaactggtgagaagagaaatgtacagaggtgttagaaaatggtccactggctcagaatggtcagcatttccttggcatcagttggcaggttaattgcagaaatcagtaacatggtggtgagttaagagagcttctgctgaatagcacttgacaatatatgtggtctttttacatcttcaaaattaccttctaaggtggattatattaacctaacttttcatatattataacaaccattatttcatgagcaaaatttgaccagaacctctgtgaagagttctatgtttattacctcccctgctcctcacaacagttttgtgatacgggctaaatttttactccagttttacaggggagtgaaccgatacttagaaatattaagcaacttggctgggtgcggtggctcacgcctgtcatcccagcactttgggaggctgaggtgagtggtcaggagattgagactatcctggccaacatggtgaaatcccgtctctgctaaaaatacaaaaattagctgggcgtggtggtgcgcacctgtaatctcagctactctggaggctgaggcaggagaatcacttgaacctgggagtcggaggttgcagtgaggtgagatcacgccagtgcactccagcctggccacagagcgagactccatctcaaaaaaaaaaaaaagaaataaaaagaaataaaaaaatattaagcaacttgtccgaggttacctaggtagaaagtgaaggagctagaaatcacatgcctgaacatttgacatcaaagtccatgaagaaccaggggctcagagaggttgagtaacttgcccaaaccttcacagctagtcctttaacccctaaaccagggcttttttcccctctaagcttagagcttttaaggaggcttcctgggaaggtttctttgaagagggatgaatggtatgtgtgttggtggggagtaacctttcctgggtcttctgtgttctctctccagatactgtctcccatggccaaaggcttattccacaaagccatcatggagagtggggtggccatcatcccttacctgraggcccatgattatgagaagagtgaggacgtacgtatactgttaacaccttgccascttcctctcctcagttagcagagaatgtggtcaggcaccttctcaccatgtgtttggctttccttagtgaccatgcccaaggcacctcatgctggcccaaggtgaaccttgttcctccgtgaaaggtctggttcaacaggaaatgggtctagctacacaatgccacaccactggtgtgcacaagtgtgtgtgtatgtgcgttatggttcttatgtcttacccgttattctttgcttgtgatagataagtcagtcccctgtattctatacagttcttctgtgcctacgctactctactgggaatgaatacccagggcattatgttaagaaagattcagaggctgtttccagctcagtgggaaataatgctgtgactgattcangttgtctggcatgggattataaggggcatctatcccacgatatttgtcatctgtctcttgtcttaattatctactagatagtgatgccctagagaccaggatctctctgtccttcaggcccccagcataatacctggtatatatcaggcagccataaatgttccggatgaatgagttaatgaatgagctgtttcattcaatgcatattaattaagcactgggctgtgcagccatctcttgagtataaatcatttttgtggtaaattttcttaaacatcttacagaaaataacagtatataccaagagcagaaacatagagttatgcaatttaaaaaaattccctcaatacacagaaatattgattttggtaacattctccataaagctattttcagtttgggcatatatttattcatttgacacacatcactgagtgcccactattttccctgctctgttagaactttgggatttatcagtggagaaagcacatcctaaatttgagggcaatataatctttttatcacctatccatggataggattaaatcctgcaatccatggataggtttgggaagcggttccacaactgtaccagactccacatgcttgcacgttttcccagggagagggtctgtaactttgactggattctcagagtatccatgactcccagaagattaagaaccaccactttcagggagtgagttctacaaatatggaggttcagtgacaaggaaagcagatgttcagcaatgggccaggcatggaaggtggggaacatcgagcttataggagattrgatgaggaaggggtttctgggggctgcaatgccctgaaaggacatcgtggagggaaggagttgggccttaaagaatgaaaaggattggtatagaggcagggaaaaagacaggtaggacattccaggctgtgagtgggcctggkgcttgggcagggctgacaagctgagaatctgatctggagtcctgcctgtactgacaatgaaggagcttccaaagctgctcctcvctcttggtgtttgtcttcattcagcacctcaaggttgggcttctagactccagaggrgcaaaataccaatgcagccaagctcacaggactgatctctttgtgaccaggaatcttgattccattccacagccacagactgacaaactcccatctccagctgtggtgtttactaaagatgacaaggagagccaggcaagagactgagggtgatgcagtgggaaactgtccaccatgtgcaccttcaattataggggtgtgggtctaggcagtgttagcaggatggactcatatatggagggccagcctgtggctgattggagggcattttcaagctttcattttcctagatgctttcaatatcatgctctaacccggtccttctctacaaaatagctgcaggtggttgcacatttctgtggtaacaatgcgtcagactctgaggccctgctgaggtgcctgaggacaaaaccctccaaggagctgctgaccctcagccaggtgaggacagagggggcagttttgggggcaggcttgccmttcgaacggagagatgaacaaatcctacccctctgytatttatttgaatttggaacatagaaaagaggaggattgaggtacttggtaacagctgtaaaaaaataagtagggatatagaacccttgtaggtaatttaagaaaattgttggggcaggggttcaacttagcctggagaagattcagcaaagtacaaggcttgtctctaagtccctgaaagcatctcactggagagaaggaccacacttgttatgcatgcttccagaagctgaagtcaaaatcaggagctggaagttctattaggaagtcattttagttttgtgtaactgaaaaccttccaagacctcagttgtctggaaaaggactgggctcctttagaaggtagtgagatgcccacctctccaggtattcaagcaaaatctagctgactgctgacaaactttcaatcagtgacagttaattggaccgggtgatcttttatgtcccttccaatcttgagagcctttgatgacagtctttgaatggacaagatcattatctttcagatttcaatatttgctagttatgtggtgtgtactgaatgtccactctgagccatgctagactcagtgaaatggataataagtcctggacctgatgtgtcgaactcttccatgtgctcctttctacccaaatctcaaaacagaaacctaaagaaaccatgactagggctgagtgttgctttctgagacccaaaaaatatccaggcatgtccaaggcactgtgtctcagggagacacctacagtctcctacaacccctacagtcctgaccacttcatctaccaccatttttycctttgyatttggccagtggttctcaaacttaaacatgcatcaggatcacctggaggaccagctacaagaaggttcctgggctatacaccccaaccccagagtttcttattgaggagcctgaagtgggcctggaatgtgcatttataacaagttcccagatgatgctgatgctgctggtctaggaaccacactttgagaatctctgggctaggctatattagtctcttctcatgctgctaataaagacatacctgagactgggtaatttataaaggaaagaggtttaataaactcacagttccacatggctggggaggtctcacaatcatggtagagggtgaaggaagagcaaaggcacatcttacatggtggtgggcaaaaaaaaagcttgttcaggggagctcccctttataaaaccatcagatctcatgagatttattcactatcatgcaaatagcatgggaaagacctgcccccatgattcaattacctctcaccaggtccctgccacaacatgtgggaattatgggagctataatttgagatttgggtggggacacagccaaaccatataacaggccactgtttttcttggtagatattattattattcccatttagcagatgagaaaataaggcrcagacaagtttagccccctcacccaagtacatggcagagcttccagggactgatatattgagctgggcccatagtgtttgtttttactttttaagtgcatttaagccagtgctagactgggttggcttttcttggccaggatttgggacagcagattttgtgaacagaaatagctgatgatagctgatgatttttttttcttccttattacagaaaacaaagtctttcactcgagtggttgatggtgctttctttcctaatgagcctctagatctattgtctcagaaagcatttaaagcaattccttccatcatcggagtcaataaccacgagtgtggcttcctgctgcctatggtaagaattctggctgtccatactgccactccctcaaaccgtgatgcagctttggcttcaacagctgggcatttccacagaagacatcaggtattgtaagtgctggagcccaccagccaagcacacagtgatcacctttactctctctgaaagagggcaagtgaggaccgggacagtcacagcaagtgtctgccttgcttctcatgtaatgaggtttagggcggaagaaacaactgtataaaaaggaaagaggggatcggtccatttggtctttgttcaaacagtattataaatgattgtttccaaaaaatgcagttaccacttcagagctgacattcagataggtttgaaaaacttcagtccttcaaatttttcacatccagccttggttctggcattttgacatccctgaatgctaaggttgcataagctgcaaaattgttaaatcattttattttttcaacaagtatgtactgagcatttattagaggcttacaaaaactgagcatatgagctttctgggagcttacactctggtggggagagacagataagacacgagattgagaagatgatttcagagagtgatagatatatgaaggacacaagtgaggagagaaggtatctttagggaggataacaggtggtcaggaaacgctcttctagggagtgattgttgagctgaggcccaggtgctgggaaagacccatgattttttgattccgtggcataggaagactctcttcattggaaataaacttttcatctgtcctcagaggagtggagacttcaaattcctaatactgttgaagctcatttatatagattggcctccttattttaagctggaggaaatagggttaagaaataaagaggtttgtcaaattacaaagctagttgttggctgtctagaaccagtctcaagttcattgagttgtgaaagcatgttctgccattattaatttgacctccagggcaatgttttgaagtgggactagggatttttgtcctcatgttgcagacgaggccactgaatcgcagttcatggcttaagtaagkcctttcagtgatttctgggtgtgtgttagaaagaagaaggcaggtgctagtgatgacaatcaccactgtaactactgtaaccagttccccagtgccttccagtgccaagcacaggcygtccaagcaacaacttgaaaacaggcatgattttccctattttaaagaaactgaggctcagagcagctaaagtggctttctaacatctcctggctagtaaggagacaggggtgtataatttttatgcatttaggctctgcctttttaatttaatttaatctaatttaatttttgagtcrgartctctctctgttgctgaggctggagtgcagtggtggatcttggctcrctgcaacctccacctcctgggtccaagtgattctcctgtctcagcctatcgagtagctgggattacaggcacccaccaccatgcccagctaatttttttttgtatttttagtggagacagtgtttcaccatgttggccaggctggtttccaactcctgacctcaagtgatccacctgctttggcctcccaaagtgctggaattacaggcatgggctggtacccagcctaggctctccctttaaatatcgagttctctgtttacctgctgtgtgatattaggggagttgcccaccctctctgagcttccattccttcatctgtgaaatagggctaatcttagcacctgcctcacaggtatacatcaaaaagcctggcatatagtcagtgctcagtaaatgctagatattggagttattcaagtgacagaatttgcagagttcaaaagcctgtgtgggtgctgaaattccatgtgaatttgcagttaaaccccttgctagctgttagaggccacaggaaatccccaagaaacaaatcccagctccttaatgtacagataaggtttttagtagttaaaatatgcttgtggataatttaaatgactctgaggattccctgagattccaggaggcaggtactgccctagtattcatttaggtatcagccctagtgaatcattaccccaagattttcagcagaaaacataccaagaaaattcatttgtcaagtggatagcgtttctgctgcctcacattttaaagcggtaattttgccagaaagtggtaatttaacaaataatcacaggaagcacttactacataccaagtaccattgtaagagctttacaaatatcaactcgctcagttctcatcaccaccctcgcgggaggtacttgttgcaaactccatcttacagatgaggagcctgaggcaggaagagttgagtcccttgccaagttctcagctgttgagggcagctcagggagcctgtgttttcagccactgcctgacctcccactgtggcttctcttctttgtggccccacccacaaaggtctttagaaggagaacaacaaacaccagtttggaaattttctggcttctctttgaacttggtgtcaaagccaagttggggcctctcaggcagtcagtgctgccataataaaataccatagactgggaggcttacaccacagacattcatgttctcacagttctagggactggaagtccgaggtcaaggtgctgataccgctttgtgtgtgtaaactttcttttctcataaggacatcagccagattggattaggacccactctaacagccacattttaatgtaatcacccctctaaaagtactaactccaaatagtcacattctgaattgcagggggttaaggcttcaacgtgtaaattttgagggggccacaattaagcccataatgggagccttcccacaaggtggccacttgggccccacaaggctgcaggtggaatgacaaggaacagctgccttttatcaaaagtgagaagaaattaactatctgacaagcacactgaggccacttccacatgtggctgcttgggcttgagggctccttatccaacttcccctgtgaaagtcagctgcccaggcccttggggagatgggtttaccttctcatgaccagatggcttacagagggcacgcttctctccacagaaggaggctcctgagatcctcagtggctccaacaagtcccttgccctccatctgatacaaaacatcctggtgagtagcttgggaggctgcagtactccagagacacatgcacttaacagatagccctaggtcacactcagcaggagaagccaagggcacagacactcctcactcactcagtcattcaatagacctttactaagcataggtgtattagtccactcttgcactgctattaagaaatacctgagactgggtaatttataaagaaaaggggcttaattggctcatgatgctgcaggctgtacaggaagcttgatgctggcatctgctcagcttctcgggaggcctcaggaaacttacaatcatggtggaaggtgcaggggaagaagtcatgtcttacatggccagagcaggaggaagagagagagggaggaggtgccacacacttttaaacaaccaaatctcatgagaactctatcatgagaacagcaccaaaggggtggtgctaaccattcatgagaaactgcccctacgatccaatcacctcccatcaggccccacctccaacattagagattacaattcaacatgagatttggtgggggacacaggtcgaaactatatmaatagtcccacaaacccaatccacaatccccgacctggaagagctccaaaaacccagaggctttttgtaacccacccagcagccgaaccagaccttgactgatttgtggctatcagtcatttttgttcccacacatttattcattttatttatcccactattcmgatgtttctctgtggatgcattaatgtgggtgttggggtgtttcccccaccctgagcctgtgtcataacacgcagcataggtgctgcattatctacctacagtctgaaaagctctgaatgctgaaacacacatgggactggggatctgtattcactacacaccagccaggcatcaggccaggttctgcaagaccagtcatttactcgttcattcactcatttattgttccatcactaattcattcattcactgcacaaacttagcagtatctgatcttactctagacactaggatatagagatggattgttttccttcctttcttttctcctttttccatcttcctctttttccataaacgtttattcagtatggactcagtgccgatgttcattttgttcacttgtccatggaacacatgtgtagtgagagtccacatgcccctgcacttccctgggcactggggtgcaatgtggggtggacagagatgacaagacacttcaatacagtacacaggaagcacagggatgtccaaggctctgtggtgcccacaggaggggacaggcrgctctcttggggagaaggatttggaggattaatggagcttgtctggtgatggaaggggtgggtggagaaactgggaagaaccaagaggaccaactgggagcagaggggtgtgaagagatcagctgagggttggctgcagcaggagagaatgctttcagctgttgtaagctatgtaatgaacatagacttcatcctaaagactgagaacagaaggaagaaggacatttgatttctattttagaaaaagccctctgaaactgggcatggtggctcacatctgcagttccagcactttgggaggccaaggcaggaggattgcttgagcccagaagttcaagaaaagcctgggcaacacagggagaccttgtctctacaaaaaataaaaaaattagccaggcctggtggtgtgcatttgtggtgccagctacttgggaggccaagcaggaggattgttgagcctgggaatttgaagctgcaggatctcgccactgtactctagcctgggcaacagagcgagagactctgtctcaaaaaaaaaaaaagaaaaaaaaaaaagaaacactacaggcagatatccctcaggcccccttggtggagggatgtttgacgagttgcagctgtctgatgatgaattgggactaaggtttgagagatattgatgatataagttatacagtggaattctcaggtggattggagatggcctcatggagaagatgctcattgatctaagccataggtgaggggaacaactgagcagaaggacatttcaagtagagtgggaagtaggctgtgcgggaaagtgcaagaggaatggaagggcatgtgtttctcctasgcacagtagcatgctaggggctgctttttaaacagtaagtagttctctgatgcagaagtcatagtcttaccccagaaccctaggattttgcacgctgactgtcctatgaggactcacctgagactccacatagcatctatacccaccttggacatcaccagcaccatggagtctgctggctatatggccaaagaggccaggcccttataccatagactggacctactgcagaggcctcccttgctctggcctgattaaaaaccaccagcctcctgaggacccaataaacgagtctgagcagcattccccaatgtggtgtacacttccttgcctccaaattccaaagaaacccatcaagggctgctgtcttagtggtaggggtttgagctgcaacacctttccagcatttcctagagcaccggatccctgaatcttcatggaatttaccatgcactctctgccattagtgcctagggaaagttgagagggagaagcctgggaggcaggctggtgccaggtcagagaagcatcgaatgtcctattaaggcgctcagcaatggggcccaggggaaacaacaggactaaagaactgctctggggcaagcagcatacttttctcttcacatctcatataatcctccacatccctacagaggaggaaactgaggctccaagagaccaactagcttaggtaagataatagctaagggstggaggcagcactggtaccaggarcagggctggtttcatggatgttctgcccgtgtagtcacagaggaccttgttgctcagaagggtcctacatttggtttagtgctccgctgttaccatcttgaaattcttaatgattttttgaacaagcagtttatgtttttamtttgcactgagctccacgatgatgcagccagttctgcccagaagtgactcattctgagacatgagagagaagcctgtggtcaggagcatgggatttggatgcaaatagacttgtgaaagaatcatggttcttccagttggacccaaccacttcacctctctaagcctcagtttcttaatctgtgaaacagggctagttttgatacttgcatcatagggttgctgtgtgggttaaatgaagcaatgtgggtaaagcattcagaatcatacctgcacaggtgagtgtttaacgtgttggccattgtggttgacctggatctcctaggactacgatatttttacagcacatcccgcctcagtatttgcaccttgtggctaatgaatacttccatgacaagcactccctgactgaaatccgagacagtcttctggacttgcttggagatgtgttctttgtggtccctgcactgatcacagctcgatatcacagaggtgagtatctgagcatcccgctccaggaccatagcccagtgaggctggtggccacggaaatccatattgtctactgascggctgccttctctgcctctgttctatcatggaaagtgcatttccaggtgtgyctggatggaaacatgccatggggacctgcgtcattcacctgcctttcagagtttggggatgttgatcagttgtttctgtttcttcyccttcttcaggaccatgtataaaattctcatctccctataattttctgggcgccatccccaaggattttttctttctagaaatgtcttccccaacatcttagccatacgtagtaatggaacaaacattacagctataaggagtaatggaactcctaaagtaatcgactttaaatcaactattttaaatgcagccaaatactccaccccataacattagattccacattcttctcaagtgcacatgcaacatcttccagaataaaccatatgttagatcaccaaacaaatcccaatgaatgtaaaaggatggaaatcatgcagagtatcttcttcgaccacaaggcaatgaaattagaaatcaataacaaaaggaaatctggaaaattcacaaatatttataaatgaaatggcatactcttttttacattttaaaaattgtagttaaatatgcttaataaaaaatttaccattttaaccattttaagtgtatagttcaatggtatcaagtacattcatattgttgtacaaccatcaccgctatacatcttcagaacgtttttatcatcccaaactgaaaatcagtacctattaaaaataactccccaccmytccttcccccagaccccaataaccaccattctactttctgtctctatgactgactttttagttactttagtgactttagttactcaatgtaagttgaatcattcaatatttgtccttttgtctggcttatttcacgtagcataaggtctcaggattcctatatgctgtactatrcatcagaatttcctccttttttaaggctgactaatgttccattgtatgtatatatcacattttgtgtatccatttattcattaatggacatttgcgttgtttccaccattcagctattgtgcaaggaacaattggctattggctacatttgcctattggctataatgctgcaatgaacatagttgtagaaatatctgttcaagtccctgttttcagttatttgaggtatatgccagaggtagaatttctggatcatctgtaatgctatgtttaatttctttgaagaactgtcatgttgttctccactgtgtctgcaccattttacattactaccagcaatgcacaaggggtgcaatttctcgacatcttgaccaacatttgttattttcttctgttgttgttttttaaataatgactattctaatgggtttgaagtagtatctcattatggttttcatttccattttcctaattattagagatgttgagcatcttttcatgtgcttattggacatttgtatatatgtttttggagaaacgtttaagacccttgcccatttttgaattgagttgttttttgttgctgagttttaagagttccttatatattgtggaaattaatcccttatgagatatatgacttgcaaatattttctcccattctgtgggttgccgggttgccttcttactctgttgataatgtacaaaagttgcacagtagtttttaattttgatgaaatagaattcattcacttttttgttggttgtggttttggtgtcatatataagaattcactgccaaattcaagggtatggaaatttaccactatattttcttataagaggtttacagttttagttttacatttaggtctttgatccattttgagttagtttttctatatactatgagggaagaatctacctttattcttttgcatgtgtcatatactagggtggctataattttttttaaaaagaaaaggagtaagaacaagtgtgaaggatatagagaaaccaaaactctcatacactgctgctggggacataaaacagtgcagccactgtggaaaaaagttgtggccgttcctcaaaaaggtaaacgtagagtttccatataacctagcaaatccagtcctagggatatactcaagataattgaaaactgaygttcaaacaaaaattgtatatgaatgttcatagcactcttgttcattataggycaaaatggttaaaacccaaatgttcatcaactgatgaatcgataaacaaaattcagtatatacttacaatggattatcattttgccataaaaagaaatgaaatacggacggatgctacaacacagatgagccttgtaaacattttgctaagtgaaagaagtcaggcacaaagggccacatgttgtatgatcccatttatacgaaatgttcagattaggcaaagccatagacacagaaagtagaattgtgttttccagaagctgagaagtggggccaatggggagtgkctgctaaatgggtctgaggtttctgtttggggtgatgaaaakgttctggacctaaatagtggtgatagttgcacaacatcctaaatgtactaaaaaccgctgaattatatactttaaaatggttcaaggggcagatttcacttatgtacattttgctttaaaaatattgttaagaaaatgagaaggcagaccacagactggaagaaaatattcatagtacaattatttgacaaaataatcatatccagaatagaagaacccttacagttcagtaatgaaaagaaagtattttccaataatgggtaaaagacttgaactttgagagaaagtcccaacaaagtagatcttggctgaatatagaggacttcttttgagaagcagaactactgccttctcagaygtgagctcttcatcactagggatatgagcactgctgtagcaggaaattccagcctcaaatgaggaagggggaagtgagctgtctctgagctgtcccacccctgggtctatacatccaagacktgataggtggggacacagagccagccccctgctccrcgctgcatgcatgcctgaccttccctgaccttttgtcagatgctggtgcacctgtytacttctatgagtttcggcaccggcctcagtgctttgaagacacgaagccrgcttttgtcaaagccgaccacgctgatgaagtccgctttgtgttcggtggtgccttcctgaagggggacattgttatgttcggtaagggactggccacttcccacagttcacatgaagccccttgcttaccccaccacgatgcaagcgcctggaggacttcggggttggcatttaattacctctgtggtttataggcggacacaamctttctctggaaaatgccctcccttccatttttagaagccaggatgaaaaagtgccatgacagttgcttgatgagggcttctctttgtactgaaacctacaggtttggccacttcagggcactcaagcaatctaaatatttttttttttaatatactagaaccattttcttccttttctttgaccactggtcttaccctccctccccttcccagaaatcccatgaggccacaacctgaggctttaagaggcaaggaccatgtttttcataattccagctcaaagtggtctgcacccagaagagctttgtaaatgcttgtgaaatgttacttgtgatgttagctcatttattcttaagtttatgacatatttggtgcctaaaataaaccaatcagatgaggttatcaatagaaaaaaattacagggaagattacacacaggagttatcactaaaatatttagytagaaacattacacaatgcaggctcttaacttattcacactggcctcttgacaaagaggacagaacgttccatatagagtgtatttgtgcactgtgggttattcattatttcagtttttcatcctcacaacacagataataaagaacttcctcctaggttgtcataaggattaaataaaataagccccataaagtaagagtgaatacctaataaacgtcactgttatttctcagcaaccattcctgagcccatactatgtaatggcacatggactccctaaactggaaaaagtcaacaacatatgtatcaaaaggttaaattccttgatgtctgaagagctcctaaaattaataagaaaagaataacctaatkgaaaactgggtaacagatagaaacagatagttcacggaaaagaaaacacaagtggcttctaaacatacgaacatccactcaacctccctcataacaagaaaactgcagaccatccttagcaaggaattatttttcatcaatcaaggttgaaaaaaacaaaacacttaaaataatgtattcaagcaggtgtgagaaacaattttatacattaatagagaagtctatcaayatttaaaatgcatgtaaggcygggcatggtggctcacacctgtaatcccagcactttgggagtctgaggcgggaggattgcttgagtccaggagttccagaccagtttgggmaacatagtaagaccccctctctacaaaataataataataataacaaacaaaattagccaagcatggtggcacacacctgtagtcccagctactcaggaggctgaggtgggaggatcacttgagccygagttcraggctgcagtgagctgtgatcatggccctraactccagtctgggcaacagagtgagactccygtctcaaaaattgtttttatttttacaaaataaaaaaaaatgtgtgtagtcttagccaggtgtggtggctcatgcctataatgccatcactttgggaggctgaggcaggaagaattgcttgagcccaggmgttggaagctgcggtgagctatgatcatgccactgcactccagcctgggtgacagagtgagaccccatctttataaaaataaataacatagattaaaatgcatgtagtttttagcctggcaattctacttctagtgtttttgtgtaattatacttccacatgtgcaaaagtatatatgcacactaaaatattacttttaccagcaaaagatcggaaatatgacatatacattatatatttatatatgattgcatataaatgtttttgtatattacatgctcatagaacaacaaatggcagtttgataagtgacaagtcctatatatgagatcwattttaataaaaagagcaatatgtagaatacgtgtccagtctcctgccagatgtgtagaaaggtgtccgcttataccctggtacctgcagagcctgtctttgggaaagtgcctctgaggctcgtcactgggcatctgcagggaagagatgaaagggaaacattttcattggatattagatctctttctgcattttggattttctactttttattaaagaaatacaaaaattaattgtaaaaatgtgtgtgggaggagagaggcagagggagagagagaaggaaaagagagagaagcaagagagagggaagacagggagagaaggaacagagagagggaagaaagagagaagggagagagagagggagaaagaaggaagagagagagggaaggaagagagaggggagagagagggagagagagaagaaaaagagggaagagagatggaagggagagatagggagagagaaggaagagaggatggagagaaggaagagagacagaggagaaaacagagacagagagagggagcaagctggtctgtgtccccagggaacctgcagcctcatgggactggctgcaggaacacggggtggacagggaagatgtgtgttcagcttccaccattcggaagccacagttccttggacaggtcccggttgctctgagcctcagtatctgcatgtataaaatgggtacagtgayttggtaggcttgtaagtttmcagtgggaggaggggtgtgaaaaggattmatcaaatacaaggcacccggggcttcccgagcctcacccagagcagcagcattttgtgattatctccttcagaaggagccacggaggaggagaagttactgagccggaagatgatgaaatactgggctacctttgctcgaaccgggtaagtaaacctcccggtctcccccatgccaaggcctggggtgtgaggaggaaaatctcacccctgtttctgctctcccttctaggaatcctaatgggaacgacctgtctctgtggccagcttataatctgactgagcagtacctccagctggacttgaacatgagcctcggacagagactcaaagaaccgcgggtggatttttggaccagcaccatccccctgatcctgtctgcctccgacatgctccacagtcctctttcttccttaactttcctctctctcctccagcctttctttttcttttgtgctccttgagaagttatctttctgtgattttggtttcccttctcctcccataatttctcccgcaatcattagcttctttctgagctcagctgctttctatggggatccttgcaaaacaagctgctttcgctgatattttatggacttaggaatgatccttacagaattcttttcaacatcaaaaagtgcaatttgtcttggaaggcaacaagatttcttcaataaatttggaagagggctggcctattagttgtcataataatggttttgtaactcatatgaaataaaatcagaatgtaaaataggtatacgggggcagaatttaattctgtgctgataacactccccatgcccccagcacccactttctatcagagaaggtgtctgtgtatgttacccaaaatgcaagtcccccaaccccaacccattggggcttcagccgcaagccaagtatggatgtcttggatgtcacgggtttgagctgggtctcttctctggctcagagagatgtgtgggtgacggggtatcctcagccatggaaagctgccatcatccagaataaaaaacctagaagtcaaattctaggcatcaagggtcggatcagcaatgccaagaagaaatgaagcttccctggtggggtcgagatgaatctgtcattcaataaatctacactggctgggcagggtggctcatggctgtaatcccagcagtttgggaggctgaggcaggtggatcacttaaggtcaggagttcaagaccagcttggccaacatggtgaaaccccgtctctactaaaaaaatacaaaaattagccggtcttggtggcgtgtgcctgtagtcccagctactcgggaggctgaggtgggataatcacttgaacccgggaggtggaggttgcaggcagcagaggccacaccattgtactccagactgggtgacagagcgagaatccttctcagaaaaaaaaataagataagataataataataaaaacataaaaaataaatcgacactgagcgtctgatatataccaggcgtatccccactagggatatagcagtgaacaaaacatggctgctaccaaagagtgagcaaacagacattaagcaaacattcacgccagtggatatctcatactgtaactttgataggtgttactcaggagaataaggtgttttcaagaaagtgtaacggagggaacctaagtgagattaaagtcttaggaggctctctctggagaaatagcatttacattaagaaaggacaaatcaaagttagtcacagggtagggagaatgttaaataccatcattcaaaggatgcactcttactttgtatagccacataatccatattatatccatataattcaccagggtaattagtttttcttcgtgattgcttcaagattacataagatgcatacaataggagggtttctgagatgccagtaactcatctgggtgagagatctccaactcagtgcccgaatcagaccccctgaagtgttttgtttggcccacacaacgttaaacatgttttggaatttgttgccagcaaattttaaattaggaaaatttcacattaaatgccatatttccagcttcttcaggaaacaacaataacaagaaaacccagaagatactgttaccgagctgcattcccacatgataaccagcacttctggcggtccatacaaccttttatgcaaattacaaggtgccccttcctcaaaaccttctacagacatcttccatgaaactgccatggataaatatctgcatttatgatgcaaatgacaccttctctaaagtgttacccttctgcagtgcactacctgtgcaactgtcctcagcaaagatagagtaatctgcaggaactgagwggtggctgccccctttgcagaggcctaagttctcaacgtgccacagtccacaccatacccctttgtgctgtgcctggtctattttactcactgatattacccaacctctgaaggtgtttaagtttggacccttgacctctcatttcatagtgaacctcagagaggtgaaacgattcacccaagatcactcagcaagtatgcagtgtgagcaagttagcagtaagtcaaaaccaggccttaaggctcttgtcacttcagagcaggactcttactgccatgcagctacctctctcatcagatggtccaaagcattcggttgtctctggattaggtggttgtgggaggggtggatcagagatgctctgggccactttatggctctaggccgtgaaagcaagctggaaactgaattgcctctgcagctgcagaagactaatttctatattgatatttggaaaaactaacagctagaaaacaccactcaactcatttttaaaaatacgatcatattaaatgacattacacgcatcatttatatattgctcgcagtgccagcatcctcaaatgtgtttctaattttggtagatatcttgctagggggagcacatttctaagttatccagatatagggccctctttccttctctttctgtccacatgcaatcagatgctttgtggagttaaagttgacatttatttaaatgccactttgtgtctgtttttttcccctttaatttagagttttctatctggaatgtaagtaaaataatcacttggagggtttttccaaaataccaatggccaggccactagccagtcaatcggaagcaaaatctccttggatgggacctagaagtattttcagttttctggcattttaatgaacaccccgattaagaaccactgggtcttaagagtgtggcatatgtatttttcaagttcctagaggctctccaaaacaacaaaaaaatctgctttattttctgcctggtgttgacgtgtcacagtttctttagccactagtcttatcctggatatttatggtcataatttgatgagcaacattgggaatgacttctttttttttgttttgttttgagacagagtctcactctttcacccaggctggagtgtagtggcgcgatctctgcccactgcaacctccaccccagtatttttacttttaaatattatttatggcatctagatttgcataagatggactgggtcaacggccatgccctttataagtcaatatttttgagttctacaaattcactttcctaaagcgccaaatcacatcctactcaccagcaagacaggtacacatcattttcacaatcacttctaattttccaccattgtaaaaaaaataaaatatttaaccactttcttattgtaaaataaacaatttacttttccaggacccactgcctccccctccccactctccccttttttttaaacaatcttgaaccctatccattaaattaaatcaaagcaaaactttagggacaaactacgtcggtcttcacctgtgaatttcctgatgtccagtagagggcagcattatcacaaaggaaaaacgcttccctctattctgaggctcctgagatgctggtggtgtgacatcgcagaacttggactgacaataagaccatgccaaatagttaaattatatacaagccaatacaatatagtgttatccattccatctgtaacatttggaaagaggaaaaggtagaatccactccctgaaaagtctgactgaaaagactaaactcactagcagaacagaggttggagccagcagtttttcccttttccacctcctggactttcccattaagtctccaggagcctacctcagagggacataagggatttcctctccttggaccaactcagtccagattcccccagggcagagctgcaggggagggtgggaagcgggctcaggccctgcacctgggtagctgccccacctggtgctgccccaggtagcgcatctacaagatgagcctcccttcccccagcagggacagatcccactcagtcctgccccgtatgctctgctaaaagttcgtattgagagtgtgcctcattattcccaaggacgggaagggctggggagaaaaaaacctaccttgccgcttgattgtctcaaaatacaaagaaattcattgcaaagagctcgctgtgctccatgaatggggtggagctcaagtctgaaattaaaggatgggtaggaagggggatggccagccacagcatggcggaagtgtgaccctgagcagtggtggcaagggggccagcccacgggcagcagggctggtgttggcaaggttgctggagcacactgtgggtgcctggaggacagcttttctaccttgacctttaggaaacagacttctctctttatcggaagataatgccataaaatatctatctatctatctgtctgtctgtctgtctgtctgtctgtctgtctatctatctacctatctacctacctacctattatctatcatctatcaattatctatgatctatctattatctatctaatctatttatttcatttattacatttatttatgtaattgtgtttcaagctctattcacctcctgaacttttcatatgagagaacagaactctggctgataccttcggtatttttagaaggattggtacactttgattgttatttatcactatataagtcctccattagtttcactgcatgcaacaattgagttatagaagcacatttctgaaaataagttattcaatgggaaaaatggactgttgatggccaattagtaatatgaaggcaaggacaaacttgtccaccatcatgagagcttgtttggtggccaggcattgacttcatcaagagtcatcattactgcagccattacatgagctttgggaaacttcttccttttgacactcagatctctggacagaaatcatcttatgttgacatctggcaaggcccttccgatattctgttgtaattaggtggttggagttcctggggtcagcccagttctaggagtggcagaggcaaagagcctccaggaaactttggccttggggtggagctcaaaggggagaggtgcactccccatgggcataagtgggggttacctacaccccaacttctacaggcatccaatacccctaaacccagagagtcttttctgtctctattctgattgcataggtgcatggtggtgtctttctttccaggagttaacgtctcctttttctgttctaaaactagttatcgtcattctgttggcctctcagtgtccaaaatgctgtcatttcttctttcacagtttgtcagtgtgggtttgtagctttaaaaactttatttcactgtttttttttaggataattggaggggggaaataaaaaattttggatccctcttctttcacaggaagtggtaaaccgtttttcctttacacaaacatttaaaaacaattttttctacctttctgacagctacattgcatcccatagtataatactcaataaattatttaactgtctactattgttagccattcgaatgatttcctattttgtaccattgtcaacttcactgaggtgaccacctgatacatatatctttgggctcattcagaattattcctagagaatagtgctttaaaataaaggttttatcattatttaggtatggcaggcccaccaatcagatgtcagccattgaaaaagcaatttgggctgggcatgctggcccacatctataatcccagcactttgggaggccaaggtggatggattacctgaggtcaggagttcgagaccagcctgaccaacatggtgaaaccctgtctctactaaaaataccaaaaaaaaaaaaaaatagctggtggtgggtgcctataatcccagctactcgggagcctgaggaaggagaatcacttgaacctgggagacagaggttgcagtgagccaagattgtgccattgcactccaggctgggcaacagagcgagactctgtctcaaaaaaaaaaaaaaaaaaaaaaaaagagaagaaagaaagaaagaaaagaaagaaagaaaggataagtagcttgttac

SEQ ID NO: 93393 - DNA, 25000 bp, Homo sapiens
  misc_feature (1)...(25000): n = A,T,C or G
ccagctgtgtgaagatcacagagaagaacattgtgggcagaggcaatggcaggtgcaaaggtatcaggagaacccgcccctgaatattcaacgtgggcccttttctatttttcctaagtgtcagtcggtctgagaaataaagggaaagagtacaaaagagagaaattttaaagctgggtgtccgggggagacatcacatgtcagcaggttccatgatgccccccaagctgcaaaaccagcaagtttttattagtgattttcgaaaggggagggagtgtatgaatagggtgtgggtcacaaagatcacatgcttcacaaggtaataaaatattacaaggcaaatggaggcagggcgagatcacaggaccggggcgaaattaaaattgctaatgaagtttcgggcatgcattgtcattgatgacatcttatcaggagacagggtttgagagcagacaagcggtctgaccaaaatttattaagcaggaatttcctcatcctaataagcctgggagtgctacgggagactggggcttatttcatcccttatctacaacagtaaaagacagatgtccccagagcggccattttagagacctccccctaggaatgcattctctttctcagggatgttccttgctgagaaaaagaattcagcgatatttctcctatttgcttttgaaagaagagaaatatagctctgtcccacctggctgtcaggcagccagacctaatggttatctcccttgttccctgaacatcgctgttatcctgttcttttttcaaggtgcccagatttcatattgtttaaacaatttatgcagttaacgcaatcctcacggagtcctgaggcaacatacatcctcagtttacaaagatggcgggattaagagattaaagtaaagacaggcataggaaatcacaagaatattgattggggaagtgataaatgtccatgaaatcttcacaatttatgttcagagattgcagtaaagacaggcgtaagaaattataaaagtattaatttgaggaactaataaatgtccatgaaattttcacaatttatgttcttctgccatggcttcagccggtccctccgttcagggtccctgacttcccgcaacatctctccctttctttttatataaatgtgccatggcgatgaaggcttgttcattctctcgattttgatgcaggattctttgacttgtctgacacactaaagacaagctggttaaacagagaaacataattccaaaatttactagagtggggcctccaatagacttaatcaaagtcgtggggtttagtccataaagattttctgccacctgatctaacgcctcagctccaggcacaatggataagtgagcctgagaggcttcaaaaatttgtttttttaatttagttatgtccagtgataaattatcttccctgccaagaaggtgtcctttgaaagaacattgtcctaatgaaagaatagagttagagtgttctagaggtagagttaaggagttgatattttattttaagtgggaaccattgcaaggtcttagcaggaaagcaacaggatctgatttaagtttctcaaagtgtactctggctgctgtgtggagaatggattgcagaggcaagagaattaggaaggaaggcaggtaggaggctcttctggggacagggtgggagttgacggtggttaggaggtggaggagatggagcaggaggcaggatgtctaataggtcctgatcattgagggtgaggaaagggaaggatcaaggacacttcctgggtgacttggagacccggataggtggtgatgtcttttactgctaaggggaagaacacggtgggacgtgggaaggaacagttaacaaacattaattgaagaccccctgtatgcttggygctgagggacacatagagaggtgtggagagaggccccactctgcctggctatggacagtccagctacagagatgagatgctcacatgaagcaagagaaaaaggtgtgataccaaccatcaagatgcagtcccatgagatctggctggcgtcctcccacctacaaagccctctcacacattatctattygatccacatcattaccaaataagataggtagtattatccccattttacagatgagaaaaccaaggcttggagaggctgtgactagccccagctcagccagccaggttggatgcaaatcagcagaagctttagaatttctatacaggcatctgctctgcagtagggtgggacggggacttgctttgaagcctcattttatatcaagcacactggttttacttggtttgggctttggcagtggctgagaaaggggtgggagaagccaatggggctggaaaggagagtataaaatctatgaaagtaatttattggtgatatccattgagatacacccagttctgtctgtctccaagccagggttctttcctattctggatggaaggagttgttccaagatagcagaaggtagtatggagtacattgactgtggaagaggcaaggcttaactcagagtgatctctgtaggacttgagggccagggagggcagccccaggagggacacaatttaggagcaaaggtgtggtgggctgttaattgaagtttgctgaaggcatcagagacctctcagttctacacatgggcaatctgtactggtggctgggacctgcctacttaggtgggaactctgggtcagtccctggggaaggctcctccccagctttggtggacatgggcctgccttctgctcccaggtctcagcctccaggcagggacttattccttgaaatcttgcaattcaggtctggccatcaggtgagcccaggatgtgccctactagactgaggcatactgtaaaataaatccaggctggcaaggcattgtatctctctcctctccctccagccatgtccagtgcccttttacacagagcccctcagcagagatcacccccacctgcctacctcaaccagtggttctcaaccgacaggacacagagtttttaatgatgtcccactgtccctgcatgtatcgtgggcagtttcctcactgagaggctccatcagtgaacatctggtgtgtttgttataacttccttccctttctctctttgtccagcaacctacttattctcaaagctctgttcaagcatcactccactggctttcccaccccaccctggctggtgtttctccttgagctcctttgctccctgtgcccaccttcatttaccacgtgtcatttctgctgtatatggtgtgaggggcctaactttgattctttccagattggtagacaattaagtcattggcatttataaaacatctttttcttattcatttgaactgctaccttcattgcacacaccctctccatatatgctcagacctacctctgtttgtctgtcctggtggcaattccatgctattttaatcccaatggaattataataagttttgtatagtgtgtcaccatcattactggttttgtattttagttgacaaaaattgacatttgttatgatattgttttcccgtgcaagaacatgttcagatcctattgcaaatttatatcctgtgggtaagttttatagattctactattaaacttattattgttattaaatttatttataaatattttatagattttgacacttctgtgaatcagacatttccttcacttctatttctaattggttattgctaatgtagagaaaagctattcatttttgtacattcaccttaaatccagccatattaccaaactctgttattatttttgatctgtttttctagaaaacctaaagacaataggggatggggcagtgtttggagaaactcagattctgggcactgcagtgcatgtcctcctggggacatgaggcatagcgagaaattcatgaaactgacaggtcagttgtgtatatggaggcgggggcgagataaggtggcccctaactctccagagaagcctctcctccccgaggctcaggacctcccagtcctcactcctgcatcccactctcactcccccaccaccaaggagctgaggcacctctgcacatctcaggtgaccctgaacaggctcttttgcaggatccccaagagaaagggctgaccacagcagaaacagaagccatgactgcagcagggaaagggaggacttagggctggtccatctgagtgctgaggtccaacactctcaggggcctcgaagaggttactagagccctctgacacccctagaccagcagaagtggcagcacttggcagaaccaggaataatagcagccaccatggagtgcgttcccaacagtcctctgaggattcccctttacagatgaagaaactggagttcagggaaattaaggaactcacttcagtttacacagatagtaaatggcagaggaggaattcaaactcaggaacctaactccacagcctgccgcacccaatattcccacgtggccatctaggccattcatgttaagcccaccggccaaagactggatcccctagaaactgcagagctttctcagggaccctggagttcatgcatacaccagacattgtctgcagacattacagtaatatgtgcccacttgggtcctgtggtgaattgaatggtgaccccctcccaccccccgcaaaggataacttcacctggaatctcagaaggtgactgtatttgtaataggggtctttgcaaatgtaatgaaggtaaagatctcaagatgagatcatcttggattagaatgtccttctcagagacagaaaggaggggacatacagagacacagcgaggaagggcgtgtaaaaatggaggcaggcagaggctggaacgatgccgttgcatgcccaggaatgccacaggccatccgaagctggaagctgctgggaagtattcgcccctggagccttcggaggaagcatggccctgccaactccttgtttccaggcttctgacctccagaactgtgaaagaataaacttctgttgtttcaaatcacctgtttggtggccatttgttacagaagctctgggaaaccgacacaaatgtccaccattcttctgtttttttttttttgtttttttttttttgatggagtttcactcttgttgcccaggctggagtgcagtggcgcgatctcggctcaccacaacctccgcctcctgggttcaagcaattctcctgcctcagcctcccgagtaactgggattacaggcatgtgccaccatgccaggctaattttgtatttttagtaaagatggggtttctccatgttggttaggctggtctcgaactcctgatctcaggtgatctacctgcctcggcctctcaaagtgctggaattacatgtgtaagccaccatgcctggcccaaatgtccaccattattattcttcataagaaacataggcatttcaagccattaccaaacttatagtcactatttatcattatctatttttctccatcaatggatatgcaactattactatcatgaaaagtaaattatatttgcaaccccattatcttctagatggagaaacagtttgagagagggcagtggagaagcaagagagctggtctggaacccagctgcctgactcgtgagtcatttctcttcctccaaagccctattaagtctggggctgcttatggtcctcaccaactacacaaagaaagtcagggtcatgctcatccatcaggaggttcagggccacttcccgctttcctctgtttggcaacactaagagtcaccctctgattgttccagaaaagcaagaattgctaaaggccattgtgtcaagttygcccaattcatgctgcttgacatcttacccctccccaccctgctcccatcccccccacccagtgcccctgattgcaacactcctggctggggtgggacagggtggccagataaaagcagagcaggacctggaaagctggtttgtatgggctgcagcctgccgctgagctgcatcatggtgcggtctgtggcctgggcaggtgagccgtcggatagtgggctgggtctcgggagctgtggggaggtggggatgtggatgttcagggaccacttgctaccatttgcaaggaagcaggaggactcaggagaacttcagagggtcattttatccctctccatgcctcctggcttgcagtcccttgattacctttcctgtgggctcccccttaggctctttcagcccaagagacttcatgttgcaagggaaggcttttctcaacaggctgaagatgacttgactttcctctctctgtcctgaaagcccagagtcaatgaggcccctgcactgggtctttgtgtctytcccatgttcttaggtccctcctgttggccttatccaagaagcgcccactgccaagaacctcttctccaacctcatattgtctgtcctgcaagagggcagcctggggccaagatcctgggcatccttgcaaattttcatggaggttctattaggttgacagagaagtccaaggtcaccaggtgaaagagatctcttcgaaggagtcctgtcagaccctaggtctccaaggctgtggttgcctaccacagccaggtagcggaaaggcaacaggaagccataaacgatgggagcagaggcacaggccctccccaggagatgaactctctccatgcagcccttccagattgattctttctagccccaaaacaggcttgtttcttgttccgaaagagaaactatctctctaaataactcacaagtcagcagtttttccacaatcttcctgaatccacactgccctttactgaggtatagagagggggcagcctcagcccatggaactttccatcagcttctaggaccaacccaggccaggaagagacccccgtggtctggtctgcatgaagggatgggcacagtgccctcctgggtcccttctgaaaggagaaagcttgatttgtatgaaatcagccctccctgaccacctcctgtgcttccgtaarctgtggggcctgggaaggtgagaatggcagcataaccctggccttctctcttgtgttgctccaggtttcatggtcctgctgatgatcccatggggtaagtagcctctttcttggctgcctcagccccttccctgggctctgcttaatgtcccaaaacaccttccctgccagacctccccaagagctccagatttcagtggggactctcttccaaagctcagacccctgcaaatgtccccatctgctaccagccctcccaggaaggctcttgcctccttatccattagctgagctcctgcacatctgtggggccagcttgcgcatcagcctctttcagggctttcctttcctggggttgctggctccctcctctgcactctgtgctcttgcagcacctgtgtgttttacagtacagtactgcctctcattattggcttaggtgtctctctgcaccagtctcagactccaagttgctgcaggtaaggaacctaagtctcmtctggttcagcatccccagccccttagctctgcgaggacaacacacttgcttctggtctgttgaactgatcagatgtggagcttgagagaggcaggagggagctccttgttgtgtcaaatggaaaagagacctgggggaccttcagcaacttgaactcctggtccccgtcttgtcccaccccattccctgggcatcagtggcctgggaatgctggcctctcagaacttgtcctgcgactgtgcctctcacgctgggctgtagcattggaggtacatttccctctcagcctcataggatggaacagccgggggcacagaaacagcaaacatggggaagatgagaggtggaagatttctcaaaaagctttagtccaggctacttctgggctttctgcagtatagtaataatagtaggactttgtgtggactaagggttaatatatgtgaagcacctagaacagaacttcttccttgcagtgttcctccgagtgttttacatrtattaactttagcccacactggggtcctgtgacacacattgtggaaggtccaatggtctccccgtttcacacaggaggaagctgagtcgcacagcgagtaagttgcaaagttgggatttcaacccagacactgacatgccagagtccctgctgttaaccactgcactttattttctccatagtacagaaattcataacaatatttgatatgcgacagcatgacatgatagaaaaagagcttcctggctccttcctacatggcctggkggatgagttakctggtttcatcccctccttcctttcttttcctttggggagttcaccaattctcctgtatcattgcaggctacaccccagccccactagcaagctgcactcctgggtgacctctggttagagacagtgaccactccggggccacgtgtatgcccaaggtcagccctccatgctctcgggttctagttgaggcctgcctragcggtctcttcccaaaactctcctatagacactttgcacccctcctcttcctcgtcccatccctrtccatgtgggcattggagggggtacagacagaccctgctggggcaaagggaagtcccaggttctagacaccagccacaggcacgctccagtccaaactcactgctccatcaagatcttggcataaaatgttggctcatacaaaccacaccatcatagattgagagactggaagagaccccacagaccacacagtcattatcagatggggccgggattgaagatgagatagacccaaagtctatttttggcagatgctggaatgaagactagcattcttgcttcctggtgtcctggtcaaccctgcacagggctgacctcagtgggggtcatcaccacmgagccctcactgggaatagaccatcccacccctgcaaagtcttttcacacactgtagggtactctagagacaagtaccctacagtgtgtggggtacttagagacaagatgccttctcctagataaaattagctctattagaatctcagcagtgatattgataaacgtagattatctacaagggataayaagcaaatgcaaatggctttaatgcaagactaaagaaacataaacccaggcctgtaactggggcctcctctctgctacttatctgtttgcattttaacgaagtattckgaggtattccaaaccgtttttgaaagttctgcctgccttccttctgcagatgagcatgccatgtctaattccctctaggcctcatgttggggctgcctggggctaccttctgtcaggtttcagggcctggaggggagaccctaactggggatagggagacctgcctgccagaccctgatcctgggagctcggactctgagactagcaactttcaaggatgtcaaggagtcatgagacttgggtcgcagcacctctgctctgccctcttagcagccatgctgatggggacgggccccaagctcgtgagcctcaacttgcttcccrggaaaagaaggcttagaagatgatggtcctgcccactcagtgttctgaggatcccatgtctggcctctgaaaatgctttcccaactgccagactccatccacacaaaagcaaatgccatttctgcctgtcgggtccctccactgactccaggtgtagaagagggaggtccaaggacattgcctaccccagatggagggtgaccagtccccagaaggtcctgctgacagctatcccttttctttactccaacgggccaggctctgctgcaaaactggtctgctacttcaccaactgggcccagtacagacagggggaggctcrcttcctgcccaaggacttggaccccagcctttgcacccacctcatctacgccttcgctggcatgaccaaccaccagctgagcaccactgagtggaatgacgagactctctaccaggagttcaatggcctgaagaagatgtgagccaaagcagaggagcagggtgggtgggatgtggtggggtgacagataacctcctcccagagccagacacctctccagcactaaggtcctgccacagacccactgtgtggctttgggcaagttgtatcacctctctgggctctcctgtgcttaatgaaagaggtagggtttgcttaggggatcccaaaggtcccttccagtttaggtctaagtgtgatcaggattgtgagactctttctgtctcccatgaagccccttcctcattatgaaattgatccacccttcagctccagtgttctgggcgccttcacaaagcctcttgagaatctgccccaatccttgcttcctgagcccacacagttagacaggtggttctgtgagtcaggaacgtgacttcccttttccaatctacagctgtccccagaatgcctaatacagtctctgcacataggcactttcacacgtccccacccctgttgttcctccccactgtaacatccctgccagggtgccctgggagctggcagagtaaatcctgctgtgtctcctgtctttcccaggaatcccaagctgaagaccctgttagccatcggaggctggaatttcngcactcagaagttagttgactgtggtcacctgtgtggtaaagctcctggatgggaacctggtgcactggccagagggagccctggtcagggaatcaggccaggctgaggtgtggtcaggggaaaggggaggggagctgaactctgagggctgaatttccttctgggttcttggcaccycagctggagggcagcacagtgagctttgctccaggctgtttcagatccagtcttgccagaagcataggtctaaacacagcagagggctcagacctctccaagcctcagtctcgtcttccatgaaatgagaagagggagggtcccaactaatcctgacaacatgcagtgtctatgttttctgagctcagaaatggggtaccttgtcccagaaagagtgtttattccacttctgagtacaaaaggtaatctgtgagattgagcctggatgccaragtattggcatttgggggacattttttaaatgatttatggagaaaatggaatggagtatttgaaacttggtgttttctagaaaatccagaatatagggctcccaaagctctaaacagtctttctaaaacttttttggatcatgaacccttttgggaatctgatgaaagtgattactcatcttccaaaataatgcttatatacagactgtttattgaaatgcagcaggagtttttagcctggtgtcctcggactaaattaataaaaataaaataggatcaatctgtaaagaacttgagaccccctcaagaagttcagggacttcccactaaggaaggaagatgtggagaggtggttcttggggcagcttggggattttgacgaactctggactagtaacagcaacaaaaacacaaagcgctctacgggtgtgagttaaaagaaagatgaccaggttaacctgccaggaaactaaarcagtgggctccccaggtctttactaaccttagtaaaggaattagagaaattctaattagagaaaaatcttacttaaagaaaaaccttacaagaggaattagagaaactaattccttttcttttcaamcctccattctgagggtgtcaactagttctggtttggggtgggacaattcaagggcttggaggaagcctctggagggaattttggraaaggctcctagggtgtccatgtgcccctggtgatgtcgatgttcgggggtagaaagtgctctggatggtcccctttcctcaacccggaccataactcaccagcaaatatccctgcagcctctgaagcagccctcccagtgcccctcctagcccagacacagagacgcactgtcctgagtgttttcttgcctgcttctgagtaagagtggcctcctgtctggtccaagrccggcccttactccccttcatcacctcacaggttcacagatatggtagccacggccaacaaccgtcagacctttgtcaactcggccatcaggtttctgcgcaaatacagctttgacggccttgaccttgactgggagtacccaggaagccaggggagccctgccgtagacaaggagcgcttcacaaccctggtacaggtatggctgggcggggcggggatcaccagtctgtgcagggacccagagctggagcmcccacagcacatgtgggggctgctctgcccccagagccagctgcttcacgtatctgcatggcacagatcagccctgtggccagctctcagacttctacaagtgaacatctacctggggctcacaggggctgcctgcctggtgcgcgcccctgtgttgactctgagctccactcccacaggacttggccaatgccttccagcaggaagcccakacctcagggaaggaacgccttcttctgagtgcagcggttccagctgggcagacctatgtggatgctggatacgaggtggacaaaatcgcccagtgagtctcaggcagatggcttggagctgtgctctctgagggaagagaggccaagggcagactgagctttcccatgggtagagcaggtgttcatctacaaggcatttggaaagtcccatccttacrccagaacaaaagcagaaaattccctgcttttgtactcagggtaaaactaagacacatccagaaaggctttgctcagtgtccactgctgccctgttccagatccttcattttggatctctgtcctcttcctcgggaactcattcttaaggtgaaaatgcctctgagtgggtagtgaagccattgtcttcaagaaaatgggttttctggatccttgctyctcaaagtacagcatrtggactcgcagccctcattaaaaccaggtgctcattaraattatggactctcaggccccaccccaggccttctgaagaaccttcattttagtgagattcccaggtgatctgtgtgcacactgaagtgggagaaaccctaagctagagttccctccagaatagcaatgtagcaggagttttcttgagtggaatagggagggcctgggggtgctgaggggacagtggggtgagggtgacaagtttgagtgagaatgagaatggccttcataagggggctggctgggactgctgtctgggtcaccttctgcagagccaggtgagcctgccacctttgcctctgaccccagtggttcctccctaggccatgcactgagggggtaggagtgagaaagaagggctaccccacccccaatcccttgtttctcacctcctcttccatgcctcctgcaggaacctggattttgtcaaccttatggcctacgacttccatggctcttgggagaaggtcacgggacataacagccccctctacaagaggcaagaagagagtggtgcagcagccagcctcaacgtggtacgtgtggcaggagggctgaggcaggactcccctgtccagcaggccctgtttggtggcttcttttsagccccgaggccctcatgggaaaaaagacacagggcactgagaaacaagaagcttttttgtttctttgcttgcttgttttgttctattttcctggtccgtgcccctgctgaggggaaacctcacttctgtggagcatcytggctgatggtagaggcagcaaatcagtttgatgacaaacaagtgaccaatggggaagcccactttgagcttgagtctccagccagcaggcctgctgcttccctcacacacccccaccccatttccttcaagacagtgggcagacttgtgctccatggtcacactggttgaccttctggaaggtcctttcagggacaggagctttcccaagttgataacatctctgcagatgtcactcagggtggaagtactcccagcacctgcaaagggcaggcttggtttttagactagggtaggttggggtttcctaacttttcctcattgagcaatcaagacacttttaattttttttaattttatatatttattcttaagagacagaatcttgttctgtcaccaaggagggtatgcagtggcatgatcatagctcactgcagcttcatcctcccaggcttaagckatcctcctgccccagcctcctgagtaactgggatcactatgaccagctaattttttttaagtttgtagagatggagtcttgctatattgcccaggatggtctcaaactcctgccctcaatcaatcctcctggctcagcctcccaaagtgttggaattataggcacaagccaacatgcccagcctagatcctttttataagccctctatatatcttaaaatatagagagggtttataaaaccctgcagagagggcttataataactacattatttttctttcttaaaacaagcaaaaccaaacaacaaagaaaaagccctaaattaaaatgctttttacttttggagagcccacatctctgtatgtcagctggagtgggacatctttgattttctggctctttcatgaataaagagcacctctytgagccagtgagccaggcacccacatttcacactgagcctggcctctccatccctgtctggaagactgtgtgagttttggaggaagctgtatccctgtgctggtggggagacacagaaagaaatttagctgagaggtgagtggggtgggagtccctccagcaccctgctttccacattgtgtaccttgaatccaccgaggaatggaggccatcttattcctacaaagaggccttctactcaccacacagtgtgcccggggacaggttctaaccagatgggtgacttttcccaacttgcacaaaagtgctataacagatcaggagaagccccsacttctgccttcagaaagcacccatctgatcaaagataagttgtatagatggacaaaaagaaatatatttaaataaatgtagtgaaagctgttctttacctaagtgctaagtgggctcagagtaactagacctgacaaaactagggcagcttctgggggaaagtgaaccatactcttggcttaaggaatgaggcttcattattcattaatttatcatacttgtaccgggtaccttctcccgtcacaggcctgggggtgttacaccaagtaatayataatcaggggaaggccttattcaaaggtgggtaaggaagcctttgttctatctgagcatcaggtgtcattctagacactgrggatacagagataaataaagcagacccaattccctgcttttgtactcagggtaaaactaagacracaatcatgataacgatgatgaccacagcgaccctttattgcgttgtgctgaccttttacatgcattataacctttaattctcacaatgccctaagagatggatattttccttatttccatgttacagacagaacaccaaggttcagtgaggttaaataagctgctgggtaaggcagggatctgtgtctgccttgttcactgatgtgtctgaagcaccatggacagcgcctggcacacagtsggccatcagtacacatttgttcagtgaatggttgtctgcgtccgaagcccacgctctctggttatcatgccatgcagcttcttcactggggtcacgggtctaaggcaggctctaaagaagatggggtagggctggaatcctaacaaaggcccgtagagctccagctgaggagcccctgccctcctagctctgcctctggatcccccagacttagataatcagaaccaggctgagggctgagaaaattaaccctgccctcttccaccaggatgctgctgtgcaacagtggctgcagaaggggasccctgccagcaagctgatccttggcatgcctacctacggacgctccttcacactggcctcctcatcagacaccagagtgggggccccagccacagggtctggcactccaggccccttcaccaaggaaggagggatgctggcctactatgaagtaggaaaacccataaccaccctgggtattgtgagggtcagggggtgcctgagagaacagaggtttccttctcccaccgtttctgagtaaggatgccaaktgcagagaattctggccatgtaaattccatctcatccatgccatcttgaatttatccttaagcccaggtgcctcaagctgagtccagaattctaggtcactgcaaagaacctcctgattctccaggcttcctcagacaggaattttccaatctctagtctcctcctggtgaggaagggaaggtgcctgcaagagcctccctcctcctccccagtgctgccttctgctcccacaggtctgctcctggaagggggccaccaaacagagaatccaggatcagaaggtgccctacatcttccgggayaaccagtgggtgggctttgatgatgtggagagcttcaaaaccaaggtgaggcccagctctgctggcagaggggtggtcctagtgaacaagtcctgtcaatgacatggaatgaggacagttcaggacctcaagggtgagtctcctttaaatgtcccaacatttcataaatctccacgtgatagtattttgtacctttactacctattgactcagaaaagacaaaatgacaaaaaattgctctacatttagtagcactctggaaagtatttctattttattaaataccatacaaattytacagacatatgaagaggagaaatacacatggtgagacatatagctttcttcagcccattggcaatatctggtgcatgtccaaattacagaccttttgctttacttataggacccccttctcctgcccaatattggtgcatttacctggtttcatgccattttcccctgtgaaactgttagctcctgaagacggatgcttcactagtttatctgtacatcccacatcaactatcatgtgtggctgacagcggcagcttctagaggtggacaattgcaggggggcacgatcctggctggggagatgggagaaggggtcacggtggaagggtatttcagataagtcctaaagcatagaaggtggccattcttaggggtgagggagcgggcaactgcacaagcaaagacgcgggtgcagagaaagtaaaggctggactctgaaaacaaagtgtaggcccacatagctggacccccaagcagggcaggtagaggaagggagctagctgaaagggaggctggggccagcaagggatcaagcaccatggccccctggcagggttagaggacagagaatcccactctgagggaacacacagtcataccctcaggaagcctcaggaatctggtggagggaagatggctctcagggaagacaaagacatgaagacagagaagcaagccttgattgagatcttttggaaatctgagttgttccctatggtaactggacttaccttgaccttgaccttgaccttgaccagcatacaatacccttaaataaagcagctcagcccacacatgaccaagcggtgaagggttcccacttagggaggtgcacacaactgacactattcctcccgactgcacccaccccaccccaggtcatgcttacgttaagacaaggagactgcaaaatgactgatgtccaagcagcatgaggactcagcatccaggctcccagcccaaggctgtctccagaatctacagccactcacaggcctgaggctgctggagmaaaaagggccctgtccagaagaggtagccaggctctggggtggccgggtcaggcttccccgggctcctccactgcatcccctccctgcacaggtcagctatctgaagcagaagggactgggcggggccatggtctgggcactggacttagatgactttgccggcttctcctgcaaccagggccgataccccctcatccagacgctacggcaggaactgagtargtaaggggcccagggccagtggtggaatttggaggtggggtacaaacacagctccatgcatccaatgaactgtaggtcccgggtccttctgaggaaatgactttgccccaatactgtaatttcccaagcttcatgyacccgcaggagctaaggaaactgtcaaaacaattttcctttttgcggtctttctcttcctggttgtagcaatgcctgcccagggttgttgtaaccgtggcttccctccagagggcccccagactgggagcagcaccttgttcctctcttacctgggagaaagcctccccttagcctgcagcgtggcacccccacctgccctcagcagtatatggttgtgcttgcagatgggtaaagccttaactgcctgtcacatgtgaggccaggtgttgcctgtggcactgtgcttcagctgtaggtatggctgttgtctggctgttctctgcctggggtatctggctgtactcagcctgtagggcatgtggtgctgggctgctgccagccaatggttgctgcctgtgtgctctgcctgtgggtttgggatctcttcgggggagccttggttgaatcttcactgtcttcccaggtcttccatacttgcsttcaggcaccccagagcttgaagttccaaaaccaggtcagccctctgaacctgagcatggccccagccctggacaagacacgttctgccagggcaaagctgatgggctctatcccaatcctcgggaacggtccagcttctacagctgtgcagsggggcggctgttccagcaaagctgcccgacaggcctggtgttcagcaactcctgcaaatgctgcacctggaattgagtcgctaaagcccctccagtcccagctttgaggctgggcccaggatcactctacagcctgcctcctgggttttccctgggggccgcaatctggctcctgcaggcctttctgtggtcttcctttatccaggctttctgctctcagccttgccttccttttttctgggtctcctgggctgcccctttcacttgcaaaataaatctttggtttgtgcccctcttcccaaagatgtggtgacttaagaggctctctaagcacactgttgactccaaaacatccgcaggtcagagccaggtgggaaggtggtccgtgcaggatgtgccaggccctgtggcaggtcttgccccatgagtccatatgccagtgggcagtttccagtacacaggtgatggcagccagagcgcggccccaagtgcaacacgttctttggttattggctcagaagcctggaaacaggagcttctgcggaccttcacgcacgtgttattcccaaaatgccactagatggcagcagagaagaacttttccctgatttaagcgctctgcgagcagccactcagcattacactaagaattcagacccctggtactcaggggtcttcgagataaatcctgtttgggccctttgcaggccctatctcacctactgcccccgttcaccagatgaagaaggaacaatgattattctcactttataggcatttaaactgaagactgattctaaccaattctgagtccagaaccaaggcctgaaatgggccagagagcatgcacacggtgtcctggttaaataaagtcatcccaacattcctggctgctttgggctgcaccttggtcattctgtttgaagaaaatctgcacaaagcctaatggtccagcctgttattcactccaagctggtttctggttgggacttgggaaggcagctggggactgggacaggtgagatgagggggaggcagcttggccccccatgtgagtcaacccagcaccagagcgcaggaacagtgtccccgtcactccggcagcctgcctgtccatgggcattttgaaacctgctctcctcagtccagagcacaagctgcttgagcacgtgctccgccccctgaggtctcaattgagggatacgccaaccacatcccaacgagctgttaggagtggagtccaggtgcaggggtgacttctggcgtgctgcactccagctgtgtgacttcaggcaaagaagcagagcctcagtcctctgctgtaggatggaagaaatgtgaggagtcagtgaagtcgtgcacgcctgccctatgatcagtgctcattccctccctccctcttcccttctcagccctttcttcaacttctgtgagctgggtatgtcaaggatttagcaaaaactgtagtctccttttagcagaatgcgccctcctacaagcatccaaataaccaaagtcctccctgagtacgcagtcttacacctgcactactgttaccctcaggaaagcattagccacagcctctctctggtcttcacatccaccctgctcctctacaaactcatggccactccctcagctagaaccagcatcatctcatatctggacccaccttctatctggcctccctgcttcctgcccaccccctcttccagtcagccaccacatcgcaaccagtttaatctttctaaaatagagatctaagcctgtcagttcccctgcttaaaaactaagcaagggaagtgacaggcttcccctgcccaaaggagaaagtccccacccatcagcacagggttgagacactttatcaggccctcgtgtcttctccggtcacttctcctgccgtccccaccccagttcagttgctgggtacccctgatgtcagcattaacctcaaccatcatgccagctcctcatgtgggactcccacagccctctgtcacccggctagctcaggcccacgccattttctgaatgaatcctgtctaggacagaaacaatgagagttctcgaaaagccatttgtgttcagattatctctttttgtttgtttttgttttgttttgttttgttttgttttttgtttgtttggtttttgttttttgggttttggtttttttctttttttttgagacagagtctcgctctgttgcccaggttggagtgcagtggcgtgatctcggcttactacaacctccacctcctgggctcaagcgattctcctgcttcagcctcccgaggagctgggactacaggcacctgccaccacaccaggctaatttttgtatttttagtagagacggggttgctgttgtttgcttgagacaaggtctctctctgtcacccaggctggagtgcagaggcacgatcacagctcactgcagccttgacctcctgggctcagctgatcctcccacctcagcctcccaggtagctgggactacaggtacacaccaccatgccctgctaaattttgtattttatgtagaggcagggttttgtcatgttacacaggctggtctccaactcctgggctcaagtgatcctcctgccttggcctcccaaactgttgggattacaggtgtaagccattgttcccagccagattgtctcctttgactccaccttggccttgaagccccatgtggctggagtcttcctgctgctgctgagtttctcagcacacaccaagtgtccatgaaggcctggagctggacacagcagggacaagagccggggctttactttcctgaggctaacattctgttgggggaggcagacagtgaacaaacgtgcacataagacctttccaggcaataatgagtgctgaaaggaaacaagatatggctagagagtgaaggatggcggtgaggggactgctgtgcacagtgtggtcacagaaggctcagtagaggccacatttgagatgagatcccaagtcaaaggaagatttgcccatgcacttttgagatccacagtcctcaggggtaaatctgggtgcaattcttccctggctgcctttgttaacccagcttataggacatggtcctgccttggtcccctcttctaaatgtccccaagaggccctgccttggccccatttctcccctggcacaggtgcctcgtgtaggcccttagtctgatggcggtgatcatggccccatggacaagtcctccagagcaatgactgctcccctatcctttatgtcaactgtcacctcaatccccacttgcctggtggccttttagttaataccgactgaggttagggctcccggccactgccccaacctgtggactgtaccttcagagtcaacctttggtgactgccccagcctctgtcatgcccttatgcccagtgcatggtccacgtgcatggtccagtacaacatcctccctctcctctgccccaggttgctgctaggaaagcacccttggtgtcccatatccagtgtggtgacctgtatcccaggggaccatcgggagtctccaaacaagccatgccttcctccagcgcatctccacctgtgcttcacttctgcctgtgccatccctcctttccccaccgggccactgccagtcaccctgagacagtcagctcctgggttactcttgcaggaaacatcctcgggtgccctggacatcagtgactgcctccctgccacactagaccactgggccaccacactgacatatgctgccaccgtgatctgtgtggatgttagactcctcccctaggttccgagctcctaaggtcaagcacaatgtcttaagtggtcctctccaatcatgacacatgtttgaggctcagtaaatattgaaccatgtaatttctgactttttttcttcttttaccctcaggtgcagaaatcacttagaggatttccagactgaagtgctatttcatgacaagagcactactctcccaagcccttctattgaataccactgactcttttaatattagtgtccagccattagtccttccttcaaagagacaggggaattaacattcgttgcatgaccagagaccatactaagcatgtattagacatccaataaatagttactgaatgaatagtaagtgaattaacctgtgtcgtttaatcctcacggtacccctgcaaaggacgtgtcattttctgtttcccttgggttacacaagcagtatgtggcaaagctgcaattaattagctgattaattaattattgagacagagtcactctgtcacccaggctggagtgcagtggtgcaatcttggctcactgcagcctccgtctcctgggttcaagtgattctcgtccctcagcctcccaagtagctgggattaaaggcgcatgtcaccacacccagctaaattttttggtatttttagtagagatggggtttcactatgttggccaggctggtctcgaactcctgacctcaagtgatctgcccacctcagcttcccaaagtgctgggattacaggcgtgagccaccacgcctggcctaaaactgcaatttagatgccagtctagatgagacccagagcccaggtttgctttctagaacactgctgtctttcctcccccaggttaaaatcatatgtatttcttttatctcctcaccctgctatttggtgtctagacctcagaggttatgagtattgggcacttcttctgtgtccatccatacactaatattcaggtccatttatctctgctgtcaatcccatgggatcacaggtgcagaaaccacggtgtccaagtcaagccggcagtggagtcagggcctgacccaggcccacccatgtctttggttgctctccccagtgcaccctccttcatgcctcagctcttgtcctctacaatatctgattttatggtttacctaagtatgaaatcttaatgatgcttaaaacaataagcattgcctgagcacttgccatgtggcaggagctgtgctagggcctaagggaaatgcagaaatgaaccctgccctcatggtgtttccagctggtgggactgttggtggggggtctccaggatcagcttagcaccaagggtcaaaagatcaacccagttggtgcagtggctcacgcctgtaatcccagcactttgggaggctgaggcgggcagatcacgaggtcaggagttcaagatyagccttaccaacatggtgaaaccttgtctctactaaaaacacaaaaattagctgggcatggtggcaggcacctgtaatcccagctactcaggaagctgaggcaggagaatcgcttgaaaccgggaggcggaggttgcagtgagccgagactgcaccactgcacgctccagcctgggtgatagagtgagactccatctcaaaaacaaaacaaaacaaaacaaaaaatcaacgcagagagaaggtacaggtacttcatgactgatgctgtttggagctgcaggctcatggggataataaaaaacaggccaagcctggctttatccttgttttttaaaaattctctgcatacaagccattcttattgcctccacctagggtgaacttcttgctctcattgcccaagacaatctgacatatgaagtttgagcatctactgcaaagcaaataccactttttataacaagactttctctctgttcccaccagactgccctgtcagccccacacaccttaattataaactaggtcatgtaagcttgcatggcctttgaagacaggcacaaatactgcttgaactgttacagtgtgtttgacattgagcaatacagtttgaaaggaatttggggctatttactttttggtggcttaacccactaatgtctggccaccttccttaacagtgatgaccactcttcacccataaagaagaggcccctgtattcttctctctcatagcattcattgttacatctgacacacctgctggaaccccaggcaaatttggctccccccttggctggtcagatcggggaccaaactgtccatcacaccctacctggagcagtgagagctgaaactctttatcattttaattttgtctccattgtaaaatatatcacattataccaaatagtgttcaaaacatatatgttcaggaactcttacgaatccctcacccaggtaaggaaacaacattagcagcctctgatgaacagtgactgatgtgcccctccctaatcccatagccctctaactagattttggttattccttttcttgtttttcttgtagttttaccagctaggtgtgcatt

SEQ ID NO: 93394 - DNA, 126633 bp, Homo sapiens
tacagtatggaacagagaaatcacccagctgagccctgcccaaattcctgactcaaaaagtgtgagatataatatagtggttgttgttttaagccactgagttttgggatagttcgttatgtatttacagatcaccagagtgcatgcttagtgtggtcttggtgaatacaaagctgactgtggtaaggatggagaaaatgtcctatttacgtctcatgtcgatttccacagttatagttttactccatggttacaggttttttgtttgtttgtttggacagtctggctccatcacccaggctggagtgcagtggtgcattctcggctcactgcaacctccgcctcctgggttcaagcgattcttgtgtttcagcctcctgagtagctgggattacaggcgcatgccaccatgcccagctaatttttgtatttttagtagagacagggggtctcactatgttgcccaggctggtctcaaactcccagtctccagtgatccacccgctttggcctcccaaagtgttgggattataggcgtgagccactgcacctggcacatggttacggttttatagcatgcattcctgtaaggtgttcctaaaacactcaagttttgttcaagacacattctctataaagcaagcaagagatcttggatgttgctaaatgatattgatttgctggaaaaatatgaacagtagtaatgatgatatggaaaagatgcctgtaggtaaagatactatactcaggaaactggaaatgctttgctctgaaggtagcaatggttactaaatatcttacaaatttgaatttattctattccaaaggcgttttgctggtgaaagtttgaacaaaactgtgaaaaagactttagtaatctccatgcagggtcaagtaggcaaaagtgacccatgtcttttttacagtgatgactagattcctacagattttaaacattattaatctatttatttgtggtaaaaacacatatcataaaatttaccaacttaaccatttttaattatacagtttagtagtgttaagtatatttgctttctatgaaacagatctcaaccttttcatcttggagaactgaaactctatactcattaaagaaactcccttttgtcctttctccccaaccctttatatccaccattctactttccatatctatgaatttgactaatttatataactcatatcagtggaatcatatggtatttgtccttttgtgagtggcttatttcatttagcataatgtcctcaagatttattcatgttgtagcatgtgtacatgctctttttttttttggtggagtcttgctctgtcaccaggctggagtgcaatggtgtgatcccagctcactgcaacctccgcctcctgggttcaatcgattctcctacctcagcctcctgagtagctgggactacaggcgcacaccaccatgcccagctaatttttgtatttttaatagaaacaaggtttcaccatgttggccaggatggtctcgatctcttgacctcgtgatccacccgcctcagcatcccaaagtgctgggattacaggcatgagccactgcacccagacagaatttcctgcctttttaaggttgcatagtattccattgtatgtataccaaatttgtttatacattcatccatcaatgaacatttgggttgcttccatctcttagctattgtgaatagtgctgtcatgaacatgggtgtgcaaatatctcttggagatcctgctttcaattcttagggatatatacccagaaggggattcctggatcatacgttagttctattttcaatttttttcaggaaccaccatatggctttccataaggttgcaccattttacaatcctaccaactactgattgcttttagaaggtcaacgatcatgtatatcataagaaattgcctcaagtacaatatagaacatcaacagaaataaaatccagaccattgtacttcatatatgtcaatcaggagggtttaaattaatagctattataaaacactgatcatacattcatcatgtcttttcaaaatggaaatatataaattagaggtcttatttttattattttattttattttatatatttgtttatttttcgagatggagtctctcactctgtcacccaggctggagtgcagtggtgccatctcggcttactgcacgctctgcctcctgtgattctcatgcctcagcctgctaagtagctgggactacaggtgcctgccaccacacctggctaatttttgtatgttttgtagagatgaggtttcaccatattggccaggctgatcttgaactcctgacctcaggtgatctgcctgcctcggcctcccaaagtgctaggattacagatgggagccaccgtgcccggcctttggattttattattattattattattattattattattattattatttttgagacagagtctcactctgtagctcaggctggagtgcagtggcacgatctcagctcactgcaacctccgtctcccaggtcctggttcaagcaattctcttgcctcagcctctcgagaagctgggattacaggcacatgccaccatgcccagctaatttttgtatttttagtagagacggggtttcaccatgttggccaggatggtctcgatctcttgacatcatgatccacctgcctcggcctcccaaagtgctgggattataggcgtgagccaccacgcccagcctggattttattcttaaatgactgtaaagacactagagcaccagcaaggtacagcttctgctctggggaggaatttgcatgctttcttgtagctctgttttagaatcatagctgtcacataatgatattttggtaaatgatagaatgcatatatgatggtggtcccataagattatttaatatttttactgtaccttttctatgtttttatatgtttaaatacacaaatacttgccattgtgttacaattgcctacagtattcagtacagtcatatgctatacagatttatagcctaggagcaataggttataccatatagcttaggtgtgtataagtccattttacgatgttcgcacaatgatgaaactacctaacgagggatttctcagaacatattcctgtccttaaacagagtgtatatgtatgtaaatgctttaggcataacttttctggagctattgcattgattactcatgggctccctctggtggaggtggtggctcagtttgcagggtttcagatcaggaaaaccaaagtaaatgagcaatttagcccttcattcaacaaacatttactgagtgcctacagtgtgccaggctccattctggtgctgaaaaaacatccgtgaacaaatcggacaaacatccatggactcatggaacttacattctggcagggggagagagacactaagccaaatttacaagcaacttgttggatgggaaagtacaaagaggatggtagtgttccaatttttaatgtagtgtcagggaagatctcattgagaaagtgacatgtgaataaagatgtaaatgaggtgagcggatgaatgatgcaggtatctgggggaagagcactccaggcagatggattaaaaagcacaaaggccctgggcctacctgtagttttgaggaatggcagaggccaatgtgctttaaggggaaggatgacagaaggagtaggagttgaggttagagcagagctgtactggaggtgtcaaatcttgagggtcctgtagaccaatgtaaggattttggtttttactctgaaataggaatgcattggaggaaggatatgatctaattagggttttaacaggagcccattgctactatattaatagattgtgggggccgggcgtggaggctcacacctgtaatcccagcactttgggaggctgaggcgggtggatcacttgaggccaggagttcaagaccagtctggccaacatggcaaaaccccgtctctactaaaaatataacaattagccgsgcgtgctggcgggcccctgtaatcccagctattcaggaggctgaggcaggagaacccaggaggcagaggttgcactgagccaagatcaggccagtacactccagcctgggtgacagagggaggctctgtctgaaaaaaaaaaaaaaaaaaagattgtgggaaggcaagagtataaatagggcactcacagtcactgactgactggtttataccaacggaggcagtaaatggtcaggttctggacagattttgaaggcaaatcttgcagaacttgctgatggagtacatgtgggatatgagagaggagttaaggatcttagtaaatgatgttgcttagtacattgttgtcatcggaagaggtgatcaaatatacagtcaaaaaatgtagaaaaaatagttttttttctggattttgttattcgtggtatttgtgagctaataaaaatgtttgtaatttttctcattataaaaggttcacttttatatctaatattgtatttgtaattttggattttttttttttttagacagtctcgctctgttgcccaggctggagtgcagtggcataatcataactcaccgcagcctctacctcctgggctcagttaggtgcgtgccaccacacctggctaatttttctgggttttttttgttgttgttttgctttgtttgttttgtagagacagggtctaattttgttgcccaggtgatctccaactccggggctcaagcaaccggtcgacctcggcgtcccaaagtgctaggatttcaggcatgagccactgtgcctggccttgattattttaaagagggcccccaaattgaataaacgtcaagtctccacaaagcctgaattcaaccttgcttctagcccatacttgggttgtaatttaaaattaacgaaacatttaagaattttgcttccgaaaacagtgtgcacgaagtgaattgtaagcctaatataatattaagaataaactaaatttggggataaaaagatcaccttggggctcacgcctgtaatcccagcactttgggaggccaagggatcaaccgagctccagagttggagaccagcctgggcaacatggcgaaaccccgtctctaccgaaaaatacaaaaattagccgggcgtggtggtgcgcgccggtagtcttagctactcgggaggctgaggtgggaggatcacttgaacccaggaggcgggggttgcagtgagccgagatcgcgccactgcactccagcctgggcgacagagcaagactctgtctcaaaaaaagaaaaaaaaaaagggatgggcgcggtggctcacgcctgtaatctcagcactttgggaggcccaggcgggcggatcacctgaggtcgggagttcaagaccagcctgaccaacatggagaaaccccgtctctactaaaactacaaaattagccgggcgtggtggcacatgcctgtaatcccagctactcgaaaggctgaggcaggaggatcgcttgaacccgggaggcggaggttgcagtgagccgagatcgcgccattgcactccagcctgggcaacaagagcgaaactccgtctcaaaaaaaaaaaaaaaaaaagatcaccttgggctagcctcccaaatgtcttccaaaacttcccactcattctccttcccagtttttctaaatctaccaaatgcacccaacacttcttacgttccttttagccaggtagggattacgcgcatttttaaagacctccttaaaagtgaaggctgtagtaccgtcaggactgcctagcgctcacccagaagctgcttgtctccgaggcactaagaggggcgtggccatgggcgtggctcgccgggccggcggagtgggcggagcctaaaagcttccccgcccggtcagactcaacacatgcgcccagaggtttctagtggaacgaggtgtggattgtgaggtgactctggccgcttacttccggttcctagcgatgcgcatccgggtcacgctaacgccgcggtttcctccgctcgattggttctactgtgggtctggactgatctccatgtcctgttgtggggcttttacagcctttgggtgagtctcagctgccracagggtctgagcgcagccgggcgagcacagcgtgaagggggatgggtctagagttctgcctcggtccttgtgggtgggagtctcttcgcctgtcccttgtcactgcagtgcttcactcacctcagccctttccttcacgctggcctcgccttattcacctcagcttagccttctcgcgcttccgtgcctctgtcgcctcgctgtttttcctcagcctcatcagtccttttccaacctcggtttcttgccttacgcctcagcgcttctctcagccactgcctctccttttttctcctcctcccttcttttagaacctcttttcccctacccctgatctgggatctcagcgttctttcacctagcgagacggcccagcttctcattgtgctcactcttcaccacgagaaactgagcctctccctagggtcctagttccttgtcccccaactttcttcagctttgatccttcctcctgggaccagtaggtgacagtgcttctcctggggttcttctgcctgtccttagctagaggagagctttgccaaagccccgaaatgggaagacttccccagcctgggggaagttttgccttaaggcgccgggttagactgaactctggtagcttccatagttagggtacaacaaaggcgttcctagttcttcgctttacctcagttttggggctctctcaagagcagctaacaggtggcaggcacacggtactgctagcagttgggctggcgcgatcttgttaattgacaagtcatgaagaagttctgtcagttttgtgttcccatgagaatggatgtgcacagctgaggcaaaaacgccaatattttgggacgttcagctctgttttcggcatggacgcttcttacaggacacttgtgatgatagaggacagaatttgtggagagatcattagccccagatttatgaatttattgtgttgtttccgaaaagtggtctgctgaagagttcactatagtaatttcaaagtaatctttaaacttagtatgcacatatgcattttttcatttttactgtattaagttttctatttgtcttcctcttccttcattagccagactttacttagaattacattacttagaagtacattacttagaatattcttctaacttttgtatttttttttccttaccatttccacctttgtagtaaaactatcattttctcattttgagatttagggcacctttcttaaatttccctagaggtttaaagtcatttataacatgaaggaattgcatttaataatggttagtgctccctttcccaaattttgtgatctagagtataggcttgggtaatctttattttttcccgatgtttatagtgtatatctagcacttgattgcagcggtttttgtgtcatcagtttctgtaatctataaattgtgctttaaaatgtagtacttcagtatgaacttaaatacagctttgagcacctgcttatcttttggctaattagctatagaaaaatcttcattatatgatacatatacatataagagtgtatagtccttggcttattccaaaattgggctctcttcagctgtttttagcaaaggactttggagcttggccatgttagtcctagaagccacggagaaggacccttctgattggctttcaggacttatctaactgctaagtgaagcctctttgaaagtttcttatgtgtacctcctccccactacctagctctagcttctgtccaacctggcctattttccatccttcaaaacaaaccccaatgtgtatggcttactccagctgcttccttaccttcaggtttgtgggcttcatttaagccatgggaatgccagcttaattaatgcagattaagataagaacattaaaccccaaaaatgatgggaaatcactctgtcttcaaaacaatagaaaataataaaatctagttataaagattatataccattgtcactagtaagaagtggcactcttatttacaaaacataaagaaattagggtttaggtctggcatggtggttcacacctataatccccagcactttggaaggccaaggccagaggattggccaggagttcgagaccaacctgggcaacatagacaaaattagcttggtgtagtggtgtgcgcctgtagtcccaactactcaggaggttgaggttggaggattgcttgagcccaagattttgaggttacagtgagctgtgatcacatcactgcgctccacaaggcaacagagtgagactctcttaaaaaaaaaaaagaaattacaacttaaacagttaatttccaaggtcatttttttttaagtcaagaagtcctatacatgctctcaagagtagcgagtgttaattccattaaagctgtaggctggaaagcacaatatagtatttagtgggtcatttcagtatatgtcatatatgaatgagactattaggataagaaatctgtgacatggattttaaaatccaaagccgaagtcattttgccttcaaagagtgactagagaaagaaactgttttgtgcagaagtagaagttgaaaagttttaggagtcttttgttcttctaaaatgactttggcctgtatattctgcattgaagccattaaatgaaatgagcatcctgtgtagtcattggagcagttgtgttccatgctgctgatcttcaagcctgaccctccacctagctgccaaaccaaaacaaacaaacaaacaaacaaacaaacccagagacagcttaatgtgtgtttgtttttaaagctcaggaaaaaaaattaccgttgattttctacaaaaatttctactttagttggtagccctaagggctcaatttaaaatatgtttctgcatattagttttaggcttaccaagttttcttattttggtttggtttgattatttttggttcttttttgtcattttatttgctaatgtactttgtcttacttgttttgtttgtttgttttttggtccttgaatcctgtgtttacggagatgtagttttttgtttgtttgtttgtttttttgagacaaaaaacaaaacaaaaccttgctctgttggccaggctgtagtgcagtggcacgatctcggctcactgcagccctgacctcctgggctgaagtcatcctcccacagcctccagaatagctgggactacaggttcatgccaccatacctggctaattttgaaatttttttggagaggcagagtttcaccatgttgcccaggctgatctcaaactcctggactcaagcaatctgcctgcctcgggctctcaaagtgctgrgattaaaggtgtgagccaccacccacaggcggctgatgtagttttgaaaatttaagaaacaaagtatacctccaacaagtccttgtcacttgtaccttgtagcattatggtttctgtgctgtgcctaagctgtttcatgacttcatttattttgttttgattataaataaaagcctcatggaacttctttttaggtagcggtttgtccaaaagatatttctgttctgcatgtaacaacaggatactttagctcatgtatgatttaaatggaggaagaatagttcaaaatagaaatgtgtattttaaaatattaggaatagtcagcactttgggaggccaaggcaggcagattgcctgagttcaggagttggagaacagcctgggcaacacggtgaaaccccatctctactaaaatacaaaaaattagctgggcgtggcggcgtatgcctgtagtcccagctactcgggagactgaggcaggagaattgcttgaaccagggaggcggaggttgcagtgagctgagatcgtgctactgcactctaccctaggcgacagagcgagactcatctcaaaaaaaaaaaaaaaaaaaaaaaaaaaatatatatatatatatatatatatatatattttggaatagtcaatgcttcccagatgttcatctaattggtttataccaaaaggttgaattgttatattgatagtaaggkggaaaataggtggactttctgttttctaattaacttaaaaatacaagtgcatattcttttacaaagtgtatggcttaagctctaaactaccctgttgatactggtatcttttactgtcagataacatagcaaataatggaacatatcatccttgatatttttatttagttccatcaacctaagttccagggtagctaattattaaatgtagaagtaatttaggcattttctctgttctttatagtagtatatttaaaaacagccatttaaaatatgggcttcctaaaatttgtctttgctgttttcccatttaagtatgcaatagtattttgaatcagaaaaggaatgtgtagtttaaatagtgccaacttactgtaaataagttaacagatcagcccaaggcagtcagtgcttaatatcgtgaagatcttactacagattgttttggatgcactttaacttattagctgtggttaatgtttgtagcagttagatggttttcattttcttccctagaaaataattagcaatactctttgtaatacatttatttcagcaaatattgtttaggcacctactgtgtacagttacagtaatacatatttaggctatttatgtggctaggtaatattgtaccaggctgatatgtacacttaaattctgaatttgatcttatttgtacatttctgaattaaacgtaagacaacataattagaattaaataaacttaattaacataaaatcatgttctttcgttatagatacaatcaaataattttcacttgggaaactttcacaactgaaccatgaaactctgtagtggtaaaacagtaaaaataaaagtgaactttatacagcacttactatgtaccaggaactattttaagtagtttacatgtattaactctttaatctttacaaccctatgaaataagggtactattcttttttttttttgagacggagtcttgccctgtcgcccaggctagagtgcagtggcacaatctctggtcactgcaacctctgcctcctgggctcaagtgattctcctgcctcagcctcctgagtagctgggattacaggcgtgtgccaccaagcccggctaatttttgtatttttagtagagatggggtttcaccatgttggtcaggctggtcttgaactcctgacctcgtgatctgcctgcctcagcctcccaaagtgctgagattacaggcgtgagccaccgtgcccagccaagggtactcttcttactatctccattttacatataaggaaactgaggtacagaagttatgtaacttgcccaaagtaacacaactagttatcaaagagctggatttgaacttagtctttttggctcctgagttaatcttatttgtacaagggtctgctactttagtgatttctttctttataggttgaggttaaaaatctagtttgtctgaaacacaaaagaatactgcttttggttaggaaccttaaggagggttttacttggcctttttactaatgctggcttaaggcaaattgcaaaccttttactaccgatgtttctcagatggcaaaaccatatattaagaaagcaatamgggatcaaattcctcccccgttagaaaaattatcttatggaagttaattactttggagttacttggagataagtcactattttttataaaatggcccctcgaagttaatttttttcttttaccttcagagtattaaacaaatttatgtaatagtcttaaaatacttaaatcttaccattcccatatgaatttaacaactttgaaatataaaacagaagactaaaactgaaacatctgatttgccactggtctcatttccaaatttggaaatttatgtgaaattaaggacattcatctcttcaggactatcatgtttagagtacattcatctctttagggctatcatgtttagagtagtatatttaaattagtgattttatttttactttagaaaagatgaggggaactttcacaaacaaattactttctaaatgagaagatgcaaataatagtcatttagaatattattgatcatattaagatgattcttttgttcctttattaagcccaaataaaaaaatttaatcaaatatctgggggaaggagattattttatataagttgaggtgcaccttaatgcaggagtcttgtactcagataatgatattatttttctgaatattttgaaaacagtcgagaatcgtagaatctggtttacagaaaaagtataaatatttctggtaagaagtgacatttgattaggaatactaattttaattctcatgttaactcttattaattgagacattaagtatactgtttttttatagtagcttttgtcctttttccacttggtgggaaagtattgttatggagctgaacagagtaagctttgctatgatgataatacttgttgatatttagaatgttctttacttttagttaaacatttaatttttgattcaaagcaattcccttttaaattgcttctgcaatttaatttaatttaatggcttccacattcaaagcaatgtgggtctgataatcagtgtatttaaacatttcaatagttttctttcacctgaaatttaatattgtagcaattactgaatttaggaaaattggtaggtagttgctatcagcaccgttactacgggaatacattagaatgattagcttttaggtgaaattgaattttttctttagtttccatagtgactgaaaacgatttaggtcagcttcacctgttgtgcccctcccccttttcaaaataagaggaacatttaatttagcacaatgatgttaattttttcctagtagattgatgaaatgaatgtgataatctcactctctttaccaaaagaataatccaatatatacatgtatgaattttgggggaatatttcagactttagagaacattataggataaaaaatagtacctaaatatcttataaaaatcagtgttttattacatcactgaatttttctcttttaaatttaaaaatgtcaaatttaggaaacatctgtgataatttaaagaataatttttgaaatctgcttttgcttttcaccaggtgttcttctgctataggttaggaagcagtagttaggcaacactaatgaataatattcttgagagtgagaactagagcttcacaaagagaataggccatctctcatatttagtggggcatttaataggtagataaactgaaaatttttgctttcatttctatgtattttttgttagtatgtatttatttactgtaggtacctcacattctgtgcaaaaaaaaatttttggaagtaactcagtggtttcctttatcttttttgttctctttcagaggcttgcttatataaaactacaatttagagaaccatcggccgggcgcagtggctcatgcctgtaatcccagcactttgggaggccgaggcgggaggatcacctgagaggcaggagttcaagaccagcctagccaacatggtgaaaccccgtctctaccaaaaaaaaaaatacaaaattagccaggcatggtggcaggcgcctataatcccagctacttgggaggctgaggcaggagaatcgcttraacccaggaggcggaggttgcagtgagccgagaccacgctattgcactccagcctgggcaacaagagcgaaactccgtctcaaaacaaacaaacaaaaaagagaaccatcaaactctgaatgttgtttcctctgtagtatgaagtggttattttcttccctttttgactggccattttttttttttttctgataaagtggcttttaaacttttctgatcatgacccactataaaatacattttacattgctatccagtactcagacacatatatgtacatattaatatttgaaatcgaaacagaagtttcttgaaacagtatctttactactggtgatgcattgtaatattaatattttctattctattttgtttgtttgtttgttttttgagacaggatctcaccctgtatcacctgggctgaagcgtagtgacgctatcacggctcactgcagcctcgacctcctgggctcaggtgatcctcctgcctcagcctcccaagcagctgagactacaggtgtgtgccaccatgcctcactaattttttttgtttgtttgttttgtgttttatagatgcggtttcactgtattgcccaggctggtcttgaactcctgggctcaagtgatcctcctgcctcagcctcccaaagtgctggaattataggtgtgagccactgtgcctggcctctatttgttttattgtttttaatttaaaacaaactgctggtttccattcactaagttgatatcagtgccgttactacgggaatacattagaatgattagcttttaggtgaaattgaattttttctttagtttccgtagttaatgcaatgtacctgcagtttgcaaaattttagtgactgctagatctttcccctaatattgtctttttgtaatggaaaatgtttaggtttggggccaggtgtggtggctcatgcctgtaatcccagcactttgggaggctgaagtaggaggatcacttaagcccaggagttcaagactagcctgggcaacatagcgagaccctgtctctaccaaaaaaaaaaaaaagaaaatgtttaggtttgctagtttttttctctgcaatgtacgtggatggattctgtaaaacttaacctaaatagctgcagaacaatcattgagagagggaggtcctgttgccctgattaccattactgtcatccctgttctttaccatttctaggcacattattttaaaaacttattttggaatcgtgaggttgaaaatgctcggttgtatgctgagcttctatcgttagaatcctttgctagtttccatctaacagtccaaagtttaggtcctttcagttggttttcacaaaccttgcttctgttcttggcaactagtcaaaaggttacaaagctgctttattctgctctcttctggcccaagtccagtctttgtaaaccaaaaaaagaggactgaggaatgaagcagtttgctcatgtgtatatggtcaggtgaaataacatgactgaagagtaattagggtttgcgacagtggattacatttatgtattgtcccaattcgtttcctgtaatcacaaagggggaaagggygtagaaatatcaacagttccttgcctatcctagctggtagagtgaaacagggtcagcagacatactctactatttttataccactacctgctcttaacacttagtgagcacttactatgtgccaggcactatttaaagcacttyacttgtgttaactcatactcatacttgggaggcctggggaaaaaaaatgagaatggtaaaggataaagaagaagacttgccatcttctcgtatgttctcattacttggcttaagaattctggctgttgatgactatagtatggcatatcatacattttaagctcagtcagcttttaaatatcaccagtcctgtctgcattgttccattatgagacacatagctgtggtttgagaactcaggctttgaagctagcctgcctgggctcgaataccaggttggtgacttactatgtgtatagcattggggaagttactctctgtgccttagttttctcatctgtaaaatggtgataataacaaatagcttctattttatagacttattgaaagattaaaataattaatgtattacctgggcatggtggtgcatgcctataatcccagctactcaggaggctgaggcataaaaattgctaaacctgggaggtggaggttgcagtgagctgagatcatgccactgcgcttcagcctgggtaacagagcgagactgtctcaattaaagaaaagaagaagaaaaagaaatagttaatatattaaaagtacttagaacggtacctgacccataagaagcattccataaatgtttgctattaatagtatcaactcacagttggagctcctgagagtgtttgtgactatgatgagttctgtatatttgctgagtaacagggcatgattgacatttaatgttatattgctcaggagcttgaaaatatcttgtcttgaggacctgtagggaaagttcttgtgtagcgtgttggatttaaagctaaaggttatcaaggctacaggcccaacttttaaaatctctcttaggaaccacttgttatttgggccgtaatcttaatagttttaatggtttgctatttgggaaaasttaagtggagctagttagtgaattgactttcattcaagaccagatttctttcctttttatctttggtgtaagatatttatttattttatttttctttaacaaacacttatattatcctgtctgatggagttttgaaggggtaaataaatttggagaaataaaacattaataaaaaaactgaacctagattttacagttcttctaacagctaaagacatagatttcaaaagacttagttctgttagtatagtgtatagtcagtgttatccaaacactgataagctgatatataggactgatgtatagatgagatatataggtatgtagaatgttagagaattgatgacatagggtacaactttgtataactggaagcagcacatttatagaatattcatgttgtgattctcagaaattttaactgcacagattaaagaaggatgaagataaagttttagagtctttgagtctggatcttcaaacagattttttaaaaaatttcttttatcatattcttattctttttgatttcttgtttttttttcatgtcacttgttaacacccactacaaacagagaaattcttatgctgacaagttactaaaattggagagagatccaaggagtgttggaagaaatatagaagaaccattgtactgttattaagctcactttgacatagctaattcaggttaacctcctcctycttaatactttttactatggttttgaaatttttcctttggaacacatcttcctgtttcattaggaacttgttggggaagcacggtggctcatgcctataatcccagcactttgggaagctgaggcaggcggatcacctgaggtcaggagttcgaggccagcctggccaacctggtgaaaccccgtctctactgaaaatacaaaaaacttagctgggtatggtcatgcacacctgtaatcccagctactcaggaggctgaggcaggagaatcgcttgaatccaggaggcggaggttgcagtgagccgagattgcgccactgtactccagcctgggtgacagaataagactgtctcaaaaaaaaaaaaaaaaaaagattgttttgtaaacaatttcaaaggatgatttttgttaagtaatattagaaattataaaaacagaccgggcgtggtggcttgcacctgtaatcccagcactttgggaggctgaggcgggtggatcacctgaggtcagaagttcgagaccagcctgaccaacatggagaaccccgtctctattaaaaatatacaaaattagccaggcgtggtggcgcatgcctgtaatcccagctactcaggaggctgaggcaggataatcacttaaaccctggaggcggaggttgaggtgagccgagatcacgccatcgcactccagcctgggcaatgagagcgaaactctgtctcaaaaaaaaaaaaaaaaaaaagaaattataaaagcaattattcttagagagacattttttttcttttctttctttcttttttttttttttttaggcagagtcttgttgtgtcacccaggctggagtgcagtggtgcgatctcagctcactgcaacctccacctgggactacaggcatgtgccaccacacacagctaatttttgtatttttagtagagacagagttttaccatgtgggccaggctggtcttgaactcmtgacctcargtratccacccacctcggcctaccaaagtgctgggattacaggtgtgagccaccacgcctggccgagattctatttctggtaaactagtatttttttctattaagaatttgttagagcctaaatatatgtatatattttaaaaagcaactttctcagtaagttctgacagtgttttgttaagtgtaaagttactataaatagtcctacagctgataatactatgatatgttagtcatgcctccagaacaaagtagccagaagaattcaccaaatttactgcagtcagttggctgcactatttatttatggaaggtattgaccagtatggtgatggtttttatctgtctacagaaagtcccatcagggaggtgtaggtggttgcagtttttctggttacagaaatgtgatttgtgctgttgcctaagttatgagagctgaaagactctcttaggatcacactaaagggagccttaagagaggttagctgagtgtaggtctgctggatatttgtgtctgctttagcagggctctgaatacaaaggattctgagtggatatgttagtaagtatgttagatatttttttaaaggtattaaatcaagaaaggtggctttcagctgatgagactttaatggatttctgaaagataggaaacagtgagaccaaattgttggaaaaaataggagaagaaatcacagcgaaaagtatatgtagaagtttcagaaatgtagcagactccaggtaaacaaatatgaagaactgaagggtacctggaatatttatcaatggcagcaatctgtgagcatttattcaagagaaatggctgaatcttggcaaaaacagcaaactttgtggcattttaatttgtgcttttccctctagctcctcagtagccttgaaaaccaacagcctccaatcatggtgaaaaccagccactggaagggatagatcgagtttagagttcttcaaaactccattcccagagttgtcattattttacctagctagtagttccttgaaaaacctcattcacaagaccatctgtatttgacctgacttgaagctcacttagtacaaacaacctttccccttgcagtgtttattgaaaacagttaaaggcagttgttgaacaacttgagtgctcaccatcttgagtgacagtgaatagttagatcgaataataggctaaccaagaagcttaaaaggaaaagctgggaaatgagatgttcataaggaaatttaagaagctctggtatatttctgggaatctagaaggctatgtgcatgtgtagggttgtgtgctgcatgcttaggaaagaactaagaaggtcctaagctgtcagttctgattaatctctagactttgtgcaagcaagaagtaaaggctaaggaagggttgtaaactgcttggctgaatgtgaaaggtatgccctaacacatgtagttaggctgtcaatacacactgagtcttatactggttttaagcatttaaggaagtctctgcccagtcattagctgatcacaaatgaacagcagagactttagtgaccacatatgatagaaaattaatattttagataattagttcaggaaagtcactaaaagaaacaacaataaacagtaacaacagtaaacagtaataacaacaaatacctggtaggggaagaatctgatttttcgagttgtcacattaccttatttaaaatgtttagttttcaagagactgttattacaaagcatgcaaaaaaccacttaagtatggtccacacataggagagaaagcagtaaattagaaaatgttccctgaggaagcccaaatgttagactttagtattaggcaaagactttaaatcagccatttaaaatatgttcaaagggcctrgtatggtggcttgcacttactgaggagggacaattgccactgcactccagcctgggtgacagagcaagacctcatttctttaaaaaaaaaaaaaaaagaaagttcaaagaactaaagaaaaccatgtctaaataactaaagtaaggttttgtgaactatattatattagtccacttggtttgccctaacagaatactatagattgggtggctaaaataacatgtattttctcacagttatggarattgaaagtctaagatctcttttaaatgagtactaacttctattttaggtataattgcttctgaataattgtatgttgtatagttctacctctagtgtttaagatagggtagaattcttccaccatttcaatttaaataaggaaagggtatctgaaggtagtcacatttagaataaaaataagaatttatacaatttgaccttaagttatctatgtaatggaaaaattcttctgttatgatggtaacaggtaatagagcctacatttcaatctctgtactcataaataaactgttgatccaactgtttttatagttttatctgccagtgtttcagatctcgttactaataaataaactatttattgttccaactatgtttataattttgttagccaacatttcagatctctgtactcataaaaaaactgtggtctgtgtttataatttcatttgtttgtattacagtcatagaattttatgcagtttcatatgtgattttgtctaaaaatctaagtagatcctattataacytttgaggtataatttacatacatttaattcttttaaacatacagttctgtaagttttacagatgcatacaattttgtaaaaccacatcgagatacagagggccaggtgcggtggctcacatctgtaatcctagcactctgggaggccaaggcgggtggatcacctgaggtcaggagttcaagcccagcctggtcaacatggtaaaaccccatttctactaaaaatacaaaaattaggctgggtgcaatggctcacacctgtaatcccagcactttgtgggggtgagacagttggattacttgaggtcaggagttcaggaccagcctgggcaacacggtgaaatgctgtctctactaaaaatacaaaaaaattagccaggcatggtggcacatgcctgtaatcccagctgctcgggaggctgaggtgggaagattgcttgaatccaggaggtggtggttgcagtgagccaagatcgcgccactgcactcctgcctgggtgacagaggaagacatcatctcaaaaaaaaaaaaaaaattagctgggtgtggtagtgcgtgcctgtagtcccagctacttgggaggctgaggcaggagaattgcatgaacctgggaggtggagcttgcagtgagccaagatcacgccactgcactccagcctgggcaacagagtgaaactctatctaaaaaaaaaaaaaaaaaaaaaaaaaaaaaaatatatatatatatatatatatatatatatatatatatataatagtttcatcaatcccaaaaaggatcccttgtgcctctttatagtcaaccttttttcccatccccaacactggcaaccactaatctgttttctgtccttgtagttatgtgatataaatggaattatacaatatgtaggcttttgagtctggctttgtccacttagcataatgcatttgagtttcatccagattgttctgtgatttactgtacagtattccattgtatgggtatactgcagtttgtttattcatgtgccagtttgaagggcatttgagttgtttccagtctttggcatatatatgaacaagctactgtacacatttatatacaggtttttatgtgaacataagtattcttttcacttaggtagatacctcggaatgggattgaaggattgtatagtaagtgtatgtttacctttataaggaactgccaaactgttttccatgactggctgaactgtaccattttgcattcccaccagcagtgtgcaatttctaattgtacattgttctagttgtagagttcttgttgttccacatccttgccagcatttggccagtttttttatttttattttagacattctagtaagtgtgtgctggtatcatatatacatatatattcccacccttcccccagggctctctgtactagtctctgcttagcctaaacgaaaggatctaaatctacagaggccaacagtcccaaacttttggaatctcctctgaatgcagctcattactgtttactagattccagacttcattcagattttactactttttctactaatatcttttttctactcaaggatccaattcaggataccactttgcatttatatagtttaatttttatttctggctgtaactaacatgttattggtttataagatactgctactagttttggttctgttttttgcaagactattttttcagttcctatctgtcccaaaatgctttatatgtcacataattttttkggggggaatgaattcaatttgtgtgtcatcattttgagttgcattcagaggagattcttaaagtttgggactattggtctctgtagattagatcctttcatttaggctaagcagagactagtacagagggcccctgggaaaattgtttcaattaagagtctttatcaagaaatgattaagttcctaaattttacccttatttactttgttgcttgaagttggaattaacaactttacttggttaaattagctgagcttttatagtttcattctgtttgatctgtacatttttgtaaagggtagttaaatggcatattcaacactgacatgaacttttgatgcagcagccaaaagtaattatgatttctttcagaatatgtctttaatacctggcatattttatcctggattctatttcagtgtttttcttccagcttgaaatattctatgaatatgtttagaaagaatttcagggctctattcaagacaaacaaaaaagaaatcccaaagaaaaatacatgcaaaaaagtaattgttgagttagaaaagtcacgtttttccaatgaaaaaaatttctgatcatttagtaccatattatgatgtgtttatcaacgttcttgatatagtgctaagcacagtgttacaaagttaaaaattaaatatttagtaaatgatttatggaggagcatattactgtataactattacatgagagaaatgcaaaataggaacttcaatcaaaacagaaaaatatgagctcagtcttgaggcatagtttacgtaagattgttatttaagataaattggaaaggaggacttttatatatttcaggtttaactctagcagtaatttttttccctaagcagaacacatcaaacagtatggtgaggctaggcgtagtggctcacgcctgtaatcccaacactttgggaggctgaggcaagcagatcacttgaggtcaggaattcgagaccagcctggccaacatggtgaaaccccatctctactaaaaaatacaaaaattatctgggcgtggtggtaggcgcctgtaatcccggctactcctgaggctgaagtaggagaattgcttgaacctgggaggctgaggttgcagtgagctaagagtgcgccattgcactccagcctgggtgatagagggagactccatctcaaaacaaacaaaaaacagtatagtgaatgtatgcagactttaagtgctgtcttgcaaatactagtgttgagtttgttaaggcgttggaaagatcttgtaagatttctcaagatccatgaagtacctgggactgtcagtgttattgttacctgggtatttcttccactatataaatttaaagtttatcccagagtgacagcaggagaatgctaactttggaattatgtaacactttcattagagaggcaaacttgacaattatttggaaagtttttaagtgttttatgtttattatttttaatgtctggaagcatttttttttcagctgtatgtacagttgtgttctcttatcttatttacatttctttctcttttttttgagacggagtctcactctgtagcccaggctagagtgcagtggcatgatctcggcttgctgcaacctctgcctcctgggttcaagtgattcttctgcctcagcctccggagtagctggaattacaggtgcccaccaccacgcctggctaatttttgtatttttagtagagacggggggtttcaccatgttggccaggctggtctcgatttcctgacctcaggtgatcacctgctttggcctcccgaagtgctgggattacaggtgtgagccaccgcacccggccccttacttagatttcttcatttcccactttcgttttcagtttgtctgtttcattcagtggtcaggagatggtcaacaagcccaaacagagaggtaatagcaaaaccaagcaaasaaaaaacataaactttgctatttgtattagtttcttgtggctgccataacaaattaccccaaacagactttgaggcttaaaacaacagaaatttattctttcacttctggaggccagaagtctgaaatcagggtgttggcaggactgaacttgctccagaggctttaggggcaatcatcccttgcctctcccagcttctggtggctgctgacattccttgaccgtaaccctccagtctcttcttccattttcacattgccgtcttctctgtatgtgtgttaaatgtctgcttttctcttataaggatatttgtgatggcgtttagggcctatgtataatctcatctcaaaatccttaataacatatgcaaagactgtttttccaaataagtgaacattcacaggatctgggtattaggctatggacccatctttggctagaaatctatttcatgataactgtgtgtatatgtgtttgggaaaggggatttcccccctcctctcttcctcttctaccccctctttcccttccttccttctcctcttccctccctytctcctttccctcccaccctctttttttttcttcttcttctctctctttttttttttttttaaatagattgggtctcttgctgtgttgtccaggctggtcaacataccagattaccagattactcctgggctcaagggatcctcctacctcagccgccccttcccactttgaccccagccccagttaaaattacttgttttggccggccatggtggctcatgactgtaatcccagcagtttgggaggccgaggtgggtagatcacttgagctcaggagtttgaggccagcctgggcaacatggtgagactgtctctactaaaatacgaaaaattagccgagtgtggtggcatgtgcctgtagtcccagctacttgggaggctgaggcaggagaattgcttgaacccaggaggtggaggttgcagtgagctgagattgtgtcactgctctgtttcaaaaataaataaataaataaataaaattacctgtttaattaacagtaagtcaggctgggcactgtggcttaagcctgtaatcccactttgggaggccaaggcgggcggatcacttgagaccaggagttcgagaccagcctggccaacatggtgaaaccctgtttctactaaaaatrcaaaaattagccaggcatggtggtggacacctgtagtcccagctacttcagaggctgaggcatgagaatcgcttgaacccaggaggcggaggttgcagtgacccaggattgtgccactgtactccaggctaggtgagattgtgacactgtactccaccctgtctcaaaaaatcaaaaaacaaacaaacaaaaaaacccagtaaatcaaagtctgtacattttaaattaaggacttacggttataaagagaaatcaatttgtttttgtgggtttttttgctagcctgtacagggagttaatacgtagcataaaaagaatgtcagggagctctctgagtctgaatcttttctgattctgagggctgccagattcagaagtagctctttgttcaactaagctctttattcctctaaagaaaaaaaaaaaaggaatgttatttttggatttttaggaggtccttaaagtgccaatccatacattgaaaaagaaattttgagtttaaatttaaaatatttaaaaacgttaagaacatgatgttatatcataagatcaaagtaatgtaacataggatagagatgtaatgaaagaaaaggaataagtagcctaaggtaataatattaggaatgtaattttttttttttttttgagatgggagtcttaactcttgttgcccaggctggagtgcggtggtgcgatcttggctcactgcaatctccacctcccgggttcaagcgattctyctgcctcagcctcccaagtagctgggattacaggtgcctaccaccacgctaattttttttatttttagtagagacggagtttcaccatgtaggccaggctggtctcgaactcctgacctcaggtgatccacctgcctcagcctcccaaagtgctgggattacaggcataaaggaatgtaattttaaaagggagggttttatgctcaattccacataaagaggacaaaaaacttcagacaagggagttcagagttttggattccaccactgtttctgctgcttacaggttcatgaggcagtgccttctcttttgtttaatttcctcaactttaaaataaggattacatttaatgatctgtgatactctatcctttgtagcatcttttgttatatattttcttgcatttccaagagagaatcgtgtctgtccaatagagtgaaaccaaatgtgaagtctcttccaatagcaaattctttaactattggaagttcgttgcttttgcttagagctgtaaaatgaaccaaccctgagtttgtgtacagtgtctaaataacttcttaggaaagagatgacacagccagaaaatcaaatgaatctttctgcctatactgttgtcacaaacagggtaagattttttaggtaaggcaagatcactgtgatttgaaatgcttttccctcaaaactgaaattttttttctaatggaaaaagttgggggcaagaatgaagaatttgtgtctaattttagcttaatgtcttgaacattttttatataagcatttaaaaatatgtatttaaacattttactatacttttaaatgtaagctttgtatctgcttttgattcttatcaaattatatgtaagctattattaaactaacataaaaacatgtattcaccttttaaataagcttgtattgaaatagtttacagttacrgtgtagttaaacttattgttcacatgttgtttgtttctcatttttcgtttctgtagacaacamacttatactatttttaaaagtagagtttgcttctttcccccctgtatgtaattcttgggtgagcacctaagaaaaattattcagattaggctgtggccaatcttatgacctcttttatactttatccaggaacagtctgaagacacatatgattttacagctgtgcctgactgaatatgtctttatcttctcataacccagataacacttggttttattgtttagattttttttggtagcttaatatgtatgaagtcgtatcttaagaatattgcaatttatatttctccaattagtagtgagacagtcttttttctcaagtgccgattgaatctctgtggtttaaactgcctgtttttatcctttgacaggtttatgagttagtcattgtttgctccctaataatagatgatcgggaaatgttgaattggtttggtttatattataaacattgtkttatttatcataattcttgcagatattgcctgaatttataatattttaatcttagatttgtttttttcattgcatgaaagtttattttacataattggatttgtcaaattcttgtttatgctttctttgaattgaccataaattcatctcttttccatagtgagataagcttactgttctgttttctccaaagttttttgaatgtttagttttttaatatatttataattacttacagcatatgttgatgtggatattttttgcatgttggtattcagtttttctgacaatgttttctaaatactgattttttctccatttatttcatattttaaatactttatagatttgatctttttttggcatttctaatctcttagggttttttttgtattttttattgtaaaatatacgtaagataaaattaactgttttaaccatttttaagtaaggtagtacccccaccatctgtagttttgcttttggcggttttagttaccttctatcaaccttggtctgaaaatattaaatggaaaatttcacaggcaaataattcatcagtttaaaattgtgcactgatctgagtagtgtgatgaagtctctctccattttgctctttcctgcctgggtcatgaatcatccctttatccaacatattcatgttgtagacacttcccgcctgttactcacttaggagccgtcttggttatcagatcatttgttgaggtatctgcagtacttgtgtgttcgagtaactcttttttgttttttttttttgagacagagtttcactcttgcccaggctggagtgcaatggcgtgatctcagctcactgcaacctccgcctcccgggtcctggttcaagcagttctcctgcctcagcctcttgagtatctgggattacaggcatgcgccaccatgcccagctaatttttgtatttttagtagagatggggtttcaccatgttcgccaggctggccttgaactcctgacctcatgatccgcccgcctcggcctcccagagtgctgggattacaggcatgagccactgcacccagcctgagtaactcttattttacttaatggccctgaagagcaagagtagtgttgctggcaatacagatacaccaaagagaagtgcattaagtgaaaaggtaaaagttctccactaaataaggaaagaaaaaaaatcatatgctgagattgttaagatctacggtagggctgggtgttgtggctcacacctgtaatcccagcactttgggaggccgaggcgggcggatcatgatccagactatcctggtcaacatgctgaaaccccgtctctactaaaaatacaaaaattagctgggcgtggtggcacgcatctgtagtcccagctactcaggaggctgaggcaggggaatcgcttgaacccaggaggcggaggttgcagtgagctgagatctcaccactgcactccagcctggtgacagggagagactccatctcaaaaagaaagaaaaaaaatctatggtaagaactaatcttctgtccatgaacttttraagaaggaaaagaaattcatgctagtttttctgtcacacctcaaactccaggttttggccacacagtgtgtgaaaactgctgagttaaaatttatcataggtatatatgtataggaaaaaagacagtctatatgggtaccatctgtgggttcaggggtcaactgggggtcttgcagtgtatcccccccttggaaggggagactactgtatacaattcagtggaattaagtacatttacaatgatctgcagtcatcatcactattrtctagtctctttatttaaggtattttcacttcaacctgcaacattattgctgttactcttggacaaattgtttaaatctctgaatcccagtttccttgtttgtagcatgaggatgataataccacctgcgtcttagttgtggagacaaaatttgatgagatagtgaatataaaaattacttggagctggatgcagtggcacatgcctgtagtcccagctgcttgggaggctgaggtgggaggattgcttgagcccaggagtttgagaccagcttgggcaacataataagaccctcatgtcttaaaaaaataaaaaaaataaaaactaaaaactttgtgtattatatatgctcagtaaatgatagttctcttatctttcccactattattggttttaaagaatggtgtagacaggttttccttaaatggcctctgttgttctcctttctcccaaaatattcattattwattttgtctaattttcattaagaaatttgtaggtattggagtaaacctttgttcacttctttttttttttttgagrcagagtctcgctgtctcgcaggctctatatatttatatatatatakakagagagagagagagagaggatggcttgcttccctctctacctaactgcatgttgaaaaataagcatttgttaatcttaaacatctgtcacatgagtcatacactgggttgttttttatatacgtgtatgcacacattatttgaaattgaaagcaacgtctcaatggatttgaaactattaaaggctattgtctaaaacgtgaaaaatgtataactaaaaataaatgcacatattaatatttaaagtgcataattaagaaaacctattggtgttttgtttttcttgtataccartaattaagccactactgttgacactatttggctttctgttttaacattgaatgagtgaaagtacttcttatatttatgaatttgctgctaaaatcttggccaaaaaaaaaaaattgtctaaaatgtgtgggtgaaaaatgttaatcatgtatgtttctaccttcccccccaaagttggacaccaactatataccgtaggttgcttaaggtgatttcactattgttaaatcaataagataaaaatgaaatagttgtgtatatgcaacattgtgtacagaggagataatgaatagtattaaacgttctcatcttcctttaccttttgttccctaatacctattctaccttttaaaatttcagacttcactgctctttgaattcataattcaaatttgcacattattattattggaaaatcatatctaataaaggttttaggccggatgtggtggctcacacctgtaatcccagcactttgagaggccgaggctggtggatcacttgaggccaggagtctgggaccatcctggccaacatggcaaaaccccatcgctacaaaaattaaccaggtgtggtggcgcacacctgtaatcccagctacytgggaggctgaggcatgagaattgcttaaactggggaggtggaagttgcggtgagccgagattacgccgctgtgctccagcctgggtgacagagcaagatgctgtctccaaaaaaaaaaaaaaaaaaaaaaggttttagttatttccccccccaaaaaaaattaaaaataaaaaaaaatatatatatatataaggcactttggaaagtgtagtaaataaacttaaaatacaatgtagtcagtgagcaaatctatggactaccttttttctatgtgggactgtgtcatagatatccagttaactcctgaatatctctgtacatacttagctgcatgcaaattctctttctaggacctataaatcagactttgccttacttagacacttcttttgaagttgtaattaagagtgatatatgccttgttttcatggaaaacaatttgacctttattctgtgctttttttttttttttttgagatggagcgttagtcagtttcctgtcgcccagcctggagtgcagtggtgcaatctcggctcactgcaacctccgccttctgagtttaagcagttttcctccctcagcctcctgagtagcaggaattacaggcgcgtgccaccacgccagattaattttttgtatttttaagagagacagagtttgaccatgttggccaggctagtttgaaactcctgacctcaagtgatccgcctgctttggccttctaaagtgctgggattacaggtgtgagccactgcacccagcctattctgtgcttttaaacaaacagaacacacacacacacacacacacacacacacacacacacacacctacatatatttaatttctcttcctaagcctaagagctttaataacacattgaagcaacctaatttcttgcttatggccatttacatttacagggtacatagtatgttgaacttgggacaaaacagaaactatgaggtaggaatctaatttgaattttgaaataaaatatttgttactaattatttcccttctaacttctaaagagtaaaaataaaatttatggctgccatattacagaaagatcctgcttttatttttaagcatgcaaaatctcaatagtattcaaaattgtgtggctcttgaatcaraccaaagtttctattttttcactgtcagcattcacaggtagagaagtgtaaagtcttaggaaatactatttctattctcaatttaaaattttctcagaattctgtccatgaaggcaaatgaatactgacaagctctatttccaaaaaaggtgataaaacaagtgtatttagaaaccagtagtaagaattgaaattagaaaattgtgaaaagacattactttccaaatgttctaaaggtacttaaaagattaactcggggcatgtcttgtaatttcatcagctgtttgactaagttttaatttattttaattacattaaaaatccacttttcacttctgtgttacaactgttgtattacttgatattttaaaagatgaatctcactgaatgtaaaataatgtcaggttacattaatggtaaaaacaaacaaacaaacaaaaaaaaaccgttgaccgggcgcggtggctcacacctgtaatgccagcactttgggaggctgaggtgggcggatcacgaggtcaggagatcgagatcatcctggctaacacggtgaaaccgcgtctctactaaaaatacaaaaaattagccgggcgtggtggcgggcgcctgtagtcccaactattcaggaggctgaggcaggagaatggcgtgaacctgggaggcggagcttgcagtgagctgagatcgcgccactgcactccagcctgggcgacagagcgagactccatctcaaaaaacaaaagacaaaaaaaaaaaacacgttaaattctagaactaatacaaggaaactaatactaagatttttacagtaattctgtacttcttttattaccaagttttgcaatattgtgtcttagttatactgtattttcatctcttgctagtaagtatgacttttgattgtatagcatgcaccacttgtggaaaatggtatgaagtcttaataaaagttttaaacattgataaatgctgggactgtgatgaatacttgcattcttatatttagtatgttctgatatttcaggtctttcagggtacaaattattggaaggcaggagaatactgtattgatggaaactagtatttagatgaatgttttggtagaattacataatttgtggtcattagtgcattttatacagaatgtaccagaatgtatgtttgcaaacttcccacacattgtatgttgccagtagaatcccgggggattttgtaatctattctttccttgtaggcagctttttgttttaaaatgatcaaaattattcgtggtcattgaccagttattttgagatagcaagcctggtttttaaacttttcttttcttttcttttttgagacagagtctcactctgtcaccaagctggagtgcagtggtgcgatctcagctcactgaaacctccgcctcccaggttcacgcgattctcttgcctcagcctcccaaggagctgggactacaggcttgcgccaccacgcccagctaatttttgtatttttagtagagacagggtttcaccatcttggccaagatggtcttgatctcctgaccttgtgatccgcctgcctcggcgtcccaaagtgctgggattacaggcatgagccaccatgcctggccagttcttttcttctaaatgtagaaattatttgtgtactttttattctcctagattgaaaagccaagaagacagagaattttaaagatggaaacaacaaagggtgcttrttttcacagaatagatgtagaaaggaatgtctttaaatgtttcccttaaagaaggttttcttgcagcttacagaatttatgtcaagaaatagtagattcttctttttctattataaaatcaatttaatattaccatatttctaaaaagcaaaattcaatattttaacatttattgataatttatatccccaccatttatactaatgtttctatgttttttcttttaaaatgattcttcattattcaacttgatagagcgttttcttactttttaaaacccatgaccccttttgacctgtaagtagtattatgttctcctttaatgtaattcagatttttaaaacgaattagtttttgtgtttaaaaacaaaattaaaccacattattgagtgtgtatacacataaatattttttaacaattattcttaccttcctcctatcagagatgaaatttataactcttcccccatggtggagtggatatcccttttatctcccttgctgaaaatatactagagattgtagttttatagtcatggccttcaattagggaaaacatgtaatgttgtaagttttctatggatgagaactggtcacacaaaaaatcaacaacttggccaggtgtatgcctgtaatcccagcactttgggaggctgaggcaggcagatcacctgacgtcaggagttcaagaccaggctggccaacatggcaaaaacccatctctactaaaaatacaaaaattagccaggcatggtggcgcgcctgtagtcccagctacttgggagcctgaggcagaaaaattgcttgaacccgggagacggaggttgcagttagccgagattgcgccactgcactccagcctgggtgacacagcgaaaccctatctcaaaaaaaaaaaaaaaaaaaaaaatccaacaaatgaggtattgaaggtattccatttctctaatgatgtggtcctattttgttgtttctaatgggatgaaataatatatgtacataatgtacatttagacagtataaaatgaaaaggattgtcccttaaagaaaagatacttcaatttgaaactaagacataaactagtaaaaccaaaaatgtttgatctttcatagctgtgaatcagttttaggtcacattgactgtgttgttctaagctgagcaaaacaagtgcagggaagatagctcctatgagctttacttattgcactctgtaattctgtatcactagttacctgtgtcatgtagtaggagaacttagcttttgaggctctgtgtatgagctacagtgagagcattgagcatcaagtgcttctgacctttaaacttcttttttcttttgatattctaaattggggtagggaataaagctgtgttagagttggacaactttgcatctaattgtaaccttatgtgtgttttctctccttttcacattctggagtgtggctctaaaataaagttgtgttgtattgcaacacgacagagtaatagaagtagagtggtggtatactggcataacaagtttttggttttcttgttatttgtctattttcagtacttgtgtgataagattatatacttactttagctttgtatgtgagttaggtacagtggttggtagaaaagctaaaaacagctgtgactttaattaaatatacaagcaatcacatcttttgggagaagtgctggtttcacttttgttagatagaaatggagtatttcatttttataatgtatgcagctttctaatttttgtctctttgtctcctgtcagtaggacatggtaaggtggacttagaatcccatttttccttttttgtttgaaaatcaggacagaaagagcagggtctgagaacgtaaagattttscttaaataattgggcagtacagttagtagaagttcattatttcagawttaaattaggtcctatctttggatgattattttctttagttctaaaagtcaaggtttcactctacttatttatttttattattgagatgcagaagaattgagttttccttgaaattgatgacatatagacagatagttggttgtgaatgcatttagttgatattccggtttgtcctatttaaagtgattctgtgtgtctgtgttaacagttatgtaaatgttccacattaaagcaggttagatgttatcataacttgctgacttgctaggccagtccctatcatttttagtgtaactctaatccttaaaaaaatattttattatctgcacgtggctgtcattgtaaaatgttcaatgcattaggcaccatagtaaccagcagaagtggttccacatgttggcttttgcaaggtattataaaagtcattgtgtacacctctcttgatttggtgtagcatgtcatttttgaaaagccacgtgcaggtttgagattttgtgattggaactcacgtagaaagcttggggtagcaagatactaaaaaatcattctctgatggcctcaatgataatactttaagagtgtataaagctttgaatcctcctttttaaaaacagattgtgaaaactgctgagagagacttgcaatccagtcacataagtataataaagaaatattggtcctcatggaagaagagcaagatttaccagagcaaccagtaagtatttcctttaacagtttaaagttgattgtagaagagctaatcttaagagattttaattattattcagttatagattccaaattagaaataaaaataaggaaaagattccttgtttcctttcaagaaaacaatgttatatttttctaacttaattctaaggagtctaaggaaaatttagcattacgaaatgaatattgcatttagaaatgtcatttaaaaaaataagtggctagtgttacagtttttagaaaataaaagaggacgtctctttactgatctgacagtatatcaccatttctaccagaaaatttagttttgtttttacctaaatttccttgagagttaattttttaaaaagtagtagtagtgaggaagttataatttgaccactagctaattcttaaaaacagataaaaccctagagactatattgaattcttaatttcttttaaatattgaacataataaaataattttaaatgtccccaggtgatatgggtttatcttctttttggtttttggcccttaatatttaaaaaacaaaagcaatagtgtcattcttttaagataacttttatgctagagggtcttttccttttgtcttcagtttctttctctgaagtttggtaaataccgattcaatttgctatcctgagtgggcctcttacatttcatattaagagaggatacagcatggtacatgtttactttatgaaaatctaacctataaaaatttgaattttgaaagcaaataataggatatgtttttcgtgttctagttgtattctttaggtatactagctcccatttaaatgataaagtcctttaatatattttaaatatttttctttatattgagaaatgcatattgatgattactttgtcattattcttctagccctctcagttgaggtaagtataaaactaggaagacattagcaactggtaaaaagaccttttgaaacatttgaartgtgatccctatccctggtgggactttaattatcagggaaatggtagggtkaaaaattatcttgagcagtgtgtttaggatttacactactggaacaaatagctgaattatagatactatatgtaccaggaaaaattatgccattgagtttttaatgtggtaagacaaaggtctagtcatatttttaaaagacttatgtaagtgttgacatactgttgaaatatgggtattgttagttackccttacctatttaaggtaatgagaattgtgaggctgacctgctaacaagtcatctatctcttctgccctgcttcatttccttgtcattctcttgaacttctgtaacatgatgtgcaaaacctgattattacttcagagaaaggtaagaaattgaagcactttaaaaccaaaatttctgctgactataaatggttgtcacagggcattatttccttatygatttatgcccagatcttaatataaaaaggtgattgaatgacgacatggagagatcagtgccactgaaagaaaagttgagtgtttactcatagttccccttgaaacaagaggcatagcatgccacacgggggaagtaccactgttggtcaggaggcaaaaaagagtgggaggaaggcacgggccacagacttaatgaggtttccacaggaaaagcaaggtaggcagggtaaacagcttagcgttgactagtttgaataattcttcaggctttgtggcctgtggactatccctggttttctggtggtactttgtcctgggttgatttatgatttagggcaggagaaataggggcttagtgtgtgagagttagataaaggaggtggttcagagtatgggcactggatctcaggggagataaaaaacaagtttggccttgagtttggctctgtaattaatggatgtcaaacagacaaatacagaatctawgaaaacacaatacttattaatgtttaaaatagaacaggaagagtaatgacacattttgaggtaaaaaaaaaawgcttttcacaggctgtagtggagatctaaaatatgagtggaaagaatggtcccatcccaagttgatgataaagccaatatttttaatcctagagatgttactgatggtcgttattattgaagttattttaatcccattgtctcttcttgactcttccttattgaattatcccttctcttatttctccactaattgctagctctacctcaagattttgttcagatcggctggacgtagtggctcatgcctgtaatcccagcactttgggtggtggaggtgggtggatcacttgaggccaggagtttgagaccagcctggccaacatggggagaccccatctctactaaaaatacaaaaattagccaggtgtggtggcacttgcctgtaatcccagctacttgggaagctgaggcaggagaatcgcttgaacccaggaggtggaggttgcagtgagccgagattgtgccagtgcactccagcctggacaacagagtgggtgagactctgtctcaaaaaaaaaaaaaaaaaaaaaagattttctttagataactcacaatgcaataaattttaacttcagattctttcactttccctttattgcttatcaatcttcaactgagttgtaaataactttgttatattactataaatcaccttctaaaaatgcaagaatcttatccacagatgaggggatccttttgactgattattgtacagcctctacttggagaatagagtataaagaacagcagtggattgagaataagaaatacctcacactacagtttacacactgagagtccctgaagaagtaacatcatcaccctttgataccttaattaaaaatcttagtctttccagctttccgtcatatactttacctatttatagcctaaatcttttaagctatcaataaagatgttgagtgttcttagagaaaatatataatagctccaggtgattgtcatatcctttctaggtgtctacaaaggtctgttcagtaatctgttttagaacactgtcatcaatcagcattaagttagcactagtttatagtttccagcatctaattcctctctaccatcacctttaaattaaaacaaacaaacaaaccaagtagtgaaacatttctttttgttttgtttgagacagggtttcaccctgtcgcccaggctgtagtgcagtggtgccatcttggcttactgcagcctccgcctcccaggctgaagcaatgctcccacctcagcctcccaagtagctgagactaccagcacacccaactaatttttttgtattttcagtagacacggggttttgccctgttacccaggctggtctcgaactcctgggctcaagcaggtcccccaccttgtcctcatttctttatattctgtttcaagcacctctcttattctctgtgatttttcagagatgataaacactggtttagcaatcatgtttgttaagttacaggtctatgggataaagcttctgtgaatctggagggttagaacttatttaraataattgaggtgcttgcttataaatatgggaataaactctttttgaaaaatttaggtatgctattgtttacattttgtagattactcttcttgatagagaagacaaaaagatttttttgcctccatcagaagtcacacctaacatgcagtggtagaacaggaagttgtctctgccataaatatttacctctctaataatttggaatgcttacctccctctctaggtcctgctttccttatgttaagttcttgaagtcaaattaataattagatagctattagtaagcacagtcaatgaaaatggcattaaattgttttttgtgtgaaatttcatctaggttatgatcaaaccctttacccctctagcatatggaatatgactttttagtaaacagaacagtgtccttctgtttgttggacagtgttggataaatcttgacataaacatcctttttatagtctccatgacgacttttaccctaccattatatttattattgccaagattacaatttacctagcactagcatgcttttgcctcttgtttaaaccttcatagccattacttgtaagtcatcacagagtaatttcagaatgacatttgagatgcttaatacaattttcttaactagagagtcctgtttcttaagcctgtcttgaaatttctgggattcaactttgttcttgctgtctatggtaataacactaaaatttaacaattacatagcgctttgtttttcataagcagttcactcttttcctgtttaaatttcatctttacatattatgttaacagtgcacatcsttaagtttattcagccagcatccttgtactgttaatgctgctgtttcctgctgttgaaacatgagccctrtgaagtaggtagttgtatcttyttttttacaggtgaagaaacagatacagaaaagacacgcagtgaattaactctcagaacttagccttgagcctggatattctgaatttgtatactgggttttttgtttccttgctgtgttatatttaaagtgtgattatacattgtagcagaagcaaaaatagaatgctgatttatgaatttgtcagtgcttctttctttttgtgttatcattagccattatatgcccataggattatgtcattttttaagataccagctttattgacatgtaatttacatatcctacaattcacccttttagcgtatacagtgcagtagtttttagtctattctaaaatggttttgtaaccattaccagaataaattttaaggcatcttccttttttctttttctgttttttttttttttttttttttttgagacggggtctcattttgtcacccagactggagtacagtggcacaatcgtggctcactgcatccttgaactcctgggctcaaacaatcctcccatctcaccctcctgagtacctaggattacaggtgtgagccaccacacccaattgttttttaaattttttgtcgagatggggtcttactctgttgcccagctggtctcagactcctgaccttaagcaatcctcactctgttgcccaggctggagtgcagtgtcactatctcggctcactgcaacctccacctcccgggttcaggtagttccctgcctcagcctcccaagtagctgggattacaggcgcctgccaccacacctggctaatttttgtatttttagtagagatggggtttcaccatcttggccaggctggtcttgaactcctgacctcgtgatccacctgcctcagcctcccaaagtgttgggattacaggtgtgagccactgcctccggcctatatttttacaagtgatgagagcatacatattctcctaagagttttatagctttagcttttacatttagtgctttgatccattttcagttaatttttgcatatggcttgaggtacgagttcagctttatttgttgaaaagactattcttccttcgttgaatcatcgtggcacttttgctgaaaataatttgactgtaaatgtggtacccttcttgaaaatcagttgacccaacaaatgtagaggtctatttcaggactctcaattctgttccagtgatccatatatccatccttatgccagtaccacacggtcttgattactctagctttatagtaagttttgaaattgaaaaatggggctgggcgcagtggctcatgcctgtaatcccagcaatttgggaggccgaggtgggcagatcacctgagatctgagaccagcctggccaacatggtgaaaccccatctccgttaaacatacaaaaaaattagccaggcatggtggcacgcacctgtagtcccagctactcgggaggccaaggcgtgagaaatgcttgaacccaggaggtggaggttgcagtgagccgagatcgcaccactgcactccagccagggtgacagagtgagcctctgtcttaaaaaataaaaataaaaaagaaatggaaaaatgtgagtcctctaactttgttcttttttttttttttcaagattgttttagctattctgggtcactttcatttccatatgaaatttaagatcaatttgtgaatttctttaatgcagccagctgggattttgattggattgactgtagaccaatttggggagtattaccatctttacaagatgaattcttctttccctggatatggggtgtctttgcatttatttagctcttcttaaatttcttttaacgtgtattgtacttcttcttctgttaggtttattcctaagtttttttgtttgtttgtttgttttagacagagtcttgccttgtcacccaggctggagtgcagtggtgcaatctcagcttactgcgacctccacctcccaggttcagacgattctcctgcctcagcctcctgagtagctgagattataggcgtgcaccaccacacacagctaatttttgtattttagtagagatggggtttcaccatgttggccagcctggtctcggactcctgacctcaggtgatccacctgccttggcctcccaaagtgctgggattagaagcgtgagccactggacccggccatattcctaagtattttattccttttgatgctattgtgaatggattttttttttcatttttgaattgttcactgcaagtatatagaaatataattgatttttgtatgtttgtcttgtattttgctgccttgctgaacttgtttatcagttctagtggtttcttaatggattcgttaggatttctgtatacaaaattatgtcaygcaaaaagagattctgattttttcacttttaaccctaacggagctttttcagctttattgctttcttacttcctggcagcttgtattactgtcctactactgtcctggtatggccccaattccttggataccagctgcttgtataatctatactggttttgttaatgaaaattgttctctgtaggactggttgctacttgaatctttgctcactttgctgtgtagttttcagtattcattattgcaagtactatgttactctgtaaactctccagaaaattgttgctcaatctttgctatttctcttaacaaccaggaatcattttctgtcagtttctagcttgtattgtttgaactgatacttctataattgagtaaaatctgtctgtcttctttagttaatttacctgcctctactgcctagttagtacatgcttcctatccctgccttagaggggggcataattgctcaaatcaagacaaacaatgggccatatgaggttaaaaacaaaacaaaacaaaaaaaacattgtaacaccctttccttccccagacttttctgcttggtagatatgactttagatacattttctccctttctatttatgaatatatactctgcactgggttggcacggtaataaattaaaaatgaaggagcrtaaagaagcataattcttccttgaaagtaaataaatttttggccaggcgcagtggctcacgcctgtaatcccagcactttgggagaccaaggtggacggatcacttgaggccaggagttcgaaaccatcctggccaatgtggtgaaacccggtctctcctaaaaayagaaaaaatagcaaaattagctgggcatggtggtgtgcacctgtggtccctgctactcgagaggctgaggcacaagaactgcttgaacccgggagacagaggtttcagtgagccgagattacgccatggcactccagcctgggtgacagaacaagaccctgtctcaaaaaaaawaataataataataataataataataaataaaaagtaaatttaaaaatgttgctccaggaccttttttttaaatccttttttcttttggagttgattaactaaatttgttgctctatacctctaataaaatgaagactatgataagttagactcctcagtgctctaattttctttgtttaaattactgtttgaagagtatagactgttttggttactcagccaaccagctcgtaattacatttctttgatagcaaagagtctttggatgagctaagcataaattcatctccactattggaagaatatattattatctgaccatatgtaactactatcatctttaggtaggaagggcagaacattttataaaaaaaggctatattttgtcatttgtgaaattatggcaggcagataaactagatagttgaatttttcttgtctttagccttatagtttccaggcaaaacactgttttcctatattatctaggtcagatcatatttccctcacctctttcagtgagatagtcgtatacattggtaatacagttagatttttttgtcacagtctgcatactatcctggaatccctcaacctcctggttgttttatggtgtcttttatcatatagaagtttaaaatttttgtgtaatcatatctattttctcctttatggcttttggatttaatgtcatgcttaatcaggatttgcccacctcaaggtttygttttttgtttttgcttcaaatgctttaatgtaatttttgtttcaaatttagaaatgtttttttaaattgcctttgtttctttattttctcctttttggtaactatgaaaattaagagaacattgaatggaacacattttgacatgccataagcaaggaaccaagaatgtctggtcatggttgtgtattctcatgaggagtatatggccacgacaaattttatggggcttgcctgtattatttaccttgtctgaaatagtcaatgtaatattaaatatctatgattccacctgatacgcttgcttcaaattatctaggagagtttctgccttcttctattagcttgaaatacttttaaatattcataatttgaatggctaagcatattagacatgtttctactacaaccagttctaaccagagagttctaaaatcagattctctgtaatatgaaaacagaaaaatccattagtattaaccattatctttcatttgtggattcttacactgtttcaatggaagtgccttctccccagaaggaaatagaaaatgtgaaatatgaaaagaaaaaatacagggttaacaatattttctaaattactggtaacctgataagaattcatattaatttttgacactaaactaacttaagtataaagccatttttgttaaataaatgagtagatgatacttagattcccatctttactgtttgtttaaatataatttgcctgttacagtataaaaccaactagtttgtatcaaagcttggatactttatcctagtaaacattctgtctaccttgagtaaaaattctggtaaacagtttttttttaatcagaagaacacttttttcattaaaaagaagagctccatttaaaaaacaaacttcatttctagctctaaaatataacaagggttaattaaatctagactaaacaaaattaaacagttatcctgtaatagttaatagcctgttgtttgagtagctaaatgatttaaaaaacagatcaagtacattgatacctttgtatatttatttttgcaggtgaaaaaagccaagatgcaggaatcaggagagcaaactataaggtatgtaaagtttgctttctttttaatgaactactcataagttttgtttttttttttcacatgctgattagcgtatgggcatgctttgccctctttttggttcttaccatcagctgttacattttgaaattatttggtttaagattaaaatttcctttccaaatagttttttcctgaaacttgtgcactgatttgttcttatgcattcattatttattcaacaatatgtaccaaactcatgttgtatatcaggcactgtgctacatagaggagacttaatggtaaagatgaaaagcaccatattcttcagtcagacgtacaatatacagaataggaagcataagcgaaataaataaaatccaagagatttggtattaattaccaaatggttatgaaatgacttagtcattaaccccactcctcttatagaaaagaggaagcttgcgcctggcacggtcgctcacgcctgtaatcccagcactttgggaggctgaggcgggcagatcacgaggtcaggagatcgagaccatcctggctaacacggtgaaaccccgtctctactaaaaatacaaaattattaaccgggcgtgttggcgggcgcctgtggtcccagctactcaggaggctgaggcaggagaatggtgtgaacctgggaggtggagcttgcggtgagctgagatcgcgccactgcactccagcctgggcgacagagcgagactctgtctcaaaaaaaaaaaaaaaaagagaaaagaggcagcttgtttgcacctcacagtttggcttcttcataccatggttttcagttttccacagttcttaccttctgtcgtttgtgcaccaaccatatgagccagtaactgcatcacctctaccacattaatttcaagaatcctacacttttacctccacacactatcatcccggctcatttattctagaactgccatgctagccatatgatgtcttaaactatcaattaaatcatctgtcatcttttcaccatcaccccttaaaaagaactttagtttcttccttataagagaccaacatggcggaaccttgtttctactaaaaacacaaaaattagctcggcgtggtgacttgagcctataatcccagctacttgggagactgaggcaggagaatggcttgaacccacgaggcggaggttacagtgagccaagaatgcgccactgcactccagcctgggcgacaaagactctgtctcaaaaaaaaaaaggaacttaactggccaggtgtggtggctccacttttggaggtccaggtgggcagatcgcttgagttcagtagtttgagaccagcctgggcgacatagcaagatgctgtctctataaaaaacacaaaaacaattatccaggaatggtggtgcacacctttagtcccagctactcggggctgaggcaggaggattgcttgagcccaggggccagaagttgtggtgagccaagattgcgccactgaactccatcctgggttggtggcagagcaagatgctgtctcatttaaaaaaaaaaaaagaaagaaaaataaacttaactataagatctactgtaattagtcccttacaaacattcttaacttcctcacttttttctgtcatacttgcctagcaaaaccacaaccctgattaaacccaactatccacctattctgtacttattcccaatcacttgtacatcgtgagagaaaaacacaaaattgtgctaactgttcctagtttctattcatgataagatctaaaacaggcacttagtcccccttcctggtatgtctgatttcccagcctctaaaatcatcttaattcctttattccctccctccttgccccctaccttctcccttttccctccctttcctgctatttccattcactcagctgtggatcttgctccctagttcaaagagagattaggaacatctcccttctctcaccaaatcaacctacttaatctgcttctcttggatattgtttatctttcctctgaaattcccttgctcttatcgaaggctaacctctccagttgtttgaaagaacccatcaccttcatcttttcctgcaattatctcttcttttaccttcagcaatttttttactatgataaaatacacacaatatacaatttaccattttaagtgtacagtttagtggcactaagtacaatcactttgtcttgcaaccatcactaccattcatctctagaactttattcatctttccaaactgaaattccatgttcactaaacaatattctccactcccccatctccagctcctggcaaccaccattctactttctgtctgcatgattgtgactgctctaagtacctcacagaaatggagtcatacagtatttgtccttttgtgattcatcatgatgtctttaaggtctatccatttgtagcatgtgtcagaatttcctctttttaaggctcaataatactccattktatgtctgttccgcattttckttatccattcatctgttgtttgtgttgttaatagttctgttgaatgagaaggaggtatttgttgtgccactttatggacttggatgttgttgggtttttttggtcattttattttagagcagttgttttttcatggtgtattcattgttaagcaaaatttatgtttatataactttgaaaataattatattttgaggcagtatgtcatttctctaaggataataatttaaatatttaacaagtgctagagttaactcactgtcttggtgctgttgtttctatttattctctagatgctcagttgagtatgtaggggatgttgctataacataatattctaggaccattgggttttaggaactggtccagtggatactggatcatagcaatatcaccaacttctaaaatatargatctacaaatagtcttcaacagtgggtataacagtgaacctcatacttaaccaggtacatgtagaagtcaaactagttattgatgtcaggaaaattctggttcagttttatgcccttcccctggtaattctatgtaagtaggtgtgagatggggtccagaagtctatttttattaactattcaggtaattataataaatcacccagtttgggaaactgacacaactattccatataatttcttgcccttacccttcaatttccataatcacatcttagtacattaagttctattacaaaaatataaacatttgagtaacaagataaaaatgaaccttacttggggatttagctttaaaattaattacaaatgaggaaaaattatttgaacattcaaaatataccattaaagctggacactgtggctcacacctgtaattccagcactttggatgctgaggtggacggattgcttgagaccaggagtttgagaccagcttgggcaacatgatgaaaccctatctctacaaaaattacaaaaattagctgggtgttgtggcacatgcctgtagtcccagctacttcggaggatgaggtaggaagatcacttgagcccgggaggtcaaagctgcaggagccatgatcgagccactgcactccagcctgggtgaccgagtgagaccctgactcaaaaaaacaaaacaaaaaccaaccaaacaaaaaatatataccatttaaaaaaaacccttattatacttgaatattagaagtcagtttcagaaatgatacgagaactttataaattttgtgctatatattttttatataagcaacatttctttttacaattttgctgtgtagaaactactcttacctttgattagtcagcattatctttccagatatatagaacctctggtacagtgtcttccacctctccctagagagtagaagaacaaagcaagcttctttctagggtgcatgaatgtaggaatgatgcctgggctttgaagaagttgtaatataataacagttacagttaaagtgtgcttactgtgttctagctttgctctaaatgtaaacttattagtcctcctgacagccctatgaggtaggtttcatttttattctcgttgacggatgtagaaagcggggaacagataagttcagtgacttgtccaaggtcatagggctagttattggcagaatagaatatgaacttgagcagcctctgactctagaatcaacactcctaaccactgtgctataatgggacataataactgaagaatgaaaagtagaggagatggaaaagagagaacattttgaagaatgaaagttagaacaatcttcattccagaatttctgtggaatctccccagcattaaactatctaacataatgacttgtcctcccagtttatgtgacttatcattctcaatttctcttaattttccttataagttaaaaaaaatgatgttgcttagtcctggctatataacaaatagaaaatgaggtgtttgtgttttatttaactgggagataagagaaatatagtagaatgaatcttaagggtttagaacccccgcttggaaacaaacgtataatttttgtttgtttgtttgtttgtttgttttgtttttgagacagagtctcactgtgtcgcctaggcaggagtgcagtagtgccatctccaatcactgcaacttctgcctcctgagttcaggtaattctcaggcctcagcctcctgagtagctgggactacaggcgtgcaccacaacgcctggctaatttttgtatttttagtagagacggggttttaccatgttggtcaggctggtctcaaactcctgatctcaagtgatccgcccgcctcagcttcccaaagtgctgggattacaggtgtaagccaccgcacctggcccaaacgtgtaatttgaaaacacttctcatatgattatggtttgtagctgatcaagaaccactgtctgaaatcaaacgtctccctaccttcctgtggtactttgggagcaaggtaacagagcactgttgcacagaatggtgactgtaataaataatatagcattgtatatttcagaattgctaaaagcatagaacttaagtgttttcackttttttttttttttttcacaaaaaagcaaaaggtgttttatatatcaaaacatcacattgtaccccataaacatataataaaaagtggcagagcaatgttttaccatatggtgttaaagaaaaatctgacttgccagtgacttagctggaatttctgaattatataaaaactaaagggatctagagatataagaaagaacagtagactgggcgtggtggctcacacctgtaatcccagcactttgggaggctgaggtgggtggatcacaaggtcaggagttcaagaccagcctgaccaacatggtgaaaccccgtctctactaaaaatacaaaaattagctgggcatggtggcatgcacctgtaatcccagctactcaggaggctgaggcaggagaattgcttgaacccaggaggcggaggttgcagtgagccgagatcgtgccactgcactcgagcctgggtgacagagtgagactccatctcaaaaaaaaaagaaagagcggtagaatgctgagggtactagccctggcccgagctctcttcaagtagttgttaaaaatcaacaataaggatatcaygaagatttactttgcctcttacttatatagcctaggaggaaatgggtttgaactcatcactttttagcaatgcagcaaatcaatcaggggctaatgtattcattttggttctcccagtcaagtaagcaatccagatgtcagtgatcagaagcctgaaacatcaagccttgcttcaaaccttcccatgtcagaggaaagtaagtaccatattctgtgcatgattgaacagatattcctataactagtaatgcttttcttatagagttggtttttcgtaattgccttgtttgtcccaaaatatcctgaaggctctcccatccttgtttttgtgtgtgtttatccttgagccctcctgtaagctttattgacagaccagctgagaaaagatcacatggagtccactcacccaaggagtcacacgccgtgattttatttttgttttgagattggatgttttaaaggtaatagtgtcttacagaaaatcagagacaactatacttaaccatatatacttcccatgtatattttttaaaaaggtgtaacttttttttaaaaggtgtgtcttgagttctatatagtgtttcctcaaaggtgattctattctggtggttctcagacctttagcctacataagaatcatctagaatacttgtttgtaatgtagaattctagtttcacctccaaagattatcattcagtagatctgatgtggatagggaatctgcatttttgacaagttagccaggtgattctggtccattgggaaactgtccattttgtggaaaaccactctaatttgtaaagtgtctcctctaatttcttgaatttcccactcatccccaagaaaaagacctgttccctaaaatcttatactttacatacttcagggtcaggaagtaagttgagtattcttgctccttccaaataatttccttttttccttcaaatactttggttcaactgggcatggtggatcttgtctgtaatcccaacactttgggagtctgaggcaggaggatcacctgaggccaggagtttgagatcagcctgggcaacaaagtgagacctcctcgctacaaaaaataaaataaaataaaataaataaaaactttggttcatttgaagtctacatctataccttcccctacctttctatttttactttagactgtcatcctattcattctgttctttatttttttttttatgttttttgagatggagtcttgctttgttgcccaggttggagtgcagtggcacaatctcgactcactacaacctccgcctcccgggttcaagtgattctcctgcctcagcctcccgagtagctgggattacaggcgcatgccaccatgcccagctattttttgtatttttttgttgttgtttgtttgtattttttagaggtggagtttcgctcttgtcacccaggctggaatgcaatggcaagatctccgctcactgcaacctctgcctcccaggttcaagccattttcctgactcagccttccgaatagctggaattacaggcacgcaccatcacgcctggctaatttttgtatttttagtagagatggggtttcaccatgttggccaggctggtctcgaactcttgacctcaagtgatctgccggcctcagcctcccaaagtgctgggattacaggcatgagccaccacacccagccatttccttcttgtcaggatgtaagcagcatacttgctcttgtcagatatagaggctattatttgtgtttcatatgctatctgtttttaccttccccaaggactttggtactatagttttcttgccaccacttgtgtgtcatcacggtcttccctttttatccttcctgtcagtaaagaaacatcttaccattttaaaacataaacactgctcccccgacccccccctgcccctccgsccttggctccacatctcttactagttatggaccttctctttgttctgtgacatatcagaacttctgcaagagttgccctcacttgctttttcacctcccattcacttttccagcctctcaaatttagcttctatcctcactcttccagtgaaactgctgtcgtcaaggccattagttattttcatgttgcaaattctagaatacgtttctcctcacattctccctctcagtacttttcctcccacctttctcctttgatggcccttctttggtgggcctcagggcttaattctaggctaccatgtttcctcttttgggattctccgatccattacattactttaaatatcttgtacatggttaatgaattccatattgatatttccagtctgacttctcccctgatttcatttgtgtatcagactgcctgtttgacatctttactggaaggaaaatcatacctaagatcttcaaaaaagaactttcgattcctttagcccccgtgacatacactcttctcccaaacttgcccatcttaggaagtggtatcactctccgtctagttgttttcctcattctctacatcaaatccatcagaatgtcctgttagttttaccttcagaatatatttcaaagtctttgcctcatccccactgttgctattctagtccaagccagcatattacttacttgattcttctatagtataatggatattatatcttgactctttataatcattttgtggttcccaagtactgtgaagatcaagtctcattcattctctagagaagtgaaaattggcctcagtctcctaggatgttgttgattccttccagaattaaattaaattggaggaagataagggtttgggttttttaatatatgtgtcaactgagaaccattatgtagaattcaaataaacttaccttacattctttgcaatggattgtcaaaactttagatctaattgacatcttcatttttgtcaaaatgattagaggtgaatgtgatctccaataattatttttaaatacctcaaacaatagcattggacaagctcttctgtaataaactcacaggtgttgatttgtcttactcttgagcatttgagttggcccctcatctacttttgatcaaggttctctttttgggtcaggtactcttccagggaacctaattagacataaagttaattggttcacttttaatcagatatttacagcgttcataccagaagtagtaatcatgagagtcaagccttcatagcagctattccagatgaartcatgggggtcaagaggacaatagctggaaaagtctttgagagttcatcagagtatcacatcagttcctcacgtctgtctgtgatttgccaaacttaaagccttcactacaaaacagaaaaaataatagtatagaagcatacttgcatctattctgctgttgattatgcatagcagtagcagtggttttaaaataagattgggtgcctcccccaaatctgttttcctgcaagtcattcttaaggcttttactcaatatagtaagcactcaaagaacaaataagctgaagtagaataatgtggttttccagacataaagcttgctttttaagtttgcctatcagcatagccgaaagcttagaaggttgcttcatctattattttagatcagtaatgggtaaaggtagagatccttaccaaccttcagctcttttccataccccacccttctttttttaactgcctctggaagtctataaacacatgtataaacaaaaaagtgagatattttctaccacatagtctttctatctggtgtccaagctgtattctgttaattagtttgaaagactatacagtgagatgtgcagttttcccattccattttcgaaatgttctaactttttaacctggtgatattatctttctttcagttatgacatgcaccgattacatccctcgctcatccaatgattatacctcacaaatgtattctgcaaagtaagttgaataattatttccaaaatgcatatgctttttctgtagattcattgcaaaatttaatattatttttcctctaaaataatagatatttaaattatttttacctctcttattctatcgtcattccaatttttaattccctctaaatatagtctatgtagtatccttttaaaaagyagatggtgtctgcaatggatcattttacacaaaagcttactctaaaatgagtaggcactgaacatgcaaaatagtgttagtgatcaaccatatcattgattgacctctgatcattttctctgtcctgtaccttgacatatagcatacagattaataaaaacaagactgaatttctcagtccaatctgtgttcggttttttttttttttttttttttttttttttttttttaagatagaatctcactctgtttgttgcccaggctggagtgcagtggcacgatcttggctcactgcaacctccacctcccgggttcaagtgattctcctgcctcagcctcccggatagctgggactacaggcatgccaccacgcccagctaatttttgtattttttagtagagatgggatttcaccatgttgaccaggctgttttcaaacggctgacctcaggtgatctgcctacctcgcaaagtgctgggattacagtcgtgagccatcacgcccagcctgtgttcagtttcttgattgaggaatgtcctcagagtagaaccgggcttgaagttagacaggtttggtgggttaagtcactaagaggttatgttttgggccttcatggggtaagatcagcattaatatcagccaggtttttcatctccaaagtgggtaggtgcagaacagtgtgtataccaagctacctattgtgcgtaataaagagtggacctatgcatacaaagacacatacaagtgcatttattaagccaggatatgtgcttatgtgcttacagctgctggatacataaagaaattggtaacaaaagcaagagatactttatggggctgttataaaaaggaaactgtctttcttttccctggttatatctgtttttaccttttgaattttcattarttaaaaaataaactaattaaaaagtcaacccaatgagttcttctaatttttaatctggtattaacactaatggtgtccttgggctaatcattttcatgtgactttcttctgtgaaatractgaacctattctctgagattattatgaagaaattagatactaaatgtgaaaacacatttgagctttgggctacaaagactctgcatgaaaaaggacattatggtctttaccatatctggagattaatccatttaaggtcactaagatttaaatcattcccatgtgacttgagtaacaactctaacctgagctatttcctggactcagatctggctaagaagaatagttatttttaaattcagttttttagaatgtactgagatgttaatatgttgcagattccaaattcatttattcattcagaaagtatttgcatacctgctacattcagaattccttattagctatcttaattattctatcttaattcagacctctttattacttatctgaactgttttttaactggatctccatttccagtttctcctccctttctaaaccattttacaaagcagtgtcaaaataatctttattaaagaacagctctgatcttgtcactctttgctcaataatttcagtggctctcagtttcagatttgccttttagcctggcattcaaggtctttgcttcctttctctcgctacttctcttaatatacttccctcagttatctgtgctctttgcaggccgaagcccttgctttccttactctataccctccaggacttttttcttgtcctagaacaccctttctctcccagttctgtgcctcttatctgctcagctagtatatcacttctttatggcctttcttcattttcctcttcccccaaaggtgaaaaaaaaaatttcccctttaaaacaccccctgctatattttattatgcttacatggtacaaatagcattttcttttttacttatatatacagtgtaactcaccaaatgagataattggtatctaaaaattcagtgcaatatcatggatgaaacaattatatctgctagctagtgtaaagtcccaggagtttcactgctgaaatctctagctatccctgatatggtggcaccaactagtggcagtatgccctgacttaaatatcattgaggagattgagtcctgtctggaacttcccagattttgttacttacctgggttctgttttgtagacttgatttgaggatattggaacccatctctacttccgttttttgatgtgtttgcttgccttttctccaccagcctcacccgcttttccagtctcactttccctctcagaactttagtttggttcaaggggcagggtggagaatgagagccaattgccaatcttgttctcttagttttctattatattaggattttattctagatgtaggcataagagcatgaataagtttaatccatccttgtgtctcacatagggccatgcatgtagcacactagaaatgtttgtaggataattggaacttggagggatgtttggaactattaaatttttcataaaattgttccttgggttgatgataggagaacgtagaaaggaggaaagacttctactttctgatcataagagccattttaggccgggcgcagtggctcacgcctgtaatcccagcagtttgggaggccaaggtgggtggatcacttgaggtcgggagttcgaggccagcctggccaacatggtgaaacaccgtctctactaaaaatacaaaaattagccaggcatggtggtgggtgcctgtaatcccaggtatttgggaggctgaggcagaagaattgcttgaaccggggaggcagaggctgcaatgagttgagatcatgccactgcactccagcctgggcgacagagcaagactctgtctcaaaaataaaaaatttttgaaaagagccattttatgtggaagattagtctccttgttgcagattctttgctgttagtggtggtagctattttacctatttttcgttactaaagtaartcacacaaaagtttttgttttcatgaaattttccagaccttatgcacatattctctcagttcctgtttcggaaactgcttaccctggacagactcaataccagacactacagcagactcaaccctatgctgtctaccctcaggcaacccaaacgtatggactacctccttttggtaaggcactgtattgtaaacaatttctaagaatgttgattttattccgcagaaactttgatcagccatgcatcattctttacaaagcacttagttacatatgtggttgggtatgcaactttgcaacagtatgtttgatgcatgtaataaaaaaatcatagtttttcagtactcatttagctattttgtatgtactaagtcttgaccctgaagcttggaatctttaagtgtttggtaaattctttgaggatttgctattgatttgacttactttatatacaatgtagtatggtactatcattaggaaagcataataaatatatttcgaggtggccaatttcttgctaacaccaggtagtctgaatatgtatcatagtttgctctgtggggttttttttgccaacttctccctctcctttctcccctaaccccacccaaaactgatcagatattgttctgctgaaccaaaaagtcattttagaataccggaaatccccaattttcttataaccttatgtgcctagggagttattttcattggttttaggtgtcttggacatgaactataaattaaaatgrtttatcagaagtcactttaaggttctttgggcacttaatatctgtgcttatttttctatgtgtgtaaatgcagtgtgcttcattgctccttccctgctttcctgaaatgggtgccagaaaattaaaagaatactatattatttaaaaatatgtaatatgtaacaaaattatatttctataggctttatttaatcaagctacgaattagaaaaattttccagacagatgaccacacagattctggatgtattaatgtacctgcatctagtttctgcattcctgtttctcctgacctgtttggctactcttttatgatattggcagctttcttacttttaggcttgttagaattctttggctcctggtaactgctagaaataagaattgggaattatgtttaataatagtggggttgataacttcatatgaaatgggaaacaaattttcttgtttccccatttgtatatccatgtttccatgcctgttagtaccagccagggtactcagatcttatatttatgatatgattaaccagccaacactgaatggaccttttgaaagacccctctgtgaatatgtttgtgtttatttctttttggttatttaaagctgatttttcaacagttgactaataataggctagcaattataatttttaaattacagttttttaaatcttctgttttgatttgaattattattattagccctttacaacagttgatcattcctgctgttcaatattaaatacaactcctattacatctctgagcatgatttatggaatacctcagataattctgtgtgcatatggatcctagatataattaattttttaaatgatcactatatttcccttaaactattattattattattttgagacagagtctcgctgtgtgcaccaccaagcctgcctaatttttgtattttagtagagacagggtttcaccattttggccagctggtctcaaactcctggcctcaagtgatctgcccagcttggcctgccaaaatgctgggattacaggcatgagccaccacgcccggccccgtttgggcagatctcttgaggccgggagttcgagaccagcctagccaacatggtgaaaccctgtttctattaaaaatacaaaaaaaaattagccgggcatggtggtgggcacctgtaatcccagctactcaggaggctgaggcatgagaatcactcgaacctgggagacagaagttgcagtgagccgagatggtgccactgcactccagcctgggcgacagagcaagactgtctcaaaaataataataataataataataataataatacattaaaaaagaaaaaaattctgtaaagtaaatagatctctattaaaaccttgaaggatacatgtttatattgtatgctggtaatattgttaataataggctcctttaataatctggttttgtttaatatttgagggcaaggaagacttgtgtttcccaatttcttctatcagtaattcagaaagagataatcattagcttaaatttgactttaagtaatgtatgagacttactggagagagattttggttggggtaatgtgaatgatagagatggcatattctcagaatttaccagagaaattataagagaggtttgtaaaacttttaaaagtgactgtattttgaaaagatgttttcttgtgttttatcatgtggctttttttggtaatgtgttaaattaagtaggagaaaacacttgatttctttctttcgaaatcaagattttgatacattgtgtcatcttagtgctgcctgttttcagattagctaattcgttttatttcagatgcaaatagggcttcagaaaaattcattataataatattaccttgtctctattatttactataataagctgtatactaagaataagtatttcacgctgtatagtattgtctcatgtaatcctcagaacagccctaagaggtaagctagctttatccctttttataggggagaagcagagttaaatcatgtgcccaaagttcatacaattagtaaaagcctgggattataattgaacccaggattgtttcattctagaagtgctcataactttaggtctatatcaaaaagatggtctcagagttgagtttgaaattaaaaagcttcctcctcttgaagaaaggagaaaagactagaagaaatctaagaaggctatatgatgagtaatcttttaaagtaaagaaatactgatcatattcttcccagagctgtatacaaatggggtgggatggcagaaaggggattagaagtttaacttctaggaatctgaaggagtatgtgtaaggaaaagggtacttgtttaatgttagtgggagttataaaatatgcctttaggtgccactgttctgatttcttttaaaagaactttaatgtgagttggaggagtgggtgatatgcattaagagccttaaggatgttcatttcatttccctcagtaatttcacttctgggaatgtatcctatggaactaattagagatacccacaaaaatgtgctgaccaacatactcattgaagcattatttataatatgaaaaaactgaaaacctaaaacttgaatattaaggtatgtgttaaattgtatatggctgctgcatagccattataaatcatcttcttaaaaaatatttagggtcttgagaaaacagtgtattattaattgaaaaaagcaatatgtaatagcaaaaacacaatgttgtaataccaatttagtatttttaaaaatatgtgtatagccaggtgcggtagtgcatgcctgtagttccagctacttgggagactgaggtaggaggatcgcttgagcccaggagtcctgggctgtagtgcgctatgctgattgggtatcttcactaagttcagcatcaatgtggtgacctcctgggggtgggggaccgccaggttgcctaaggaagggtgaactggcccaggttagaaacagcaggttaaaaccccattgctgatcagtagtgggatcatgcctgtgaatagccactgcactccggcgtggacaatgtagtgagaccttgcctctaaaaagaaaaaaaaaatgtgcgtaaagaataattggaagcaaaaaaagtggctgtttttcctacagacgttttaaaaaatatatacatatactttgtttataatcaggaaaagtacttacattaaattacttactatttataatagcctatccaaatgagctgctgaatcaacaagccaaaatatcctttcatgtgctttttctagcattggtgtgtacttcagttcctcaccagactaatctctaaagagcactatacgagttactataaattgaactgatgagattagtttggatagtgactaatcaatagtgaagtacttgtgctgagaaacttgggtagagtttgtgataagaccccattctgggggcatcaggaaggcactcagagacagacttacttacccattgttagcttgacagtttctctgcagcaggctcttgatgcttaaaagtacttgagaaacttggtagttgttggcatagagcagtggactgggagtcctgtaattagggtttggtttccttgtttactatgagcaatagtgctgtggagtcaaaccattggatcatgctgcctattatctggaattctgggagggttgcttttagaggaagatgatttgcatgtctgaagagccaggtctacagtgatgctggaggtactgtctgtattgttttttattcctcataaaataattatatattagacatctactttatgtttctggccaaagatattcaaaactagctagctatctcctacttattttggacatttgtgttctaatttttgatcttataagagggagactatcaaaacattctcagttgatactattgttattaataaggtattattttcatatagtgtaaaaataaacatgtttataaatctaccaccttagggtcaaaacctatttggaaaaagaaatcacagtgatgacaataaatctgaaagttattgtgacattgaaatagcaatttgtttaccaaaaagtgtgatatacaatcagcaggaatcatagcactgatactcacattttacatcataaatgttttaaaaatgacattctcaaatatttttattgttgaaaatcagacatggcaagaatcttaattatggctaatctggacaagacatttaaatgatcatgaattatgatggggcaaacgcttctaattcatgctagcgatgtcagtattcctcagtctcttaaaataagttatttcatgtgattaatagatgagaaaagaatattacattttctttttatgcattaagagtttggggcaaagccaggcacggtgacccatacctataatcccagcactttgggaggtcaaggcaggaggatcatttaaggctaggagtttgaaaccagcctaggcaatatgacaaaaccttgtctctgcaaaaatacaaaaagtagccaggcgtagtgtgcctgtggtcccagctattcgggggtttgaggcaggaggatcccttgatcccaggaggttgaggctgcagtgagctatgattgcaccactgccctccagcctgggcaacagagcaagaccttgtctcaaaaaaattaagaagtgattatcatatcccactgttggtctttttaagactttcatatttctctttactattcctaaatgtacttatcaacaaattggacaaatctgagttgcactgaagtatctcagtgccctggtgaagcagaggttctcawtctcaaagtattgtatttttaattgcatatatgtgttcattggctataaattcaatcactcctagtttatcagagtaggagcaaataaatgagatgagttaatgttgagtttgaagtcatggctaaccttagtattgatatcatacatggaatgtgtttggttgatgaaccttcttagacctaattatcagcttcaactacactaacccagtaaccatagctattcagaacacagtgaacaaccaggcattaagatttttggggcctggcatggtggcttgtgcctgtaatcccaacactttgggaggctgaggtgggtggaactcctgaggtcaggagttcgagaccagcctgaccaacatagtgaaaccccatctttactaaaaatacaaaattagccaggcatggtggtacatacctgtaatcccagctactagggaggctgaggcaggagagtcgcttgaacccgggaggaggagattgcaatgagctgagatcatcgtgccactgcactctagcctgggcaacaagagcgaaactccatctcaaaaaaaaaaaaaaaaggattttctttttaaaagtaggcttttgtgtagccaaaattatcaccaaaaccatgcacttaagagtgtttcactcataaagaatatccttggactctcatgcagatgcaaagctttgtttatggttgcctagtttattgcaaattaaaaggcagatactgctaaggaagtcaagaagtgacagaccacagaggaaaaacagtgaaattagaacctaaaaatcagaactataattaagttatatttagtactaaacaattgtctttacacatcacagtagcctctgcggtatctctgtaatatatgtagcacagcacagtttttatttttgaaacagtaactgagaaaatctaaaggtatgtgtgctatttcctccttgctcagaaggcaggaagggatataaatatattttagaaagattgttactcaggagcattatgataaaaagaaaataaaaatgaacagctatgatgtttgtcagtatgagatagatttatatgttctgacttggaaagatgaatcttagaggtattatgtggaaaagcaaattatgtacactatgtataacacagtccttggctggcagtggctcatgcctgtaatcccaacactttaaaaagccaaggtggaggattgmttgaggccaggagttcaagactggcctgggcgacatagcaagaccccacctctacaaaaaattagtcaagtatggtggcacacacccatagtctcagctactcctgtagctgaggcatgaggattatttgagcctaggtgacagaggaagaccctgtctcttaacaacaacaacaacaacaaaaaatcacaatcccatttttgttaaaaagaagattagtgaatacatagaagaaatctggactgagtgtagtggctcatgcctataatcccagcactaaaggaggctggggcaaaagtatcgcttgaggcctggagttcaagaccagcctgggcaacaaagcaaaaccctatcttatttaaaaaaaaaaaaaagaagaagaagaaatcatctgggtgactcttctgcaaactgttaatagtggttaagtctggatgatgggattatatatgactgtattttttttctaaattatgtatttctgtaatgtttttaatttataaaaataagcaggtatgtctttcctaatcggaagaaacaaaagtaacaaaataaccagcttaagaaggcagagaagtatttaatatattttagaaaaatttggtccttgtttaatgggtaagtgaattttaaacttatatggaatgtctcctaccttgacagtttggataaattatttatcactgtacatgaacatcaggcactctttataacagatactccagttgggtgtcaataactctttttttctgaatcctggtcaatttcccccagtcattgaaatgaatttatatacatattgggatttgtggcaagctttttgtttctttagcctcatcccctaattctttgaaagtgttatttgcttgtgatatattacaagtgggagattcaataattttctcttacaagcaaatttatttttgttttaagatttagattttaaacctactggctgatatttgaaagcataaccatgctcctcagtcccagtgtattgtttgtaattggtccaatttatctgattcaggtgcattgtggccaggtatgaaacctgaaagtggtttaattcagactccatctccaagtcaacacagtgttcttacctgcactacagggttaaccacaagccagccaagcccagcacattattcttatcccattcaaggtaaataggcatggttgtgtgtgtgttttaaaattattattattgtttcttgtttttaatctacctgtatctccaaacaaacaaattggataatacaggagctctgtcttctaaagtagaaagggggtgatacttggatttgtgcatgctttttgtgttaggcaaaccacagcttaggagtgtggtttataagtagtttagcctttgaatgtgagctgcttaatagaattgaagccttcccttttgcatgttggtgtccagaaaacgccttgattttgttctagtctattttcagtggcattttgtcctataaatgagcagaagactccatgggttggaattttgctgacctgtatgaattgtcatagcagtatgtgaggtgtgtgctgcttttctgctgtgtcttttgtcacacttataccccatttactacttgatgagagcatttctcttgctcaagaagttcattcttatttctctttcaggataaaaagcatagtattaaagcttaagctctaaacatctttaccttccaagttcttcctctaacagagttagaattatgacaggactattaggaaagaaaacaaaaaactcaaaaggcactatggagttaattgcctattcttccaaatccagggcaggcaatttgtcattgcttcagactgggactagtatccttgtacctggcttctcatctgcctcttttctcctgatatttcccagcttttaaattttatttcttataaaatagatagtagagggattagtatgggacctcaaaaacctatctgaagtactcttaatgtataaactttggtgatgaaaaaaagttttaatataggttaattagattttgattttcagttttaactgttttcagaaatgtttgaaaactacttctccttggtctagtggaaacagaactggtctctatgttctgagaccttactctgagctacctttacctcctgttgtttaccaagtctcctcttttcttcacttgtttcctcttcttttttttttttctccccttgtcctctcccccttctttctttctaagatgggaacaaaccaggagggagaaacttgaaagaatggctttgcctgtcttctccaccactccctttcatttttatagagtatttctctatggttttttgttttgttttgtgacagagtctcactctgttgcccagctggaatgcagtggcgcgatcatggctcactgcagccttcaccttccgggctaaagtgatcctctcacctcagcctctccagtagctgggactgcaggtgcacaccaccacacccagctaatgtattctatatttttttagaggtgggatctcactatattgcccaggctggtcttgaactcctgggctccagcaatcctcccaccccagcttcccaaagtgttgaaattatagatgtgagccaccacacctggcctagtatttctctatgttgataggccttttgggttcaaccacaggtaagtctagttgccaagtctcttctaaacaggtatatctgataacttacacctaggttgtgaaagaagaccaagggttctcttaatgctctaccaaaatgtaaaaccaccattcctctgtagttatgtctagaatttgaggaatgtsatagctrtgcttatttctcccttgtaaaacaagaggaatcacctctttggggtctgttaggacccattgctttaagagtcatgaggctgggcgtggtggctcacgcctgtaatcctagcactttgggaggccgaggcaggcggatcacctgaggttgggagttggagaccagcctgaccaacatggagaaacccmgtctctactaaaaatacaaaagtagccgggtgtggtggcgcatgcctgtatcccagctactygggaggccgaggtatgagaatcgcttgaacctgtgaggcggaggttgcagtgagccgagactgtgccattgtactccagcctgagcaacaagagtgagactctgtctcaaaaaaataaatagaaatttaaaaaaatggaagagtcatgaaaatatcccttaaacttcactaaccaccattcttatttgttatctgttagaacattttttcctttggattggctaacccggtttccttcattttgctattaatgacaattgcaggtatttatgaagtgcttactgtgctcttgacatttttctaagcagtggatagatgttgcacacgtaatcctcacaacaacccaaacctcattttasagagggagagcctgaggcacagaaaagctaagtagcttatccatagtcacagtattagcaaataattaaggyaggacattagctgggcattctgactccagagcatgagtacaatatttatgcttttcagtattgaggtcatagtatcaatatcaactctcccataattgagaacctttgctaacaaatatctaaattcacttctccyccctttttgtggttaatctattggcccattttattgttcattagcacagggtagaaattaaggcagaagttaaccattaagttatcaatttttgccatttattctgatgaaaaaattgttaggaaaacaatgggctaaaatgaaacgtgggtattattggtattaaattacttaagttcaccactatcaatattactctcctcgctcctacttttccctttccttttagcatggatagtgaatgttagctatccagggctgtttctttccccctgcataactacccaatttttttaagtgttcaaaacaccccaagcattctgcagttgacagcagcccatcctccctgggggagttagggaaattatctcaaaaacctaatctgcttctggcttgattaactctaagcagarccttttctttagtttgtacttcagtggtaccataatgagaagagactgcctttgtttgctcataaaaatgttttgaatgagtagatctgacttctgtagtatcatccttttcctagagtatcttgtgactatgtggccctatctttggtcattttcttcagctgagatgttttaattggttaaataatattcaagtggcaaaattaatttcagaaatttcaaaattaattttaattatatatatattttgagactgagtcttgctctgtcgcccaggctggagtgcagtggcatgctctcggctcactacaacctttgcctcctgggttcaagggattcttgtgcctcagcctcccgtgtagctgggattagaggcacccaccaccacgcccagctaatttttgtatttttagtagagacagggtttcatcatgttggccagtctggtctcgaattcctgacctcaagtgatccacctgcttcggcctcccaaagtgctgggattacaggcatgagccactgcgcccagcctaattcaatcttttaatgagtgtctttgtactctagtatcattggtaacacacaataatctatctctgaccaggagatttttaaaaaaatttttattaatagatgtttttgtttgtttgcttgtttgttgttttttgagacggagtcttgctctgtcacccaggctggagtgcagtggcgtgatctcagcttaatacaacctccacctcccgagtttaagcgcatcttctgcctcagcctcctgagtagctgggattacaggcacatgccaccatgcctgactaatttttgtatgtttagtagagatggggtttcaccatgttggccaggctggtctcaaactcctcacctcaagtgatccgcctgcctcggcttcccaaactgttgagatgacaggtgtgagccaccgcgcctggcctagactttattttttattaataattttagatttacagaaaagttgagcagacagtacagagagttcccatatatccctcctcctgcacagtttcccattattaacatcttacgttagtatattacacttgttacaattartgaaccagtattagtatgttattattaactaagtccrttgtttattcagatttcctgtgtttttatatgatgtccttgttctgttccgggattccatccaggataccaaattacatttagttatgtctccttaggctcttctagactttgtagtttctcaggcttttccttgcttttaatgaccttgacagttttgaggagtactggtccaggtatattttaagatgccccactcttagagaatttatctgatgtttttctcattattacgctggggttatggattttaaggaggaaggtcacaaaggcaaggtgccatactatcatcattatttatgactgttgatgttgaccttgattacctaattgaagtagtgtttgtcagttttctccataaagttactctttcctccctttctgtactgtattctttagatagaattcactatgtacagcccacagttaaggaatcatgctgccccttctttagggtagaatatctacataatgtatttggaattcttctgcccagatttgtctcttctccccagtttgttgatttattcagtcatttttttgtggactcctagatatttaatttatactttgggttataatccaatactactttatttattttgttccagtttggccactgggagctctttcagttggctcctatgccttttgacatactcccatttttttagtttttggtttttttyccccccccacccagcactttcttacttcctggcactacaagatgctccaggctcatcttgtatattacttattcaagtcctattatcaaccattttttttaaggaatcctggttccttttattggaaaaaatggtattcaaaaccaagatttgggcttccagcctgggcaacaaggcaaaaccccatctctacaaaaaatataaaaattagccaagtgcagtggtgcgtgcctgtagtcccagctacttggggaggctgaggtgggaggatcgcctgagccttaggaggtcgaggcctcagtgagctgtgatcgcaccactgaactccagcctgggtaacagagtgagaccctgtctcaaaaaaaagatctgagcttgaggggtgctaattgctactgaggtgtcaggtgacatttattttaggctttctcagctgacagagcaaacaaatatatgtaggtatactaacctatgtaaatacacatatctataaatatttctgtatgtcgtaatctgtatctgtgttgagttaaacatgaattcttactgatttcttgagctctgatccattattacatagatcattctaaaccctgtcccttattgatctgaaaatctccactccagcaatgagaatcttttaggccgggcgcggtggctcatacctgtaatcccagcactttgggaggtggatgcaggcagatcacgaggtcaggagatcgagaccatcctggctaacatggtgaaatcctgtctctactaaaaatacaaaaaattatctgggtgtggtggtgggtgcttgtagtcccagctacttgggaggctgaggcaggagaatggtgtgaacccaggaggcggagcttgcagtgagtcgagatygcgccactgcactccagcctgggcgacagagcgagactctgtctcaaaaaataataatcttttattaggagatttttattattttgatttactaagctccttgtgtggagcagtgcttgcacatagtaggcactcaataaatatttgataaaggattaagtgaacgaatgacccacttaggcaatcagttttaaccaaaatatgtacagcttctactggatcaggaattgtcagttatattagtcacataatgagagtaagttttaggaacccacctgtcagcctttagcagaaaataatgattttaggctgggcgcggtggctcatgcctgtaatcccagcactttgagaggctgaggtgggcagatcacttgaggtcaggagtttgagaccagcctgaccaacatggtgaaaccccgtttctactaaaaatacaaaaattagttgggagtagtgtcaggcacctgtaatcccagctactcsgggaggctgaggcacgagaatcgcctgaaccagggaggcagaggttgcagtgagccaagatcataccactgcactccagccggggtgacagagtgagagtgcatctaaaaaaaaaaaaagaagaatgattttgcccttcacacttagtgcacacaagatagatgtatatgaatcccacaaatatttattgaccatcacctgctgtatgtcaggtgctttgctagatgctggagattataagacagcaggattctgcctttttggagcttacagactagtggggtgcgggggagaaaacaagtgagtaaatacataacagattttgaacagtgctctgaaaaaaaaattgatcactgtgattaagaaaacagaaaaggtcttggttttaataggtcaaaaagaccctctttgaggaagtgagtcatgctgaggagccatcatgctgggaaggcaagggggttggagagaacagtctaggcagagagaacaatattgcaaaagtcctcaaatgataaagagcttgtccggttttgagtaacttaaagaaagacagtgtgagcaaaggaggtgaagtgacatgatctaaaattagagaggtgggtaaaaactaaatcttgcacaaacttttatgtgccattaatgcttgaattaaacttttaactttgtagcactatcacttggtgcagctgtgccacttaccattctgtaaccgtggtcttctgttcaaagctttatctgtatattgtctrttttaagcggacatctagtggggcctggttctcaaaagtggtgtctttcaagtttttgcagctccattgtcaaaacaggagtgaaggctgtccaaaaacagttgaccatgccattagcatttggagagctagcagcctttagatacataataataggagccagcacttgagttttatttgattctctaaatttgtagtttttgttgcatagttcattgttgctgcttttgtttttaaacctgcaattgaatattatttttattcacacacacacacacacacacacacacacacacacacacacacacgatgatctgtatttttttaaaagtgcctggctttttmgtcatagctgtatgtggggtagggcaggcagtggttgtatacatttttaggcgagtttgccttgggttctatggtggttataagagcctaaaaaaattacttaattattgactaacttccctcactagaatttaaactccttgagggccaggactttgtcttactattttatccttcagtggctgaaatggtttctaggcacatagttgaccctgatatacttaatgggtttgctgaatgaatgagtggcacatgttagaaataatttggcttagttggagaaaaaagtgttattaagccctatgaactttctgggtcagcagaccaagttcccctataataaaagccaactattgctcagagaaatttgtgattttaatacagtacttgttaaaaactcagagttatcaactagctaatcaagccattaaactttctagccgggatataataagagtttatggctagttgtttttaaggtctaccattttacctccagtacaattcattaagtggtttgaaaattgttagatttgtaaaaccaccttgtcaatcagagtacattttcccccatagagatcagatatgactgagttgtacctcccaccattattaagttatggagaagtagccgggcgtggtggctcatgcctgtaatcccagcactttgggaggctgaggtgggtggatcacctgaggtcaggtgttcaagaccaccctgaccaacatggtgaaacccatctctactaaaaaaaatgcagcattagccgggcttggtggtgcatgtctgtaatctcagctacctgggaaactgaggcaggaggattcttgaacccgggaggcggaggttgcagtgagccgagactaccattgcactctagcctgggcaacaagagtgatactcatctcaaaaaaaagaaaaaaaggatatggagaaggtaggacagaattaaagatcaataggtgaaaaagaggattgtatgccaggaccagggccagaagaaaactgaactaaaaatggacttgctggggaagataaatgattaaatcaattctttattttatttcccaccttaaatcacctgtgttcagttttattgcaggcctgcctaggataatgtactgataacaaaatctggaaaccattcaaaattcttttcctacaagaatggttaaaaccatttacagagtcagttaccctgtatattgtcatgttttgatgcttcctcttaggaaaaaggatggcttaagccacagtaggaaagaaggtgaatattggttgaaagaaaataccttctgtaaagctataaaacctatttcatttagttgttatgtttaggaaagtaagcccttaagagtcctttagttcccctgaagcaaaacgtgctatagaaaataaagttactctggatagttaggaaatttgtttttgtttttgttgttttaattttttttaatttattttttgagactgagtcactctgtcgcccaggctggagtgcagtggcgcgatctcagctcactgcaacctctgcctcccgagtttaagtgattctcctgcctcagcctcctgcatagctgggattacaggtgcacaccatcacacctggttaatttttgtatttttagtggagatggggtttcatcatgttggctaggctggtctcaaactcttgacctcaggtgatccacccacttcaggctcccaaagtgctggggttacaggcgtgagccaccacgcacctggccatagttagggaatttgaaccctagcttagctgctgaccctgaggaagaagcactggatgaagaattgggagatccaagttgtcattttggttatcttccattatttttgctgctgtggacaagttactttaattcttctttgtcctaggttcttcatcttaaagctggggttgcagcaatagctgtaactgaacttactgtcttctggattgtcttctaagccgagtacccttagggaaagggatgaaaattatctaattttgaccagagcacttaagtttctattgcatttgttctcctgccctgttctcaatggaagttttcttactaattttctctctgggggactttgttaatggggcaggtagtcagttagtcaggtctacctgatggtgaacccatatggtgtgtgtacctgcagtaggaaccatgtctaagtgtgtttatgataaatgaggacaaggagtttgagaacagtactgataatatcagttacattgttcacctgagaaaagtcactggttagtgctagtcattgagattttgattaaaaccctagtagaatgaacctatgacagaagaagtataaaacttaacccaaattacttgtctttatttttattgttttatgtgaatggaaatcagcattttctttcttttttttcttttttcttttctttttttttgagacagagtcttgctctgtcacccaggctgtagtgcagtcatgcgattttggctcattgcaacctccacttcctgagttcaagcgattctcatgtctcagcctcctgagtaactgggattacaggcccgtgcccaccatacccagttcatttttatatttttagtagagatggggtttcaccacgttggcaaggctggtctcaaactcctggcctcaaatgatctgcctgcctcggcctccgaaagtgctgggatacaggcatgagccaccacacctggcctcaaattacttaagacagcccaagtatcatataaggtacatttttatctgaccagagtaatatttaatattttctgagtttttccaggctcattgttaaagtctctaaatgctatgtcattgtgtttattgatccacattagtaatctattatttgagtagaactcaagaagcaattctaaatgctttggaatttggaggaccagctctatttctcatgtaattatgttgtattaggaaaggcgtaacttggggcaagtgacagcaaacaatatcacagtgtaagatttaccagagttctactgctttacagtaggtcacattgcaggtgagtcatttttcagcctctggagaagatgggctggaggaattggatttagctgtgatttcattgatattattagtatgagctgtgaattgaatatatatccttttaggcctttaataagaagaattgaagactcaagttgaaacagaaagatgtttcaaatgttttgtttttaaccaagtgtaaatgtagctatcccayacaaaaaagcaaaacgagtgtttgtttcctttgccaatgttgtttatctccttataaatctgttcacttaaaacacatctattttcagtttcttctaaccttttacataatatctttaatatcttttaaccccatcaatcctctagcttcaagcacaaatgccagcctgatatctacttcttctacaattgccaatattccagcagcagcagtagccagcatctcaaaccaggtatgatgctacctttgttcatcctgtttgatagagttcatccagcttgctctttcttctttccatggtcaatttgcctatctaagaaacaaccaggaatagtatgggctgtggagacttttttctggataccttcagaactcggaccctggatggcatcttaggttactgtctagtttttgttgttcctctgctgggtctctctagaatatggttatgtctgtttctttactgtatttgtcttcacttcctactctgcccctactagaatgtaagctgcatgaaggtagggatttatttttctgttttgttcatttacatattcccagagtatagaaaaatgcctgccacttacatcaaaggcacttgataaatatttatggaatgaacaactcattctttatgaattttttgtggtctattcttgatcactgttatgttaactatgcttaggagatcactggtaacaccttcagtgttctagagttttttatttttgttttgatttgttttctctacagcaattatcatcaccactgtctccttggatcttttcctggctacagttaacattactattctggttattatactggttttgctttttttttttttttttttaagatggagtctcactcactctgtcgcccaggctggagtacagtggtgcgatcttggctcactgcaacctctgcctctcaggttcaagtgattatcctgcctcagcctcctgagtagctggaactatagtcatgtgccaccatgcccagctaatttttgtgtttttagtagagatgaggtttcacatgttggccaggctggtctcaaactcctgacttagagtgaaccgcacccgccttggcctcccaaagtgctgggattacaggtgtgagccaccgcgcccagccttgtttattcttttagtccacaaatatttattgagttcccacctgtgtacctggtatttttctaaggactgtctctttctctctcatagctcttctttttgaccctgtctttgaacgtggacagtctctatttggtttttccacatgttaattacttcatccacagggatgtttaaccacataatgtccatttactgtcaccaaagattctaatcctccctcatgataattacagcttccaactgattgacatttttttctttaatgtcttgctgtttccctaagttcaacatatgtaaaatcagacttttattccagccctttttatgtctctttgtcttccagaagtaaaaccacttttccctgacttcttaattcttattagtgatactacatttttyttaataaacctaggcctaaaaccagaccagatatcttccattatttttctcacaaccttacccaatctggtcatttctcaaaatctttgagaagaatttcttttgctttttgctatcgtctccaatgttttggtattttcccttttaatcctgaattaccatagttaattgctcattttatttccagttttttcccccttgtgcctgttcattctctaaaatactatctcattaattttttctaaatcccactttttgtcatgttactgacctgctcagaatattttcatgttttttgtttgtttgtttgttttttgagacagagtctcgctctgtcacccaggccagagtgcagtggcgcaatctctgctcactgcaagctccgcctcccgggttcaygccattctccttcttttcatgtttttattcgttggtttgaatttgagagtccccattccctattccctagcccacaggctatatactattgcctaaagaatccaagtcttattgctttaccaatcattcaggcctacagaggtcctttgtttcaaccagactcagcatctgtggtccctgaataaaatctcctcagagcctattcatgttcttactttctctgcctattaatctcagaaagcttcttcaccatcatactttacaatgatagttgtctgttctgtatttcagtcatttgacatatattttattgccattttgttgtctgtcttctctcctgctagatttttaactcccttgagttctgctagtgtgacttattcttttctttaatatttccttcttctgcccatgcacaaatacacacatacatataattatatttggtttatggtagagatacccaatgactaattagaaataatgtatctgatcagttagctttttcctacttgccatcattatcagtgtcaatggaatttttttagctgcgtatttgaactgtcatacctagtttttttacagctttattagggagtaattgacatacagtraactacacagatttaaattgtacagtttagtaagttttgccatatatgtgcctatgaaaccaaaagttttatcccaatattttaagaaacctttttttttttttgagacagagtcttgctctgttgcccagtctggaatgcagtggtatgatctcagctcactgcaacctctgtctcccagattcaagcgattctcctgcctcatcttccctagtagctgggactacaggtgcatgccaccatacctggctaatttttgtatttttagtaggggctgggtttcgccatgttggtcaggctggtctcaaactcctgacctcatgtgatctgcctgcctcagcctcccaaagtgctggaattataggcgtgagctcccgtgcctggccttttttttttttttttttttttttttttgagacagtgtgtcacctaggctagagtgcagtggtgcagtcttggttcattgcaacctttgccccctgggctcaagttatcctcccatctcagcttcccgaatagctgagaccacaggcgtgcatcaccatgcctggatttttgtttgtttgtttgtatttttagtagagagaaggtctcactattttggctaggctggtctcaaactcctgagctcatgcgatcctcccacctcgtcctcccaaagtgctgggattacaggcgtaagccactgttccckgccaggaaactatttttaaagaaaacttgattgttttaggtagataatcaggttgttttttgtttgttttgttttgagacagggtctcgctttgtcacccaggctggagtgcagtgatgcaatctcggctcactgcaacctccgctttccaggttcaagcgattcttgtgccttagcctcccaagtagctgggatttcaggcatgtgccaccacgccaggctaatttttgtatttttagtagaaacagggtttcaccatgttggtcaggctggtcttgaactcctgacctcaagtgatccacccatcttggccttccaaagtgctgagattacaggcatgagccactgcacccagctgataatcagtttttaaattaagacattttaatgtaggatatgtgctttttttgtttgcttaagtttaagttttgttttgttgtccttagaagtgctattatctagtgcaacagtttgtaaacctcttagagtagaatctttccctcaaattctgtgcagaaattcggtacataaaactgggggaagaggctgttagagtacaaaaagggacaccatgtgtatgtttatgagagtacagaagacccttccctctcagcatttcctcattccaagactgctcctgggacatctcttgacttaggtttccacagaatgcattttgaaaatcattgatttagattggagacttttaggtaggtaaatgagaagtcaaattaatgttttagaaaaataattatgaataagaaagagggagaagaaagcctcttgtgttgagattaatgtatgctataagagtcttgttttcttatttcctttggcctgcaggattatcccacctatactattcttggtcagaatcagtaccaggcctgctaccccagctccagctttggagtcacaggtcagactaacagtgatgcagagagcaccacattagcagcaaccacataccagtcggagaagcctagtgtcatggcgcctgcacctgcagcacagagactttcctctggtaagcaccgcagctctgaaaactttggcttaaggtcacttcatccaacagttgtttttaggcaatggtaaggatgattttgttctgtcttaagtcattgttaccatgcttttggctttccctctgaggtgaggagtattggaagcaggctgtgagtcattggtaggctgaatgtatacctgatgctgagaacggaacagaaaagtatcaagaactaaaagactctttctgactcrtactctaccctccctgtagctttaacccacttgccacagggagcttcagcatgttataatattttgtaaaagttggaggactccagttttagtcttgcgcaggttttgaactgctgctaaggcctcagagccatagttctttctatgtccaggatccctttaagattctgaggaaagcatggtccttttccctcagagaaatatatacaatttaacctacaatttcagtatgctcacagctctgaagtgtatcaatgaattacagtgtccaacttaaaaacctttgacataaaagattagacacacatttaataaacatatatatacacacactttttatttatatttaatgaaaatttggtagttggctttcacatcatgtggttcgaggaaagcactgtttatcattggcactgatgcatgtttagaaacagtactatataacaagtgaacagttttctgtgcggtcaccctaccagtctaataagtggacatacaaatggtcgccacttcaaacttacataaatttgaaataattacaagtgttgattaaaaactaaggttttaaagtcatttttctaaatatctttgttataacaattttaacttttgaatattggagaatttcaaacatagagaaaagttgcaaggctagtgtgatgaacacttacatatccatcattcatcttcaacagttatcaacttatagacaattttgtttcagctatacatcatctagctccctccccagattccaggcattgttctctaaaakataagtatggtacttattaacataaccacaatggcattatcccatctttaaaagttcaatattaataatgtcttaattttgtattatcaagtaccaaaatgtatttgtatttccagctttctcataaatgttatgagttttgtttcccttttgtttaaagtaggatccaacccattccacagtgtatacatatttcaaaacaacataaagcatatacagtttttatcgcattagtaaatagaaataataaataaatagaaaatttgaggagggaaaattaggatccaaatataaggtccataaattgtgattggtaattatgggtattttgtgtttcatctctattttaacctataaatcctcccgtctctttttctcccccttgtagtttgtttgttgaagaaactggagtgttgatcccatactgtttcccagtctgaattttgacagttatatcctcataaggtggtttaacatgtcctgctgccttctgtattttatagtaaattggtgaatgaacagttgttttcaactgttggcaatgtatggaaacatttttggttgttacactaggtggggcggtgcttctggcatctagtgggtagatgctaaggatactgcttaaccaaacatcctataatgcacaagacatccccccacaacaaataattatctgatccaaaatgtcagttgtgccaggttgagaaactctaatctacaagtttgaccatgaagattcaggttcagctttttcttggcaaaacaacttcattgatattttcttctatcatggggtaagcatataaagtctggttataacttttctgatgttagccagtgctgatgctcaatgcctagatgtacacttcataattgcttacataaggtttagctttccaacctttatccctgcattatgactcacaagggcagagagtccactaaccctcttcctgccctgattcttatagcctgtgactcctgacaacatatgtttcactttttctttccaggagacccttctacaagtccatctttgtcccagactacaccaagtaaagatactgatgatcagtccaggaaaaacatgactagcaagaaccggggcaagaggaaagctgatgccacttcttcccaagacagtgaattagaagtatgagaagaaactgatttagttacctactttgttctttctcacttcttaagtttatcaaacatgtttttgaagctcacagagataatgtgcactatgttatgtgccctttaattcctgagcaaaataaactaaattggccacgttaaaagaaaaatgtaaaaagaacaaattattctgtatattccagaagagaacagaaacaattcatcatattcagaaagcagagggagttacaagtaaagtcatactgttctctatttaaaattttaaaagggtcaggtgcggtggcttacatctgtaatcccagcactttgggaggctgaagcgggaggatcgcttgagaccagcctaggcaacatagtgagacccccatctctaaaaatatatatatacaagaattagctgcacacctgtagtcccacctacttgggaggctgagatgggaggatcacttgagcctggcaggttgaggctgcagtgagctatgatcgggccactgcactccagccagggcaacagagtgagactctgtctcaaaaagaaaagaaatttaaaaggaaaggactagagtgcttttagccaagtttctgtaaggcgcaaacagatctggtaacttattaatgagactggtgctgatttattctgtagtgtaagtactatatgagtttattatggacatacatttgacttcatcattaaagacataaaggtcatgcagagtgctaaaattagtggagtttttgtattatctttttgttttctgttttccgtttttctatagtgctattatgtactgaggggaaaatacatatttaactatgaatccattgataagtgctcttaagacataggtgaactgagcctgtatttgaagccttttctcttttttcagaggtttggagtgaagaagaaagaaagaaaaagtaaatttctgatatatttcttaggaaaaactgataactcattttttaattgtctaaaatatacataaaatttaccattttagccatttttaagtgtacaatttagtgtcattatacattctcaatattgtctaaccatcaccactgtatatttctagaactttttcatgattccaaatgaaaactctgtacccattaagcagtaactccccattctccccttcttctaacctctggtaacctctattctactttctgtctttgacttcttattctagatatctcatataagtggaatcacagaaaatgtatccttttgtgccagacttatttcatttaccataatggttttttgttgttgttgttgttgttgttgttgttttgagatggagtctcaggctggagtgcagtggcacgatctcggcttaccgtgacctctgcctcccgggttcaagtgattctcctgcctcagcctccagagtagctgggattataggtgcacaccaccatgcctggctaatttttgtatttttagtagagacagggtttcaacatgttggtcagtctgttcttaaactcctgacctcgtgatccgcctgcctcggcctcccatagtgctgggattacagacgtgagccaccatgccctgcctaccataatgtttttaaggttcatccatgttgtagcacataccagaatttcattcctttttatgtctgaatattttattatatgtatataccacattttgtttatccattcatctgttgatggacacttggggtttgtcacctttgtgctattgtgagtaatgctgctttgaccattggtgtacaattatctatctgagttcatcttatcaattctttttggtatatatgtaggagtggaattgctggatgctattgtaattctgtgctccactttttgagaaaccaccaaactatttttcattgtggctgcacggttttatactcttaccagcgatacataaaggttccagtttgttcacatcctcgccaacacttgttatttcccatttttttgataatagctattctaatggatgtgaagtggtatcttattgtggctttgatttgcatttccctagtgcagtggcacaatctcggctcattgcaacctctgcctcccaggttcaagcaattcttgtgcctcagcctcctgagtagctgggattacaggcacatgccaccacgcctggttaatttttgtatttttagtagagacggggtttcaccatgttggccaggctggtcttgaactgctgacctcaggtgatccacccacctcagcctcccaaagtgctgggattacaagcatgagaacctttgcccacttttaaactgggttgtttggtttttcattgttgagttgtaggagttctttgtatattctatattaatattctagaatattctagattattaatcccttatattaatcagatatataatcttcaaatattttctcccattctgtaggtcgtcttttcactctctcaatttttgtgctttgaagcacaaaaatttttaatgtttaggaagtctgatttctattattgctgtgcttttggtctaatacttgttgtttctttttgttttgttttgttttcttggtgtaatacttaatacacggttatgaagatttttatgtattttttctgagattttcatcgtttagctcttaaatttaggctgttctccattttgagttagttttgtatatggtgtaagataatggtctaactttattattttgcatatggatatccagttttcccagcactatttgttgaaaagacgttccttattgaatggttttggcatcctattaaaaattaacttatgatgttggctgtaggttaaatactaaaagaaggtaaaaaactaaactaaaaaaagaaaaagaaaaattgatcatatttgtaaggctttatttttagactctcggtttatttcattcgtctctatgtctatccttatgctagtaccacactgttttggttactgtaagttttgaaatcaggaagtgtgaatccttcaactttgttctatttcaagacagttttggctatttggggttccttgagattcataagaattttagaatgcaattttctatttttttaaaaaactactattggattttgatagggattgcgttgaatttgtaggttggtttgggtagtattgtcttctttacaatattaagtcttctaatccatgaacatggatgtctttccgtttatttagctatgcctacttggttaaatttattcctaagtattttctttttgatgctatcacaaaaggtttttaaatttccttttcaaattattcattgcaagtatatagaaatacagctgattggccgggcgcagtggctcagtctgtaatcccagcactttgggaggctgaggtgggcagatcacaaggtcaggagttcaagaccggcctgaccaacatggtgaaaccccgtctctactaaaaatacaaaaattagacgggcatggtggcaggcgcctgtaaccccagctactcgggaggctaaggcaagagaactgcttcaacctgggaggcggaggttgcagtgagccgagatcgtaccactgcactccagcctgggtgacagagcaagactgtctcggaaaaaaaaaaaaaaagaaagaaagaaagaaatacagctgatatctgaatttatttattagctttaacaattttctctgggttatttaaggttttctacatataagatcacatcggccagggacagtggctcacgcctctaatcccagcactttgtgggcagatcacctgaggtcaggaatttgagaccagcctggtcaacgtggcaaaaccctgtctctactgaaagtacaaaaataaaaaaaaattagccggacctggtggtgcacacctgtaatcccagctacttgggaggctgaggcaggagaatcgcttgaacctaggaggtggaggttgcagtgagcccagattgcaccactacacttcagcctgggtgacagagcgacactctttctcaaaaaaaaaaaaaaaaaaaaaaaagattatgtcatctgcaaacagataattttgcttcttcctttccaaattggatgtctttttcccctttcttgccaaatctctctggctagaacttccagtactatgttgaatagaagtggcaaaaacagacatccttgtctcaggagtaaaactttcagtctttcaccactaggtgtggtactagttatggatttatttttatttttatttattttttatttattttttggagatggagtcatgctctgtcacccagtctggagtgcagtggcatgatctcagctcactgcaacctccgcttcccaggttcaagcgattctcctgcctcggactcctgagtagctgggattacaggmgcgtgccaccacaccyggttaattttttgtgtttttagtagagatggggtttcaccatgttagcgaggatggtctctatctcctgaccttgtgatccacctgcttcagtctctcaaagtgctgggattgcaggcgtgagccaccgcgcccggctagttatggattttttatatatggcctttatcatattgataacattcccttctatccctcatttattgaaaaaataataaactaggaatagaaagggtgttgaatgttgtcaaatgcattttctgcatcagttgagattatcatgtagctttttccccctctgttctattaatgtgatgcattactttgcataatttttttttccaataagccttttgcactcctaattaattttttaatgttgaatgaaccatccttacatccttatgttctgagaactaatctcacttggttatgatgtttaattctttttttttttttgagacagaacctctctctgttgcccacactggagtgcagtggcacaatctcagctcactgcaacctctgcctcctgggttcaagtgattctcctgcctcagcctcccaagtagctgggactacaagtgtgcaccaccacacccagctaatttttgtatttttagtagagacgaggtttcaccaggttggccaggctggtctcgaactcctgacctcaggtgatcctcctgccttggcctcacaaagtgctggaattataggcatgagccaccatgcccggccatgatgtttaattcttttaatatgctgctgaatttggtttacctctattttgtttagttttatagatgtgtggttttttgggggttttttgttttttgggttttttttgagacaggttctcacttcgttgcccagactggagtgcagtggtgtggtccctgcacactgcatccttgacttcccacgcccaagtgatcctcccgcctcagcctcccaagtagctgggactaccggcatgcaccaccggaactgggtaatttttgtgtttttttgtagagacggtgttttgccatgttgtccaggctggtctcaaactcctgggctcaagcgatctgcctgcttcaggctctcacagtgctaggtttacaggtgtgagccactgtgcctggcctgttgagtatttttatattgattttcacaagagatgttggtctgtagttttcttacagtgccttagtctgactttggtatcaggataatgcctcattgcattagtcaggaagtattccctcctcttcctttttttgtaagagtttaaggaggattcgtgttaattctgtaaatgtttggaagaactcaccattaaaaccatcttgtcttgggcttttctttgttgggatgtttttaattatgcattcaatctccttactctagttatagctcttaccggattttgtattccttcttgagacagttttggtactttatgstatgtatttctaggaatttgaccatttcacctgggttatccaatctcttggtatacaactgtgcatagtattctcttgtaatccttatttctataaaactggtagtgatgtccccactttcatttctgattttagtcatttgaatcttcttttttttcccttagtcaatttagccaaaggttgtgaattttatagatattttcaaagaaccaactttttgtttcattgatttttctctgttgtttttgtagtctctcttctatttatctctgctctagccattgttatttccttcctactgctagctttatgtttattttgctgtttttctagtttcttaagatatgcaattaggtcatagatttgggatcatttgtcttttttaatgtatgtataaaatacatatatatatgtaaaatgtaatacatatatataaaataagctataatttttcctcttagcactgctttcactgtattccacaaatttaatgttttatttctgttttcattcaactcaaggtatattctgatttcacttatgatttcttctttgacgcattggttgtttaggattgtattgtttaattcctacatatttatgaatttcccagttctctttctgttattgatttctggtttcattccattgtaattggaaaatatactcattttttatattttctttcctcagcgggtatttctgtgggacttggatgaaaccatcatcatcttccactcacttcttactggatcctatgcccagaaatatggaaaggtaatttgagtcttctttgttgtaactgtccctcttctgactatatagtcagtccctcttctgacacataacaaattatttctctgctacccctgttggctggcttttcactttccatgtaaaacttcaacaaatggcttgcaaatggcttgtattaggcaggctacatggtcaggcagaattgatggtaaagtggtaaagttagaaactactagaaccaatgctgaaagctgaagttgtaggagaatggcattttgtgaagattaaagtatagaaatgaggctcaaaatagagcagagtctcaagattatattaataaattccagaggctgatgtcttattccttaacacacttttaacagcccaaattgagcattttatttagccaaatatatgccagatatatataagtaaaatatatagataaaatatctttctaaaatagattaatccctttttaaactaaatacaccaagcaaaacttgttatatcttcagtgtacatatcagttttaacagaaggatgggctgttttgagactattaggctgtgtatttctattctaaattacctccaagctcatgtttttcagtttatatgaataaattttatacaaatatctgcaccccagccaggtgcagtggcatgcacctgtagtctcaactactcaggaagctgaggtgggaagattgcttgagcctaggagttcgaatccagcttgggcaacttagcgagaccccatctctaaaaataaaaatatttgcctcctttacctgtcctgttacttccagttatttcatatggttactaatgtttttgttagtaggtgtgggtttttttgtttgtttgtttgtttgtttgttttttgagagagagtcttgctcttgtcacccaggctggagtacagtagcatgatctctgctcactgcaacctctgcctctcgggttcaaatgattctcctccctcagcatcccaagtagctaggattacaggtgcccgttaccatgcctggctaattttgttgttgttgttgttgttgttgttgttgttgttgttgttgtttgagacggagtctcgctgtgtcacctgggctggagtgcaatggcgtgatctcagctcactgcaagctatgcctcctgggtccacgccattctcctgcctcagcctccccagtagctaggactacaggcgcctgccaccacgcccagctaattttttttttttttttttttgtatttttagtagagacagggtttcaccgtgttagccaggatggtcttgatctcctgacctcgtgatccgcccacctcggcctcccaaaatgctgggattacaagcgtgagccactgcgcccagccctaatttttgtacttttagtagagacagggttttaccatgttggcaaggctggactcgaactccagcctcaagtgatccgcctgcctcggtcttccaaagtgctgggattacaggtgtgagccactgtgcttggccaggaggtttgtgttttttttttctcctgagataatatctcgctctgtcatgcaggctggagtacagtggcgcaaacacagctcactgcagcttcgatctcttgagctaaagcaatcctcctgcctcagtcctccaggtatctgggactacaggcacatgccaccatacccggctaattttgttttatttttgtagagatgggatctcgccatgttgcccagtctcatcttgaaatctgaggctcaagtgattctcctgcctcagtctcccaaagtgctgtgattataggcatgagcttctatacccagcctctgttagtattttctacaggcttttagtgtctagtctggcatgctgacataagctatataactaaactgattataaaaatatataaaattaaaaaaattatatatatatttataaaataagaccaggcgtggtggctctcatctgtaatcccaaaatgtgtataaaaattttatatattggccaggcatggtggctcacgcctgtaatcccagcactttgggaggccaaggcgggtggatcacctgaggccaggaattcgagaccagcctggccaacagggtgaaaccccatctctactaaaaatacaaaaattgccgggtgcggtggctcacacctgtaatcccagcactttgggaggccgaggagggcagatcagctgaggtcaggagttcgagaccagcctgaccaacatggagaaaccccgtctctactaaaaatacaaaattagctgggcgtggtggcacatgcctataattccagctactagagaggatgaggcaggagaatcgcttgaacctgggaggcggaggttgcggtgagctgagatcgcaccattgcactccagcctgggcaacaagagcgaaattccgtctcaaaaaaataaataaaataaaataaaaattcaaaaattagccgggcatggtggcacatgcctgtaatcccagctactagggaggctgaggcaggaggatcacttgaacctgggaggtggaggttgcagtgagccgagatcgcgccgcagcactccagcctgggtgacagagcgagacttttttttttttttttttgagacagagtctcgctctgtcacccaggctggggtgccatggtgcgatctctgctcactgcaagctccacctcccaggttcacgctattctcctgcctcagtcccctgagtggctgggactacaggtgcccgtcaccatgcccagctaatttttagtagagatggggattcaccacgttagccaggwtggtcttgatcccctgacctcatgatccacctgccttggcctcccaaagtgctgcgattacaggcgtgagccactgcgcctggcaaaaaaaaattttatatatttacatatacacataatattatttcatgaaaaacagttttttacattataaacaaacactaagcttcatggtgaaatttttggctttgacatttaagttcacctttgagctgaagaagatataatgggaagagcacaggactgggagtcagaagacctgaacgtgaaaatacaatgtatatatcttgtatcatatatattattatataaaatatatattaaaataatgtaataagtatattcatataatatgtgaatatatttacatagtgatatagtttatataaattatatattactgtgtatatataatgtatatatcttatataaatatatacagtgatatagatatgtgtataaatacacaaacacacgtacacactttgagacagagtctcactctgtcacgcaggctggagtgcagtggtgcagtctcagcttactgcaacctctgtttcctgggttcaagtgattctcccacctcagccttccaagtacctgggactgcaggtgtgcaccaccatgcccagctatttctgtgtttacttttgtagagacatggtttcaccatgttgcccaggctagtctcaaactcctgggctcgagcagtccacctgccttggactcccaaagtgctaggattacaggcgtgagccactgtacccggccaaattttattttttgtggagacgggggtcttgctttgttgccccagctagtctagaattcctagccttaagcaatcttcccgcctcagcctcccaaagtgctgagatgacaggtgtgagctagctaccttgcctggtcagcattgtatctttttaaaaacatattttctggccaggtgcggtggctcacacctgtaatcccagcactttgggaggccgacgggggtggatcacaaggttaggagatcaagaccatcctggctaacatagtgaaaccctgtctctactaaaaatacaaaaaattagccaggcgtggtggcggatgcctgtagtcccagctactcgggaggctgaggcaggagaatggcatgaacctgggaggcagaacttgcagtgagccaagattgcaccactgcactccagcctgggcgacagagtgagactccgtctcaaaaaaaaagaaaaaaaaaatcatattttctgtcctcatttatctttatgaaactactaatttctagaaactaaagtcctgaaatttttaactgtccatatcttctctattttacaatcctggattctcataactgtgaatgaaattgcatcaatgatagtttgaagcacagttgggagctcgtgtgttttggccttgacctaaaataattttgaaatttgaagattagaaccaggactgtgactaccaagtcaagctgattttttcttattgtcttctaggacccaacagtagtgattggctcargtttaacaatggaagaaatgatttttgaagtggctgatactcatctatttttcaatgacttagaggtaagcattttaaattgtttctgtgcttcactgagacacttcattcaataactatttagagcttttgcttattatattagaagatatgtgtttagatagggtggatatggagaggccagctggccactaaggcatacatacatagtcttagagaaatagtacttgtggttgggtcaccacagttttggttctgacattcaattttattggctcaaaaatttgatttttgttagtttatttggaggtgatctagcactaggggaaaggccaacccatcaggcaaaacactgacatataaaccaatattctaacttaataatctatattaaataatatatataaagtgagtttgattatttgtactctcaattatgttttgacttttcttccattttacattcttaaaggatagtctcctgatttgtcgaatctataaatggttactctaacccatcatattttatacatatttgttgttcatatgtaggttaaccttgatattcagaataattttatagttaggtgccagaaaaaccaggaaacactaagagcttcatggtgaaattttttggctttgacatttgagttcacctttaaggtgaacatggtgtagcagaaggagcacaggacagggagtcagaagaccagaatgtgaatctcacatagggaaagttatgttcccattctgggcctcagttatgcagtcatcctacacaggaaactaccaacactgattaccatctatggagagggatgagttgccaggacacaaaggtgggagggagcacacttttcacttcatgtcctttgaattttgagctgtgtagtacatgttttacctagttttaaaaatagtgaaaattttaaagtaaagtaatataggattttataggctgggcgtggtggctcatgcctgtaatcccaaaactttgggaggccgaggcgggcagatcacttgaggtcaggagttcgagaccagcctgagcaccatggtgaaaccccgtctctaccaaaaatacaaaaattagccgggcatggtggcgcacacctgtaatcccagctactcaggaggctgaggcaggagaattgcttgaacccagaaggggaaggttgcagtgagcaaagattgcactactgcactccagcctgggcagcagagagagactctgtctttaaaataaaaaataaaaagatagtattttataaacacaaagtaatcatttttttaatcttttttttttttttagtaatagagatggggtttcactgtattgcccaggctggtctcaaactcctgagctcaagtgatcctcccaccttggcctcccaaagtactgggattaccggcgtgagcactgcacccagccaacacaaagtaatcccatctcttttaaaataaacgtctgttctactcaacagacaattcttcaataaattaatagtgccccgagctccagtacttttgtctaaactccataatgctttaatcttccctcaacttcatatgttgataaattaggacatcatagtttttattcagcaaacatttattgaaaacctactacatgccaataattattgccaattgtatttgtaatgattttctagacatagtcctcactcaggaactgaaagttctgtgaagaatttgacctgaatgtgttcctgccccccaggtcagtgcttctcaactttagggggcataagaatcacctggggagcttcttaaaagtggagattctaggacttcactctcagaaattctgattcaagtaggtctgggatggacccaagaatatgcatttttaaaaaacttccccagaggattctgatgcaggtaccctaagtggtatcagaggagtacatccatcagttaggtagtgggcggcattttatgtcagtagtagcatgggcttggtggaaagaaccttggattagaagcgggggaaaaaaagaagcagaaaacctgggttatttctagtctctttctkccactcactaattgtatgactttgagaaaatcatttcacctcacttttaaaacatgaggagattgatttagatgacctcttctaactcctgactttgaagttagaaatttcagtcattctcggttttgataccacactaccagcgtctgttttgtctataaaaatttattgggcacaacctacgtaaggatactggactagatcagagagatgcaaaggagatgtgagatgtggctcctgccccaagagacctgcattgtaataggacttacagtctggtgtaggacataagaacatttgaagtgtaagggagcttgtgcttattcccatgagctgttggagaaatgaaatattgagataggagtagaaacaagggatgggatagttacagaactcatgaagactgggatgtgaatcaggtcttaagaggaattggacagcaaggggtgtgagagtgatcacccacacataagagattccataaggcatttcattatcctgccactgtatatggtctttttatagtatgtcatgatggtaatatcacttctactccctggactgaagtaatatgttttgtcttttaacaggagtgtgaccaggtacatgtggaagatgtggcttctgatgacaatggccaagacttgaggtgataaacataatgattcttgaacaccagtacacctgttatgtgcaagatctgtctgtctaggtttggaggaaaacaaagataaatagaatatatctctgaaagagctcacaacctgttagaggacatagaaacaaacatagttaaccgtgatgtatagtgtgagaaggtgacaatagaaaatgccgtggagcacgagaagaaagaattctgttgggatagggagtgggtagtgccaacactggagaggtttctcagtggagtagcattaaagcagaacattaaagaatgggtagcaagccaggcacagtggctcacacctgtaattgcagcatcttagaagcgcgaggcaggaggatcacttgagtcttggagttcaagaccagcctggacaacacagggagatcccatctctgtaaggtagtcttccacattttattatagtgaaagttaaaccaaggagatctcagtggcaaaatgcttgctcaggctcctcattcctctttgttctggcccactagccttagctaagaaagatccaaaaatttatctagcttaaagacttataagaaaaaaacctgtcacatcttttcatattagtttgtttgaatgtttatccctttttataagtaaaatgttcttcccagtaactaccccaaaattcagtgttctatccaccagttctcaaatacggagtagaactggacataccaccttaataaggacctagtcaggtagagctgagaatattggaaggtttcactttcaggtacagcatccagttgtacatgttgtggtgtcacatggtcatggagggcacaattcttatgacactttactgttcttttcagggaaaagtctggtctgaagagtttatattctgctctgaaccccagttgttttttttcctcttatacgtgtggctaaccagtaattacttatcatgtcttagcagctatattttcttaagcacagaatctcactcttagcatattgggatctattttaacttttgattgaaccaagttgttcagtcatttttagatctttacttatgaaatattaatccttcctagtttgtataattgtattatctgttgctatgcaacaaattactccagagtttagtaccttaaaacagttaaatggccagatgcagtggcttacgcctgtaatcccagcacttcaggaggccagtgcgggccaatcacttgaggtcaggagttcgagactagcctggctaacatggcgaaaccccgtctctactaaaaatacaaaaattagccaggcgtggtggcatgcgcctgtagtcccagctacttgggaggctgaggcaggagaattgcttgaaaccgggaggcagaagttgtagtgagccgagatcacgcccctgcactccaacctgggtgacagagtgagactccgtcttaaaaaacaaacaaataatgaaacatttatcctctcacagcttctgtaggtgaggaacttaaaagtgacctagctagtttttctttttaagaaatacttaatattttttattttattttaatttattcattttattaatatttactcaatttctttgttcatttttattttttatttttggctggagtgcaatggcaccatctcggctcattgtaacccctgtccctggcctccctcaagcaatcctcccaccccagcccccaaaatagctaggaccataggcgcatgccaccactcctggctaattttttgtatttttagtagaggcaagagtgccatgttgcccacacttgtctcgaactcctgagcttaagcaatctacccacctcagcccctcaaagtgctgggattacaggtgtgagcaactacacccagcttgtactcattgtcttttttttttttttttttttccttttaagatagggtctcgctctggcacccaggctggagtgcagtgttgtgatcatatatggcttgctgtagcttcaccctcccaggcttaaatgatcctcccaccccagccttctgagtagctgggcccacaggcgcatgccaccatacccagctaatatttccattttttttttttttagagatgggggtctccctgtgttgcccaggctggtctcgaactcctggacccaagtgatcccccctcattggcctcccaaagtgctgggattatagacatgagccaccacacccagcctacttaaaggattttaaatctagaaaatctattgttaatttattttttcactgttacaaattttattttgtcaaggtaaaatatacatatacatatagaatttaccatctttatcattttttaagtgtacagaagtggttccttttttttttttttccaaagagacggggcctgctctgttgcccaggctaaggtgcaatggtgcaatcatagttcccaatagcctcctgggctcaagtggtcctctcacttcagcctcgtaagtagctaggataacaggtacacaccaccatacctgactaattaaaaaatttttttcttagagatgggatcttgctatgttgcccaggctggtctcaaactcctggcctcaagcaatcctcccatttcagcctcccaaatagttggaattacaggcaccagccactgcacctggccaggggtagttcttttccccccgcaagctgaagtgcagtggcgtgatcttggctcattgcaacctctgccttccaatctcaagcgattctccttcctcagtctcccgagtagctgggactacaggcatgcgccaccacacccagctaatttttgtattttttgtaaagacagggtttcaccatgttggccgaggcgggacctcaggagatccacccgccttggcctcccaaagtgctgggattataggcatgagccactgcattcagccccagaggtagttctcaattagagtttctggggttgaaatcaagatgttggctagagctctaatcatctgaaagcttaactggagctggagaatgtgcttccaatctctgacatgtggctgatgacagaaggctttagttcctcattacacatacctctccatggggctgcttgaatgttctcacgtgacagctggcttcttccagagcaagtgctccaagagagagcagaagaagcctagtctctgaagcctaacactatcagttttatcactttctatttatattttaagtatagtccatacccaaggggagcagaattagaagagaggaatatcaaagaatttgtagatatattttgaagctaccacagtgacctatgaacataaaccagccagcagatcacttaaggaaatatctgccattatcttaccattgwtagcattttagcctatttcctttcattattttttcatgtttctcctttttacatagttgcaatcactgtgtgtgtaagtgtactcacaaaattttatattctgcttttttcactgtgtggttattttctgtcattagtgaaaaagatgccttatcccaagtcaacctctaaggaatgctggtgcttgaattgtttctacctttcattccctctctcatttcagtcctttctttgatagaagtaataagtgtgagatagagaactaatgaaagatagactctgacatacagagattaaggaagaagatccttaaagccattggccttatttatcagataccaagaacccaaccaaatagcactcaaacaaaaactttatgctgtataaattttaatttttattatcttctctccttgcagcaactacagtttctcaacagatggtttcagtggctcaggaggtagtggcagccatggttcatctgtgggtgttcagggaggtgtggactggatgaggaaactagctttccgctaccggaaagtgagagaaatctatgataagcataaaagcaacgtgggtggtaagtgtggcatataaccagtctgattctctgtttcttcctggtttcctccttttctttccagggattccttagattccccatgacaactgcttataaattatgccacagttatatgttaaactctgtatttaaaaaaatagaggtttggttgaaaccttttgggaggaagctctatatttctaacgggcttctctaagcataattttggaaagttctcttgttgtctttggacaaatgcctttttaaaggaaacatgttctgtagattatgtttgatgacatgtatcacaactgctgtcaacgctagttaatagggtgccacatttttttttttggctggtttatataactatcaggacaagttaagtagaactagctagtaacttttcgtggacagaaatctaggtccaggattgtaggttggyagtatcaatgtgttgtgatttaaagaatcttggaaattctttctgaccagaaatatttcaaatgccagatgccactaagcctaaaattctattatttagaattaattaatcatagattgtttgaattaaaagagacagaagtctaatctgaattcctcattttacagttgagaaaagtgatgtccatcataggggtagtgggggcagcttattcatggtcacattgcaaatttgtaaccataccatgtttgaaattcacattccctaactttttggtccagtgcactttcatgcagctccttttatagtgaggtactcttttgagaaaatatttaaaactgtaaaccatcaccatcaaagatacaaatacatacaaaatgttgctcaaagattcagggattacatagcctgcctagagcaggggtccccaattcccgggcctcagactgataccagtcagcggcctgttagcaaccaggcagcacagccacatagcaggaagtgagcaggccggcaagtgagtattactgcctgagctccacttcctgtcagatcagtggcggcattagattctcataggagtacaaaccctattgtgaactgcacatgcaagggatctagttgcatgttccttatgaaaatctaactaatgcctgatgatctgaggtggaacaatttcatcycgaaacctctcgccccccacccaggtccatggaaaaattgtcctctacgaaactggtccctggtgctgaaaaggttgaggactgctggcctagaggtattttactcaaggtcaagagcccttgtactatactatgctgccttacaatatggcgcagaaagtaggaacaagactttacagatcaatttggttcatttcagttacagctctctaataccagataaaaatcatgggcttccagacttcaggaatctaatttacttttttcagattcccctttttgttgcttatttcttctcatgattcaaagccagtattttttattttggtaactccacatctttttgcattttctttctcacaaacattagcctttcttttgttagttttcatatacagcctgagtctctttatcttttccctgcccaatgcctggacctggtttcctgaacaaagcgatgtaaccctgtgtgagaatcctctgagcctactttggagaatagattaaaattaatggccagctgtatgttttgtacaatatgaattgatgaaagcgccacatcatgtattagttgagtatatcatatataggtactggttttgttgtcgttttgttttatccaaaatgttaagagtcatctaattctaggcttacattgtggaaccatcaatctgaaaacaaattatactccagttctcctcctcacaaaaatgccatctgcttttatggagtattactaatagaatacaggatttttttttaaccttcactgtagaaaattcagatccagatttactgcttgaatattttaactgaagtgtctgagagcaggctcccatcatatgagctctcttttgtgcttagatatctagtcttgggtagtgttttagtgtcttatcagttggagttgtttcagaagtacagtatggagaattagtcattcaacctggaatttcatgtcaacatgttctgaagcaagtggacaagtagtcaccatggaagttctgtggagtagtggaaagacttcttaagaccaaaagctgcaaacttactgtgtaatcttagggccctttttttcattgggtttcgtttctttacagagagattagaaatgctaaggactcttctagctgtaacactaatttttcgcactttggttcttgatgtcatgttctaagcagtgcaattcaaagtgtggtcaaccagtctgcaaaagatatgctattggttggtgatgaaagaaggagcttgcaccagaatctaaattatttctgtcagctgattttattgttgttattgtgtccccgtaacaagatttttctaaaaatttatctttgcctgaacatccccaaaacactgtgataaagaaagtaaaaatggcattctgggtagcactactctaaggtttctccaagaagagaaattaaaaaaaaaaaaaatgccaggcacggtggctcacacctgtaatcccagcagtttgggaggccaaggtgggtggatcatgagatcaggagttcaagaccagcctggccaatatgatgaaaccccatctctactaaaaatacaaaaattagctgggtgtggtggcagctgcctataatcccagctactcaggaggctgaagcagagaattgcttgaacctgggaggcggaggttgcagtaagctgagattgcaccactacactacagcctgggcgacagagcaagactccatctcagaaaaaaaaaaaaaaaaaggacaactggtcttatcttgacaccaagaaccacacttccaaatccttgttcactcacgccaacactggcctcccgacaaattaggagatgttcaaggagaaacacgaggttgccatgctaggggcaccccatagctctgctcccttgatgtcctctgtgatccacatctgcagtgagacctccatgcccaaaccctgttcaaaatgctcttcataaactagtgcttcctgggcttcatagcattagtgtactgcatgaagtctagggacaggaagatggtgggtgatgtgaccggggcrcaggcctgtgcctccaccaccaagtgcttgaacatctgtaccctgttcctcgacatccctgtggtcattgcactcatcatgcttttcaccactagctcagtgataatcttccaagcaatttctcagaagataaaggatctccaaggccagtagtagagcccatgtactccactgctgaccctgcaccctggggctgttggtcctgcccttttgaccccacccctatatacagcagtttatattcacctgtctacaatggaattcaataaagcacatgtgttcatgggaaaaaaatacgtatatgtatatatatatatataaacatactcagtagaatatttcagtgactcacactttttaaattgaatttagaagttgctttctcactgtcagcaaatatatgttgtcaaatgataaatgtgtctgcttttattcctaaaggtctcctcagtccccagaggaaggaagcactgcagagattaagagcagaaattgaagttttaacagattcctggttaggaactgcattaaagtccttacttctcatccagtccaggtatggaaatggttcttttaggtctcatcctctcagcgacatattcttctactccagttcaggataagccattctctaaaatagggtttgggataggggtagagaggagtttaaatgatgtagggaagtatttgtgttaggtgagaagcaaggtcattttatgttaacagcacaacttctagttttaagagaatatttatatatgaaatcctttttctttctccttactttttgctcacgaaattaaaactcagtaacccataatctcttgtccataagttggacctggtgacgtcaaagaatacatggaggagatgttattacaatgtcctaggtacaggaagctccaagaaatgtatccaaacccacwaaagaaggcaagattcaaaagaaaaagggtacattaagcagattaaggagatttcaacgtgaagcttagactgggaaataaatgcaccagtctgtgtctgcaccaataccctattactccctcccgcaaagcagtaattccagatccacaacgtagtaaacagtaaagctgacaccaaggagtggatatctggtgaaggtaaaggacatataaaattaatgtgtattctagaatctatgttgctattgtgtgaagagcaaagcgaacacaaatcatatctcatttatggactgacttgcattcagatgaaagagtacagctcagagctttttgttgtttgttttctaaaatatgctatcagtgacatgggttggtggtatttatcaagtacttgtgactagaatggtcagaggggaaagaaggcaagaactaagttgttgctgtgtgtccactaagataacaaaaatgagtagaatctctgccctttaatatagaaagtaaatgaacatgaaataatgagtagtagctgaacattggctctgaacagtataataccaggtcctttaaagttaatttttaataattaaattctaaagagttggcacatacgaattcttgctcccaggttggtttagtttcaccttttcttttcccttttactcccttatagaaagaattgtgtgaatgttctgatcactaccacccagctggttccagccctggccaaggttctcctatatggactaggagaaatatttcctattgagaacatctatagtgctaccaaaattggtatggtttctatgctgtttcttgtcactggccttgcaataaaactttctactcatgatgcacctattattttctagcccctcttgttagacactttatttgtaatacctacagtcctcacaacagtcttctaatattttcagtaatgcaattgaggcttagtagttatatagcttgctcaggttctcacagctagtaagttacataagcatgctctttgataatatttgaaagaacataatatctagcttagaaatctagttttgcctcatttcaagtttctctttttcacagagagtatgtagtataatagaaaaagcactaggttaaaaatcaagcttctaaactatatacctaaaaatggtggccagacaagatgaatcatacctgtattaccaccactttgggaggctgagacgggaggatcacttgaggccaggagttcaacaccagcctgagccacatggcagacctccgtctctacaaaaaagtttttttaattagctgggtgtggtggcacgcagctgtagtcctaactacttggaaggttaaggtgggagggtcacttgagccagaagttcaatgctgcagtgagctatgtgatcttgccactgtgctataayctaggtgacagaatgagaccctatgtcttaaataaaataacaggtattgaccaaaaaattagctgggtatgatggcaggcgcctgtagtcccagctacttgggaggctgaggcaggagaatggcatgaacctgggaggcggagcttgcagtaagctgagatcgcgccactgcactccagcctgggtgacagagcgagactccgtctctaaataaataaataaaaggtattgacaaggatgtggagaaattggaacctttgtgcactgttggtaagattataaaatgatgcaactgttgatagacacggtggtgcatacctgtagtcccaggtatttgggaggctgagtcaggaggatcacttgagcccaggagtttgagttcagcctgggtaatcttctgcgtaaatatctgagagaattgggtctcaggttcttgaaatatatccaaatatccaaaagcagggtctcaaagagatacctgcacactcatgtttatagcagcattattgacaatagttcagagcttagaagcagctcaaatgtcaaatgtggatgaatggataaacaaaatgtggtatacacgtacagtgaaatattatttggccttaaaaaggaaggaaattctgtcacaggctacatcatggctgaaccttgaagacatgctaaatgaaagtgaaaataagacaatcacaaaaagacaaatactttatgattccatttatatgaggcttctaaagtaatcacatgcatagaactgaaagtagaatgataattgccagaggctggaggggaagggaaatgggaattgttcaacgggtatagagttgcggtcatgcaaaatgaaaaggttccagacatctgttaaataatagttaacatgacagaactttacacttaaaaattgttaagaggccgggtacagtggctcacacctgtaatcccagcactttgggaggctcaggtgggtggatcacaaggtcaggagatcgagactatcctggctcacacggtgaaaccccatctctactaaaaatacaaaaaattagctgggcgtggtggcactcgcctgcagtcctagctactcaggaggctgaggcaggagaatcccttgaacctgagaggcggaggttgcagtgagccgagattgcaccactgcactccagcctgggtgacagagtgagactccatctcgaaataataataattgttaagagaagccaggcacagtggctcacgcctgtaatcccagcactttgggaggccaaggcaggtggatcacttgaggtcaggagttcaagaccagcctggccacaatggtgaaactctgtctctactaaaaatacaaaattagtcgggcatggtggcgtgagcctgtaatcccacctacttgggaggctgaggcaggagaattgcttgagcctgggaggtggagttgcagtgagccgagatcgcgctactgcactccagcctgggcaacagagtgagactctgcctcaaaaaaaaaaaaaaaaatgttaagagagtaaattttatgctacttttttttgagttggagtttcgctcttgttgctcaggctggagtgcaatggtgcgatcttggcttaccgcaacttctgcctcccaggttcaagcgattctcttgcctcagcgtcccaagtagctgagattacaggcatgcaccaccatgcccagctaattttatatttttagtagagacggggtttcactatgttggtcaggttggtcttgaactcctgacctcaggtgatccatctgcctcagcttcccaaagtgctgggattacaggcatgagccaccgcacctcgccaaaattttttgttttaaagattagtgaatttcatgttatgcatattttaccagcttttttttttaaaggaaaaagaaaataaacatcaaggacaaggatttaagtcctggcctccctactactagctctcaccttaggcagattatcttctttcctgagcctcagttttctcaagtaaaatgagatcttagaagtgagtacaggccaagtgtagtggctcacacctgtaatctcagcactttgggaggccaagacgggctgattacttgtggccaggagttcaagaccagcctagtcaacatgatgaaaccccctctctactaaaaatacaaaaactagctgggcttggtggcaggcgcctgtaatcacagttactcgggaggctgaggcaggagcatcgcttgaacctgggaggtggaggttgcggtaagccgagatggcgccactgcactccagcctgggtgacagagcgagactccacctcaacaacaaaaaaagaagtgagtagagatagagaagaatagaggtctaagaactacgccctggggtcctctaatgtttggatcatgaggaagaaccagcaaaatgtgtcaggaagattgacctgtgaggcaggaggagaatgagaagaatggtgtcttgaaagaatgaaggaagagtgatcaactccttctaatgttgttgatgggtcaaatgagacccaagggccaggtacagtggttcacacctgtaatcccagcactttgagaggctgaggcagaaggattgcttgagcccgggggttcaagaccagcctgggctacatagttgtttttgtttttgttttttttgttttttaattagctgggagtggtggtgcatgtctgtagtcccggctacttgggaggctgaggtgggacaatcgcttgagcccaggtggtcaaaactgcagtgagccgtgattatgccactgtactccagtctgggcaacacagtgagaccctgtctcaaaaaaagacttgagaattgaattgaagattgtttttagatacatgaagatcattaatagctttgacatgcagtttgaataggggagtgatcgggattaaaccctaattggaagtagtttaagagagaattgaaattttatagaactggtctaacaatatttttattaggcctgttctaatatttttactaacttattagtaaatgagagagaatggaaggagagttggagaagggaactatacaactctttagaggaggtttgtttggagaggaacagaaaaatgaagtagtggctctagagttatatggacttcagaggatttataagattcataagagaaattatatctattttatatgcagatggaaacgatccactaratgaggaaaaataataacggtgcttattgtgtgmtaggcaacgccaaggcactaggaatacagcagtgacaaaagtcctctgtcctcatggaacttaccttcgatcagtggtgctaagataactggattatccatataggaaaaaaggcagaattgttttccttctttatgttatatgcaaaaataaattacaggtagattaaaaacttaccgcaaaaggtaagttttttaatttttaggagaaaatatagaagagtatctgtgtgatcttaaggtgaggatgggcctcttttaagaatcaaaagatagtataaaaagcaaaaaaaaaaaatcattgattgcatggaacttttaattttacatacagttaaatataacaaagtgacaagctgggcacatgcctttaattccagcactttgggaggccaaggcatcacttgaggccaggagttcaggaccatcgtgggtaacatagtgaggccccatctctacaaaaataaaaataaaaattagccgggtgtggtggtgagtgcctgtaatcccagctactcaagaggctaaggcgggaggatcacttgagcccaagagttcaaggaggctgcagtgagctgtgactgtgccactgcactgcactttagcctgggcaacagaaggagaccttgtctcttgaaaaaaggtaacaagacaagcccacattttgggataaggtatttacaacacatttaattggcagttagaatacagaatctatgaagaactgccaggcttaatggctcatgcctgtaatcccagcactttgggaggccgaggtgggtggatcacctgaggtcaggagtttgagagcagcctgaccaacatggtgaaaccctgtctctactaaaaatacaaaattagctgggcgtggtggcacacgcctgtaatcctagctactggggagactgaggcaggagaatcgcttgagtgggggaggcagaggttgcagtaagccaagattgcgccattgcactccagcctgggcaacgagcgaaactccatctcaaaagaaaaagaatgcagaatctataaagaattcctgcaaatcagtaagcaagagacaattttgaatatagaaaaataggcaaaaaccttgaaacaaccagtttgccgaagaggaaaacaaaactgtcagtaaatatatgaataagtccttaacctcacaaattaaggaactgcaaatcaagaaaatgcaaatttaaatgtggtacattctccaaccatcagatagacaaaaacttaaatctaacaatgtaatgggaactctgcctctgcaagtgggattgaaaatggatataacctgctttggagaacgttaatgtctaatgaagtttgaggtgtacataaccctatgatcatgcaattccacttttaagatatatatatactttagagcaggggtctgcaaattacagtccatgggctaaatcctaccctctggctgtttgtgtaagtttttattgaaaccrtgcccacttatttatatagctgctttcacactacagtagcagagctgaatagttgcaacagggaccatagggcctgcaaagcctaaaatatatactatatactctctgactctttacagaaaaagtttgctaacctctacctttgagtaattcttacatgtacaaggagacatgtacaaggatttttttgatgcacacttgcttatcatagaaaataattggtctgtaaacctgtccatgaacagaaaattgatagatatattcaaacaacagaatgctatattgcagttaaaagtggattaagtaaaattacatatactcataaggattaatattaaaaacaataggccaagcgcggtggctcacgcctgtaatcccagcactttgggaggccagggtgggtggatcacctgcctggccaacatggtgaaaccccatctctgcaaaaaatacaaaaattagctgggcatggtggtgtgcgcctgtaatcccagctcctcgggggcctgagaatagcttgaacccaggaggcggagattatagtgagccaagattgcaccactgcactccagcctggacaacagagcaagactctgtctcaaaaaaaaagaaaaactgatgaacaaaaaacattgcagacagataaatgtacagtatgtaatatctatataaagatttaaaatatttacattttaggagtacttgaaaagttttgttctgtaatgtcttgatttttttttttttttaatctagagcaactataagggtcaggtggagtggctcacgcctgtcatcccagggctttgggtggctgaggtgggagaatcacttgagaccaggagtttgagatcagcctggacaacatagtcagaccccatctctacaaaaaaaatttttttaattagccaggtgtggccaggagccgtggctcatgcctgtaatcctagcactttgggaggccgaggcaggtggattgcctgagctcaggagttcaagaccaccctgggcatcacggtgaaacccagtctctactaaaattagctgggcatggtggcgggcacctgtagtcctggctacttrggaggctgaggcacgagaattgcttgcgcctgggaggcggaggttgcagtgagccaagatcacgccactgcactccagtctgggcaacagagaaagactctgtctcaaaaaaaaaaaaaaaaaaattagccaggtgtgatggcttgtacctacaatcctaggtactctggaggctaaggtgggaggagcacttcagcccacaagtttgaggctgcagtgagctatgattgtgccactgtacttcagcctggatggcatagcaagactttgtctcataaataagtaaataaatacagcaactgtgaagtgttaagattttacaaagcttcgttggtggtaggcatttttttcttttttttttttttttgagacagggtctcaccaggctagagttcagtgatcacgactcactacagcctcgacctccctggctcaagcaaccctcccacctcagcttttcgagtagcttgggattatagatgcacaccgccatgcctaacttttcctattttttgtagaaatggggtctcactttgttgtcaaggctggtaattctccatgcttttttgtatggttgaattatttcatttacaagggattgggtggaagggaacatatatgaaagcgctcccttcagatattgttcctgctgccggttgctttatgtatatcataggaacccagagcactcactgagcctcccacatctgaaagacagattttctgtagtgcttattatactgagacctggcacccgcaggctcatcaggctaatggaaatgatctcattccctctgtcagtaagtgtgcttatttggtatttttcctcagtctcagttcatccagagctaatttgcaaagctgcagtgggatctggtgctatggtaaccacagtaggaggcttgaggcttttcttcacagaactgtgaaatgggagcaaggagaagaaatactttttcacttcctctgaaatgatagcaaaatatggttctcttaatggccattctgtgatttggggacattaaagagaattctcaaaataatttctgaaaatgtcagaagttttttttgttttggggggttttcttgagacagggtctcactctggtacctaggctggagtgcagtggcacgatcatagcccattgcaaccttaaccttcccacgctcaagcgatccacccacatcagcctcctgagtagccaggacttcaggcgtgttccaccaccatacccagctaattttttaattttttgtagggaaaaggtcccactgtgttgcccaagctaatctcaaactcttgtgctcaagtaatcctcctgccttaggcctcccaaagtgctgggattgcagacttgagccaccgctcctggctagaaatattttaatagagaaaacccagggactaatattctccaaagatttggctgatcttacagttcaccagcttcaattgcttgacatatggtaaactgattaatcattggcctcatcctcctgaacaggaaagctcatatccagaaatggaagtattttaccaactgtattggagtgagtcctgttttcatggagctgcttctttactttgagctgttaataactctcttggcctcttaatccttttaaaggagacattacagagtatatttcatccttgatcattgcatgccaggacagtgaaaatgtctgtgttcttatcctcaaaatatgagttactgcctttgttgagtcttacaagaaagtcaaactgactcacttaaaaaagttttttgctacagacagatcatagtagactgtgcatctggtggaggttggcttagtttgtaaagctgtaatgggtgaaatggaattaaagaactcttcaacaccatgaacataataagaatttattattagttgaatggtttaatgtttgaactgaattgaggcataagacctggactacagtcctccactgaatcatttgtgagattaatatgaatttactcagcaaacattgattgaatccctcatatgaatgtaaggcatgacaattctattgtaaaatattagcactaaaagagacccaagtgcacctaagccaagccttgtattgtaagtggccagctgagcccagagtgatctagtgtctggtccagttgactagtccgtctgttttgaagtgccactgggttaaggatgtcaaagatttgcagttacatatctgcacaacttctgtgccaagtaggacttctgcgtatggaagtataagttctggccaattatgttacagttatcttagatttgtatatttatatattacagtgattttccagcagatggcagtcaaatgtcttgaggaagaggcagctttatcttatttacacaggaaccctggtgctaagtcactctrttgggcaaggggaaagaacaagaaggttaatagagcaggatgaagaagaaagccaaagttaggaccttgtttaactgaagaaggtggcagaagcagggagataaaaagagcaagggatataacttctttttatttatacaaataaagtatctttcccacagcagtatgatctgtgtatgttttaggtgttggttgcagatgggatttgagttttgatacactgccatgtttctcaaaactgtctgcagttctgagaaatggatttaaatcacccatttcccaaggtcaatttcagtgatgcagtatcttggttacaactacaaggtatagtaagtaaggaggttccagatatgacaaatgttgctgccatatttattggtcactgttctcagttctattctggggctgttctctcactgaaagacgtaaggcctatacccaggactgtttctgggaaatgaagaattggagggaaatggctttttgtttgttattgtttctaacaagaaatcagggccttgtgttttcacttctcttttctaccctaaaacatttcaccccaaaaatcattcattcattatgacacaatgaccagagcctagatttggagtcaggggccccaagttctagctacttgcttgtttgtgatctaggggcaagtcactaaacctattaatctttcccatttatagaaattccctcacactaagatcttagggacttcaccctcaacgtgaaggttaaaataagtttttgggttgtttgtttgtttgttttgagacagagttcgctcttgttgcccaggctggagtgcgatggcatgatctcggctcactgcaacctccgcctcccgggttcaagcgattctcctgcctcagcctccccagtagctgggattacaggcacgcgccgccatgcccagctaattttgttttttagtagagacggggtttctccatgttggtcaggctggtctcaaattcccgacctcaggtgattcgcccgcctcggtctcccaaagtgctgggattacaggcttgagccaccatgcccggccaagttattttaatggcacaacttcacattctttgggcagagggtctactggatctctagctcccatccctactccccagcaagcaaactacatgggctgtcacttagtccacctaagcacaggcaggtgaacctagcagcagccctcttctttggttttgaaaagaagagaagagtattctaacaggaaatttctttttctcatcaggtaaggagagctgctttgagagaattgtgtcaaggtttggaaagaaagtcacatatgtagtgattggagatggacgagatgaagaaattgcagccaaacaggtaaccatggtaaagaaaaatagtctatgtggttgtacatcgagtaatgagaaaaatgggaaaaactacaaaatcttagcaatctattatgcatttataatattttctctttcttcctctcccatttttctttaaagaaaaagagggtcttttttttctccagatggagtttttcctcttaagtttttagatccatcccttcctcttcctccctgtcactcaagaatcttaaaatctttaagcccttctacagggatcccatcattaaacctgagatgtgccccatcttccatcttcaaagacagtgccttctcaagcatcagacttgactgcaaaaaggctaatcattctttcttttccatgcttcaagttctcagacagtacaaccaatagctgtttctgtagagaaagtctttcctgcctttgagccctggaaagattgttctgatgttaaccccaccactatacaggtcccaacttcaggtcaccccttctttttttcttttttttttttttttctgtttttgagatagagtctcactctatctcccaggctggaatgcagtggcacagtcttggctcactgcaacctccgcctcctgggttcaagcaattttccttcctcagcctcccaagtggctgggactacaggcacccgccaccatgcccaactaatttttgtatttttagtagagacggggtttcccgtattggccaggctggtctcgaactcctgaccttgtgatccgcctgcctcggcctcccaaagtgctgggattacaggtttgagccaccacgcctggcccaggtcaccccttcttaatataggaaacaatagatgaaagagtcttggctatagaacttaaaatcccatctgtgtctcagctatgtgaatttgaacaattatcctctttgagtatcctcatctgctaaatggatctgtagaagttctttccctccctatcccaatttattttcttccagcaactctatttcttagacatggaggcattgggttgccagctagaaccaactgccctgatactcttcatccagttaagtggaaaccttagcaactataataaactatgagattggtaatcagttggcattattatctcatgttttcatttgtcactttatgtagcaattcagggatccttattttttcacatatgttatgaagctttgattctaaagtgcttcttgttgccctctttgggaaagacactagtgggtgtaggcatcaatgtttcctggtctgaagaagggtatgggggagagaacaactcatcagcagagttggtaactctgagctaatgtctttaatcatctacaacagaatacatccattgaggctgggcacggtggctcatgcctataatcctagcacttggggaggctgaggcaggcaaatcacctgaggtcaggagttcgagactagcctggccaacatggtgaaatcccgtctctactaaaaatataaaaattagccgggcatggtggtgcactcctgtaatcccagctactcgggaggctgaggcacaagaattgcttgaaccctgaaggcggaggttgcagtgagccgagatcgtgccactgcactccagcctgggcaacagaacaagaccctgtctcaaaaaaaacaaacaaagtatataccaattggaaaatgccttagcactttatccagttcaacctatactctgtgaaggatattttctgcagcctttctgacagaagtctctctagtccttgcttgaatatgcccaaggatgaggacactggttcccagtagcctattccaccgtgggatcaaccaagctgttagggtgttcccccttccactgagcaaaaatttctctaccttcacatactagtctggcattcttttttttgttttgttttgtttttgagatggagtctcactccatcgcccaggctggagtgcagtggcatgatcttggctcactgcagcctccgcctcctgggttcaagcgattctcgtacctcagcctcccaagtagctgggactacaggtgcacaccaccactcccagctaatttttgtacttttagtagagacagggttttgccattttggccaggctggtctcaaactcctgacttcaggtgatccacccacctcagactcccaaagtgctgggattgcaggcatgagccactgcacctggcctctagtctggcattcttgaacataacaagtcggtttcctcttctgtatgttaatagccttttaaatattatgtgtgagcagctgtcttgaaaaacaactagggtatatgccaaaataactgtgttctaggacctcaatattctgagtaacttggaaccagtttcaactagatgataggaaagttaatctcctcagcttcatagaacatggtttccaatacttggatttatcaaagccctcctttaaaatatggcctccacatgagaatcacctaaacctgggagtggaggttgcagtgagctgagatagcaccactgcaccccagcctgggcaaaagagtgagactctgtctcaaaaaatataaaaaattaatttaatttaatttaaaaatatcggccgggcacggtggctcacgcctgtaatcccaacactttgggaggccaagacgggcgatcatgaggtcaggagatcaagaccatcctggctaacacggtgaaaccccatctctactaaaaatgtaaaaaattagccgggtgtgatggcaggcacctgtagtcccagctactcgggaggctgaggcaggagaatggcgtgaacccgggaggcggagcttgcagtgagctgagatcgtgccactgcactccagcctgggcgacagagtgagactctgtctcaaaaaaaaaaaaaaaatatggcctccaggcacagtggctcatgcctgtaatccctagcactttgggaggccaaggtgggaggattgcttgagcccaggagttcaagaccaacctggacaatatagtgaggcttcatctctacaaaaaataaagaattagccaggcatagtgtcacatgcctttagtcccagctacttgggaggctgaggtgggaggatcacttgagctcaggaggtcaaggctgcagtgagccatgttcataccactacactccagcctgggtgacagaatgagagcctgtctcaaaataaaataaaaagtaaaatatggcctccagaacagcacacagttttctggacatgattttgactacataatataatgggattattatttcccagatctgtacattctccatcttggacatagataagatttaggtgttgcagttctgaaacttacaagaaattgaccatccatgagacagtataatcttatatcaaatactaatttttcacctgggccattttatttgatccttaagaccctgtatgataactggaatgcctgtagttccagctactcaggatgctggagtaagaggattacctgagaccaggggttcaaggccacagtaagctataatcacaccactgcactccagcctgggtgacacagcaagaccctgtcttcaaaataatagctagaacaggtaatctctcaaaagcacaaagtaccactgaaacctatttaaaatttctcacatttctaaagtgtgcaatgtacaaggtccttatrcatatgattatttgatcattataacagccctatgaggcagggatagatagggttaccatgtaccttggggagaggtgtgttgaggaaagagtatgggcaaatatttatataagctctcagaagaagttggattaaccagctattcccactctcttccagcacaacatgcctttctggaggatcacaaaccatggagacctagtatcccttcaccaggctttagagcttgattttctctaagaactggaatgaggagccttccccttgagctccttttcactcctgaagggagctggagactggaaccaactgagaactttctctgtctgtctctctctgtgtctctgtctctatctctctctctttctctctttctctctctccctctctccctccctcccttcctctctccctccctctctgcctctctctctctctctctctctgtctttatccatggaatgctggcgagaacacaatcagaaccaacagctgcaatttttgctaagagtgagctgcagccccgtgttcatctccatacagaagcagggacagttggatagagagaacaatggactcactgcagctacagtgcttttaatttttctgtgttttgtttttgtttttttgttttcaaaaaatgaaaaagaaaaggaaattcctggggcagagttgcactcttagtccatgaccagattgagaattactgataacttgtggtgatcagataaatgcagcagacttttatgataacatctcttgcagtcttagagtctccttagcttagaatctcacttatttccagcgaatgtgtatgttatttttataggtaagggtctgatctttgacgcaggtttcccccactttctttttctagcaagaaggggtgtttaaagtcttgaaaatagtaattgaaatatctaaaatacctccctgtggcagtagcacctctatagctgctccagtggtctgctctctaggatgatacctttcctgttcttctatctcctagctggtgaactgtggggcactggacactgagtaacttaaactttggcatttcccatctagaagccttagtcttctttccagtcccttttccctttagtcaaatggcacaaccctaaaaactccttcagcttgactgtcattcagactgtatcacaggaggcttagcttccaaactggagagaaggaactaaagtgtcttatgaatttcagcttcttggctcttgagaccgaaaggttctacctattccccctgcagagaagcacccatttcccatcagatgctcgtccctgcagcttcttccttcttggtcatcataatgctaggttcttacccctttcctgccctctgcacctcatgtccacctccaggcagctctggccagtccccgggtattagacccaagaattcaaatcaaatctaaaaacatgcttataactacattttggccaaaactgccaatgtatttgacttcctttgtggaagccctaagccatatgaaggatgtcccaggtatgtatttacccagatctctgcctgaaactgaagagcagattgctgtatttaaattttcccatggaaaaccctgcttctcaaatcccattctaaagtaggaaaccagaaagactttgctgattgtggggggaagggagaaacagacaggttttcacattgttgccaaggctggtcttgaacacctggcctcaagcgatcctcccacctcggcctctcaaagtgttgggattgtaggcatgagccactgcacccagccagactttcctgatttaaatgagagtactgcatcattccctacttcatggcccaaaacttaatcctgggccaaatgcaggagcatctctcgacctctgggcagattggtgggtgcccaggcactagtcacagccttccagcccagccatgattgttggatgccccatccctccaagagcaatttgggcatctactcaggcaggataaaattccctagagctgaggaagttcagcctctcccaggctacacagagagagatgatacaagcacctcagattgagatgcaggattggtccgcagaaggaggcattgttgaccaaccccagctataattgcttgtcaccagagattctgcatacccatttccagagatgttgcagcacaaagaggcaagactccttccaatgccaggccacccagatagcaagagagagaggctggtatacacattccttcagaactcattgaaaagcgctcataactcgtgattttaaggagtaagtttttgctgagtagctgaagtcagtgctcctttacttagctgcctctttggccttgtttcctgtggggttgggaggagggagatgtagtgtgaggtaggccttcccttggtctgtattcagcatagttgcctagatgctgctctgccttgtttgatggttgatcttaggaagctctaggttttactctgaggcctcaaaccctccccctatgcagtatagctgttgggtttttgtcctggacaaaggccacggctgttgtgctgcgcttcaggtttgtgaggctgcggagtggtacccccaccatgcacgcaagcacacacacacagatacttccctctccacccttttgggagctctttattttagaatgtaacttgaactcacttttatcattggcctttttcctcttactctgacttcctagcttagctctttccaaaaggaacttgaacttggccaagagaggtaaggaggctgagcagagcagtctttgctcattcctggttgttgccaccctcatttaaatggaagagagaaaacaggagcttcttggctgtttgccaaaatgaattgtccagggaacacagtgctctctgtaattaccctgcctttttctccaccccaacacaaaaatctggaaaggaaaataagtgggtaggattaagagctgttagaagctgaggaccaaaggacactgtgggtccattcatcaagggggagaccctcttcattagagtcctcatgaaattagccaaatgatgagtccttccctagctgggcatggtgggttctcttttttttttttttttttttttttttgttgttgttgagatggagtctcgctctgtcacccaggctggagtacagtggcatgatctcggctcactgcaacctccgcctcccaggttcaagcgattctcctacctcagcctcctgattagctgagattacaggcgcccaccaccacgcctggctaatttttgtatttttagtagagatggggtttcaccatgttgaccaggctgttctcaaactcctgacctcaggtgatctgctcaccttggcctcccaaagtgctgggattacaggcatgagccaccatgcctggccaggcactgtgggttctacaggatgggtctgtaatgtcacggtgagggctctctctagtagtagatctggagtgaggtgtgtcttgggttgaggaggtggcttgactttcgaatgtaaaactgactgtgccttagcatcaccctgtccagtgcccctggggcagctggtagtgtccagaagaatggacacctgctccagatttagatgcccatctgggcttttgtttgatttgcggcgttcctgtcttctgtaaagctagtgagttgtcccaagagactgatgccacagcttgttcgcagtttacacaaactcagctttaaaattccaaatagaatctgacttgcaaactctagctgcagcatgtggagcttctagatgtttactaccttgaatggttgtcagtgtcactgaaccacaggggagaggagtatggggtagagcaatggtctgggccaaggaatggtgagcttagggtcttcctctgactccttactcctcaaggaggcagttagggtccctcttaagcaggcttctatttcttaccactaaattggtttcctttttcatccagaagttagaactccccagatattcacactataggatctgaattccgagattctaaaatatcttaaaccacaagagagaaaatctagttctgcctcagccccagtcagcaggccatctgtcccttcctctcctctgagtcagacagctctggcaagcaaggctccttggctagttcctaatgcactgacaggagccctcccattaaggacgacttctactcaaaatgcgactctccctctgaacttcagatgcctctgttagcaggaaaaggcattgattggattggatatatttatgtgactgcgggcatttgtggctgtagaatccgtgaccgtaatgttatatgtaatgggaactatcttataaacttgaaaaaaataaagtttttattttctatagtttgctcctgtgtcttttctgaataggatcagcacagttgcccagctgtgtggggtcctaattatggcttcataaaaattctaagagttcattagaaagatgtcaccctttcagtaactgggtcatttcaccaaaaaagtaagaacaaaccatttggtataaatatacatgggaaaatattttaaaataatttgtatgggagaatgtattgtttctaaaatatattgcttttaaagtttagaactggagtgagaaaagatttcattcacttccaaatatgctgaaatttattaaggagagaaatcagtaccttgctgcactgcacttaaaccacaaaagcgataaaactgacaaactgataccaaacctcatttgatttgccctgatttcctgtcacatcaactactttttctcatttcatttctctgatttgggtctggctgtatccctctggtctggaaaacagtcacaaagcctttctgccttttagtccaatgaaggaaatcagaattgggttctagcttccaagtaccatacatgtcagactataagatgtatttttccaaaaattccccagaaaagaggaagttgcctattctagttattaaatgttttcctcattaggtgcacattagttgaagcaaacgcgttagctgctatatccctactcagttataaatacaaatattagaggcattgatttcaagcacagagtagataaacatctccatctcttcctgcaatttcaggtgtgtgtgtatgtttacatgtattcaattagaagaatggtctttgttctaagattggtacatccttttatgagatgatgaaaataaatggtggtagttttttgttttgttttgttttgttttgtttgaggcggrgttttgcttttgttgcccaggctggagtgcaatggcacgatcttggctcaccgcaacctccgcctcccgggttcaagcaattctcctgcctcagccgcccaagtagctgggattacaggcatgtgccaccacgcctggctaattttgtatttttagtagagatggggtttctccatgttggtcaggctggtcgcgatctcccgacctcaggtgatccacccgccttggcctcccaaagtactgggattacaggcgtgggccaccatgcccagccaaatggtggtagtttttaatgcccttttttgttaaaattaagttgcaaccatgttggccattttataggtacatgatattcaaaagcctgaaaatcactagacaggatgatctgcaggatcctttctgcctctaaccattgcttgtatgtaaaagtcaccagcatcatctcagatcctctccctgcccccacccttcatctctgggtcatctttagttccaggccaacagagtggttacaagtgcttattcatccggtggaattctgtttgcatcattccttccaccacagtggttcaagctaccagtgactccaggttctgctccttctcgtgacatttataggccacacccaagtcactgctaaccagcttaccggttttgcaggaaggccttccccagccattctatacaaagttgtaattcccacccccaacacacaaatacttactctctctccctatccctttccctttttcttttagcacttcttaacactatctgatatactaaatgttttacttatcctggtttttgtgtctccaccagaatagtaacagagctgagactatcctggatcccatcacagcagtgactagaacattttcttctctatctcaattgacttttctgtcccgtttctccaaaccatggacctcctagaacagcaaaaggttccacttccccagcaccatcacccaccacatccacatcccctgaggcacctcatcacttaacctctcagagctcccagcaaaaagacctttcttcaccaggcaactatattcacttcttggccctaaatgtgtctgtggccactcctgctgggcccagcagcagagctggtgttgaagaggatgcactaagtcagcccagatctggattctgatctccagctgagctgtctaccccacgctggctcaccagctcctgaaacttcaaacacgaggttgagaaaccccacctaagccagccctctctctgttcgtggaccttgactgattttgagaggtagattttatgtccctgatctcttccagttcaggctctgaactccataggggatttcgtttgatgacacagactaggttggaggatttcatgaggctttattcataacctaataatactgttgaaaacaacacatctgtcacttgtagagacccacaggcacacacattctc

SEQ ID NO: 93395 - DNA, 12511 bp, Homo sapiens
gccgggttgacctagttcagcccgcataaggaggcttaaagctgtgcctaggaccccagctcaggcaccgaacaacaggtataatgttcccatatctttgtgaattagttgagaacaatcagcggttggtgaatataggtggggggcgggggggcgtaaaatggctgagtaaggcattagactgtaaatctaaagacagaggctaaacctctttttaccagccctgaggtgattatcatgttgaattgcaaattcaaaggagcaacttcaatcctgcgggggcttctcccacctttttctccccgcggcggagaagtagattgaagccacttgattagggtatttagctgttaactaaatttttgtgggtttaagtcccgttaatctagtaagggtttagcttaattaaagtggctgatttgcgttcagttgatgcagagtagggttttgcagtccttaggtattgcagaaattaagtattatttacttactgagggctttgaaggctctttgtcttgtttaacctaagtttctaggagatagataaagtggggagattggtaggaggaaggtggcgaggatggttagtggggggaggagtagtatgggttttgtgttttcaaattgtcactttatttttacattgttgtacatggggaatagtgtaattgaagcagagtagattaggcgtatgtaaaagtataggttaaggaggttataatagctatagcagtaggaatggtaaggttattattttttgtaaactcttcatgataattcatttgggtagaaagccagttaatgggggagggcctcctagtgatagtagaatagatgggatcatgggtgttagtcaggttaatttgtttcagatgcgagatagtaatagcgctgtagtgcttgagtttaggttgagtactaggaatgcggtagttgttagagtaatatatatggccaggttaaaaatggtaatatttgggttgtatattagcactgccattattcagcctgtatgagtgattgaggagtatgctaggattttacgtagttgtgtttcattaagtgcacctcagctgcctgccatgatagataaaattgaaagggtaaggagaatatttatgtttactaatcaggagatttgatatataattgaagtaggggctagtttttgtcatgtgaggagtaggccaacacacagagggtggtagagtggaagtttataaaagacttgggcccgtccatgggaccaattatctctataatttctaaaacatgaggaacataggctgctgttgtttatagcaccattaatcaagtgtccttttacttgcatctggagagactctaacataggtctgaacactgctactttgtgccgtcagatactgtgttacagagacagtgaagaatttaagatgcagaagcagattgcctttaaaaacttatgtgagcatctcaacccactccttacactccagcttcctcaattacaaaatggaaataattatagtaaataatttgtttttatttttattatcagcatcatattcctacctttatttttattgtaattattcctttgtggctaaattttaaatattcctttcttgccctgatgtttcatctacatatttctaatcaccttcacattatacgtaacagattgctgttacattgtctttaaacattttatatgcaagttaaatatggagacagttttaaatcagcagattatggatgtctgtttgaaggcacacaagtgaaaaatttccacgaaaagtcttgattggagaatctagagattgtttagtaagtgatgggatcctgaaaactagctataaagcccaaagagaaatgactgctgaataaagatgtagtttccccaaatagtaagaattaaacatcaaaggccacaacattgctatgaataattatattgactatgcagaattacactgaactaattaaagtaccttgagccttgacgttttcatttttgtgacaagaaatgctcgtccccttatctatgttcactaattagtggtaaaatttgctggtaagaaaaatgtcatgcaatcagttctgtctgtgaagtatttctctttgatatggttttcttctgaacatttttacgtaacatcttttttatcataaaatttaaatggttaaaataaaattgttatttccaccctaaaataacaataatttaaaaatctgactccttgtcatctacccattcagtctcgattgcttagagtcatttagtttttctcttcttcatgcaccctatcagaatcgttctcagaacttttctttttcctttcaatctctgaataaccttctttaatttctactactaccacactcagatctatattacttaattcttaaatttaccacaaaaacctctacctgcttttccttattctaagctctgtactctccaattaagattatccttcctagtgtgacttcctctccttgaaagtcagttgaaactttcagtcccagagttaatctatcacaattatagaatactttaaatagcaaacatataccaccatatctaccctgacagatgacctcaacctaacatctttctgcttgaattatataacaaaacagggttgtcagcctctgcaccacagctgatcctcaggagacccagtctcagtttcggcccttctcactgcagttgcagaatctattccacctgtgaagtgacctgctgagaaacaagcacccatctgaaccaatgagatgtgctggggctgaacagcctctatgtaacagcagatcctgagggggacagtctcagctctagcccttctttctgcagttgggaaacctctctgcccctgcaaggaactactagaaggcacatccatgtaggccatctgggcacactcactagctttcatcccacagcacatcttggtggtccagtcctggctcagggtactctctctgcagtcccaactgtgcagagtaatcctgggagacactccagtttgggccctgggacaggcttacaggcaagggtcctggccagcctaggtaccctccttgttcttccccaggtgataaaacccagatggaagaaccatgccaatctcggagccctagcaagattcacaatacacatgggcttagagcaccctccagtgctgagacagctgcagtgtccgtgggctcatggaacataacagtctgcttagaacctctggaagacccaccgaagaaggtcagacacaaacaaagccagaatatgaatattaaaatatggaatccctccatgtggagaacatattgcatgtccataagcataaagaactttcagagaaatgtgacctcaccaaacatacagaataaggagtcagagactgaccttaaaggtatgaagatatgtgatcttgcaaacaaagaattcaaaatagctgttttaaagaagttcagtgagtatcaaggaaatacagagaaattattcaagattatcagagaaatttatcagagatattgaaataatttttttaaatttaacagaaatcctggagtgaaaaatacaatgactaaataaataatgcaataaagagcatcaacagcagaattgttcaaacaaaagaaagaatcagtgggctcaaagacaaaatatttgaaaatacacagagaagaaagaaaaaaggataaaaaagaagagaaaaagcttatgaaatctatggtgccacatcataaaagcaaatatctgtgttattggatttcaaggtggagctaagaaagacaaaagagtagaattattatttcaagaaatattagaaagctttccaaacctagagaaatgtataaatatccaggtcaggaaaatcaaaggtcagtaatcagatttaacccaaataagactaccttgagacataatcaaacgcttaaagatcaaagacaaagagagggtcccaaaatcttctgagagaaaagaggtaaaaaacatataatgtagctccaatacatctggcagctgacttctcagcagaaaacttgccagccaggaggaatcattcagaatgatgaagaaggggaaagaagcttcaaccaagaattctgtacccaacagagctatccttcagaaatgaagaaaagataaatattttcccagacaaccaaagttgaagtaattcattactactagacgtgtcatacaagaaataacgaaggaggtcttcaaactgaaagaaatgcacactaacctgttacagaaaaacatttgaaggtaaaaaattcactggcaaaactaagtatatagacaaaattagacttactttaatacttattctaatactattttagtgttatgtaagcaattatataattatatctttagtttgatgactaaaagacaaaattattaaaaatgataataacgaccctaacttattaagagataggcattataaagagatgtaaaatgtaatatccaaaattcaaaatgtggagagtcaatgcaattaaagaggacaggtgtttttgtgtgtttgtgtgtgtgtctgtgtgtgtgtgtgtgtgttggttattcctagccttacaattaaagttaaattgttatcaatttatagtaacttgttataactataagatgttttggtaaactttatggtatgcacaaagcaaaaaaataacaaatacactaaaattaaaaaacagcaatcaaaacacactattagaaaaaaccatttaaccagaaaggatgacagacagggggaaaaaaaacaatctacagaacaactagaaaataagaaaaaacaaaaccagcaggattaagtccttacccataacaattatttgaatataaatgaattaaattctataattaaggaacatagaatggctgaatggattaaaaaaataagacccagttacatgcttcctataagaaggtcacttcacctagacacacataaattgcatgaatgtgataagatattatgtgtaaactgaaaccaaaaaaggggaagagtagctatatttatatcctataaaacagactttaagtcaaaagtagtacaaaagacagagaatgtcattatgtaatgataagcatatataataattttaagtaaacatgcataaaacactgaagcacctaaacatataaagcaaatattaataacctacacagagataaacctcaatacagtaatagtagcagactttaacatcccactttcagcaatggatgtatcatcctgacagaaaatcaacaaagaatccccagagttaaactctaccctagaccaaatgaacctaacagacatttacagaacattccatctaacatctgcagaatatacattcttcttacagaagataaaacagtctccaggatagaccatatgttagatcacagaacaagtttcaatgaatttttaaaatgcaaaattaaattaaaatttttttctgatcacaatggaataaaactacaaatccagaaactgtacaaatacactgaaagtaaacaacatgctcccaaacaaccaatgtctcaaaattttaacatttcttgagacaaactgaagtggaaacacagcataccaaaatctatgggattacagcaaaagcatctctaaaggaaagttcataacagtgaactcttacatcaaaaagcaagaagaggccaggtgcggtggctcaggcctgtaatcccagcattctgagaggccaaggtgggaggatcacttgaggtcaggagtttgagtccagggtggcaacatcatgaaacaccgtctctactaaaaatacaaaaattaccttggcatggtggtgggtgcctgtaatcccagctatttgggaggctgaggcaggagaatcgcttgaacctgggaggcagagtttgcagtgagtcgagatcaggcctctggattccaacctgggtgacagagcgagactccatctcaaaaataaaaaataaaaataaaaaagtaaaagagctcaaacaaacaaactaatattgtacttcaagagtggtgtgcgtctaactgagttgctgaagcaaggmcagtattctcccatggctattgaagaacaagtggctgttatctatgtgggtgtaaggaggtatcttgataaattggagcccagcaaggttacaaagtttgagaatgctttcttgtctcgtgttgtcagccagcaccaggccctgttgggcactatcagggctgatggaaagatctcagaagaaccagatgcaaagctgaaagagattgttaacaaacttcttggctggatttgaagcttaaactcctgtggattcacatcaaataccagttcagttttgtcattgttctagcaaattagttccatttgtaaaagggttactctcatattcgttatgtacagaagtcacatgaaaagtaaaggttccataatggcaaaaaaaaaaaaactagaaaattaagatcaatgaaaccaagcccaacattagtagaggaagaatataatacatatcaaagcagaaaygaacaaaaaaaagaaaaaaatacaatagattaatgaaataaataattcattttctaaaagaaaaaagaaaactttagctggaagctagactaagaaaaaaagagagactactcgagtattaaaatcagagataaaaaaataagacatttcaactaataccacagaaatataaaggattataagagactattatgaacaaatatacaccaacaaattggaaaattcagaagaactgaacaaatcactgaacacatccaacctcccaagaccaaattataatgaaatagaaaaccttaacagactaatgatgaataattgtattgaatcagtaatagaaaatctcccatcaagtaaaaaaaaaaaaaacacaggacataatgacttcactgctaaattctaccaaacctgtatagaataactaataccaattatactcaacctcttcaaaaaaattgaagaagaaggaatacttctaaactcattctacaaggtcactattaccttaataccaaaaccagacaaagacatagtaaaaaaggcgaaactacaagtcaatattctcgacgaacacagatgcaaaaattctcaacaaaagagtagcaaacaggatccaaaagcacacaaaaaagattattcattatgttcaagtgggattaatcccagggatgcgaggatagttcaaaatatgcaaaccattaaatgttacgttaacagaatgcaggacaaaaaccacatgattgtatcaataaatgcaaaaaagcctgtgataaagtccaatattccttcatcataaaattctcaacaaattaaatataaaaggaatgtccctcaacacaataaaggccttatataagaaaaacacagttagtgtcatactaaagaggcaagtggaaagcttttactctaaaatatggaataagacaagaatgcccactttgattacttttattgaacatagcactaagagtcctagccacagaattaggcaagagaaagaaataagggacatccaaatgagaaagaagaaaattaaattgttcctgtttgcaggtgacatgaccttatatatagaaaatcctatagactataccaaaaaaaagttagaactaatgaattcagtaaaattgcaggatacaaaattaacatacaaaaatcaataccatttgtacatgctgataatgaaaaagaaataagaaagcaaccctatttacaatagtggccaaaaatataaaatacctaggaattaatttaactgagaagataaaagatctctacaatgaaaactacaaaaaaatctgtgaaataaataagtagaaaaatattttgtgtcatggattgaaaaaaaataatattgttaaaatgttcttactacccaaagttatctataaattcagtggaatacctatcaaaataccaatgaaactcttaacaaaaataggaaaagttatcctaaaattcatatagaaccataaaagaccccatatacccaaagtaattttgagcaaaaagaacaaagcaggaggtaccactctacctgacttcaaaatatactaaaacactatagtatctataacagcctggtattgatgtaaaaacagactawaaatagaacaaaatgaaacaaaataaagagcccagaattaatgccatgtatatccaactggtctttgacacgagtgccaagaacgcacactggggaagaacagtttcttcaataaatggtgctgagaaaattggatatccatatgcagaagaatgaaactatctctcgccacttaaaaaaatcaactaaaatggactaaagacataaatgtaagatccaaaactgtaaaactactagaagtttttaaggtctttgccaaaaagccacttcccagaccagtgtcctaaaccgtttcatctagtagggcagcatcaataatttctaatggttttaccatcattcttcttatttctattttttcttctactagtttctacaaccactgaaatctgatttctattacaattttactgaaatcacttttgctacaatcattcacaatcttctgattattaatagccatttttaattcctttatactctgtggcctaatttgatgctgatgatttaatatcaactttttctgtatctttttctactattctggtcacttgattttattctcctttataagctatttcttctatgctccattttacgatatgataattcctagtcttctttatacccttttgtttttaatatatcctaggaactggtgacccacaaacatgtcaatgtacaagagcattttgtatttccactcctgtgtttctgattttctattaaatatatccaagtacatgcatccaaaagctgtaacacttgatagttccaaaatgattccatcaatttttgccagcaggcatgagaaagcaaacaatattatagaaagataagatggtctatgtggcccatgatccatgactatgtgaatgttatctccacttcctcaaatgtcaatgcctgaagcctgagcctcctcctaaaactcaaactttcctcaatctctacaaatataaagtcaacaatgattaaaaattttacttctttttttgtacttttttaatttccaacttttattttaagatccaggttacatgtgcaggttgtacaggtttgttacataggtaaatgtgtgccatggtggtttgctgcacctatcaacccatcacctagatattaagcccagcatccattagcattcttccttatgccttcctttccccttacccccgacaggccccagtatgtgttgctccccaccatgtgtctgtatgttctcattgttcagctcccacttatgagtgagaacatgtggtgtttggttttctgttcctgtgttagtttgctgaggatgatggcttccagcttcatccatgtccctgcaaaggacatgacctcattcctttttatggttgcatagtattccatgggatatatgtacaacattttctttatccagtctattgttgatgggcatttgggttgattccatgtcttggttattgtgaatagtgctacaatgaacatacacgtgcatgtatctttaaaataaaatgatttatatttctttgggtatatacccagtaatggggttgctaggtcatatggtatttcttcttctagatctttgaggaatcaccacactgtcttccacaatggttgaactaatttacattcccaccaacagtgtaaaactcttcctttttctccgcaccctcaccagcatctgttgttttttgactttttaataatcaccactctgactggggaaaggtggtatcacattgtggttttgatttgcatttctgtaatgattagtgatgttgtactttttttcgtatgtttgttggctgcatgactgtcttctttggagtagtgtctgtacatgtcctttgctcactttttcatgggtttttttttcttgtaaatttgtttaagttcctggtagactatgtatattagactttgccagatggatagattgcaaattttttccccattctgtaagttgtctgttcactctgatgatagtttcttttgccgtgcagaagttctttaaaaatgaatcaatataagctacttaatgctacattgctgtatctctgcattcctctgaatagctaactctttgtagtttctaatactttcatcttcaggacacctcccccaccttgtttaccctagcaccttagctattattacttgtgtgctattcaaaaggcaattcttcattcgtccttacttgtaattcagctacagtgagctgtcccatacctccatttctctgctttagatttttgaaaattaaaattccaattacacacaagaaatatctatatccttcataggtagccaagatatacacatctattttttcttagtttttatttaaatggcatttcttcctacctttccattataacagatcttgaacaatgcccagggtaagggaaaagcaattatgagtaggatgaaaatattaataaactcaagattgaaaataaaacttttcaagcttccccattttttagattaaatcattttcattcaacaggtatatatttagtaactgacatttaccaagcacagtaccagagctaggaaaaataaatgcaaagtgaactgaactgcacttacacacaaataaaaaaatgtaatgtaatctgctctttttttatggtatctctttacatacagtcaaaacaggctgatattgtagagttactttcttaaattcttattttttatttttgtgggtacatggtaggtgtatatatttatgaaatacatgagatactttgatatagccatgcaatgcacaacaatcatatgagagtaaatgggctatacatcacctcaatcctttatcctttgtgttacaaacaatccaattatactcttttagtcactttaaaatgtataattaaattattattgacaatagtcaccctgccatgctatcaaaaatattagattgtattcattctttccatttttggcatgcattaaccatccccacattcttcactatgcaacccctcccagctgctggtaaccacccttctactctctatctccatgagttcaattattttaatttttagttcccataaataagtcagaacatgcaaagtttgtctttctgtgcctggcttatttcacttaacacaatgaactctagttccatccatgttgtcgcagataccagaatcgcattttttatggtactccattgtgtatgtgtacacattttctttatccatttatctgttgatggtcacaggttgcttccaaatattggctattgtgaatagtgctgcaattaacatgggactgtagatatctcttcaatatcttaatttcctttcttttgggtttatacctagcagtgggattgttgggtcatatagtagttatatttttagttttttgaggaacttccgtgttgttctgcacagtggttgtactagtttacattccccccagtagtgtatgagggttcctttttatccatatgctcgacaacatctgttattgcttttggataaaaaacattttaattgaggtgagatgatatcttattgtagttttgcttttcatgtctctgatgatcaataatgttgagcacctttttatatacctgttaactatttgtcctcctttgagatatgtctattcagatcttttgcccatttttaaatcagattattagatcgtttttctatataattgtttgggctccttatatgttccagttgttaatcccttgacagatgagtagattacaaatattttctcccattctgtgggttgtctcttcactttgttgatggttttctttgctgtgaagaagctttttaacttgatatgatcccatttgtccactttttgttttggttgtctgtgcttgtggggaattgctcaagatatttttgcacagtccaatgtcgtggagactttcttcagtgttttctttcagtgattgcatagtttgaggtcttagatttatgtttttaatccattttgatttgatttttgtatatggcaagagataggggtctagttgcattcttctacacatggatatccagtttcctcctcactatttgttgaagagactgtcctttccccaatgtatggccttggcattttgtcaaaaatgagttcactatagatgcatggatttgtttctgggttctctattctgctccatcagtttatgtgtctgtttttatgccactaccatgctgttttcattaatatagctctgtagcacaatttgaagttaggtaatgtgattcttccagtgttgctatttttgctcaaggtatgtttggctattctgggtcttttgtgtttccatacaaattttacaggttttttttctatttttgtaaagaatatcactggcattttgatagggatttcattgaatcagcagattgctttgggtagtat

SEQ ID NO: 93396 - DNA, 12577 bp, Homo sapiens
tgagagagttgggctgggctgagttccaggaaacagagtaggggctagttaggagtgggaaggctagcaggatgatgcaaattcaaatccccaggtacatcagcaaggccagagggtataaacagagccccaaaccagagccacagccagtgggcagggctctggagctggactggctgagaatgggcttaggtgcaagttgggagacactggatcatcgccaagaataagggcaaagtctggccgagcgcagtggctcacacctgtaatcctagcactttgggaggccaaggcgggcagatcatgaggacaggagttcgagaccagcctggccaatatggtgaaacctcgtctctactaaaaatacaaaaattagccgggcgtggtggcacgtgcctgtagtcctagctactcaggaggctgaggcagtagaattgcttgaacccaggaggcggaggttgcagggagccgagactgcaccactgcaccacagcctgggtgacagagcgagactccatctcaaaaaaaaaaaaaaaaaaaaaaaaaaagaataagggcagggcaaagtccactagtctctgggagagtgtgtggggcacgctgactcagtatgggaacagatacatatgggctttgcaaagggtccgcatggagaattgtaacaataatagccccaaacagaatcaagttccctgtgtccatgctcttttgcaatgtaactttgttgcttccactaccacaaggtggaatctatttcaccatcccttgaatctgagttggtcttgtgacttgctgtgaccaataggatgtggcagaagtgatgctgagcaggccgggcgtggtggctaatgcctgaaatcccagcactttgggaggcagaggtgggtggatcgcttgaggccaagagtttgagatcagcctgggcaatggtaaaacccagtctctacaaaaaaatttttttaaaatttagccaggcatggtgctatgcacctgtagtcccagctactctggaggctgaggtgggaggatcacttgagcccagggggccaaggttgcagtaagctatgatcacgccattgcactccagccttggtgacagagtgagactccatctcaaaaaaaaaaaaagtgatgctgggcagcttctgaggctgggcttctgctttcgtgcttttggagtgctttcataattacgtgaggaacctggcctgaaagaccacaggaagagagaggcccaggcaccccagccagtctagaccacctaacccagcgaagccattagcagactgttgctgtgtgaatgaaaacagcagaggaaccatctagccaacccacagaattgcaagaataataaacagctgttctaagtcactaagtttagggatggtttgttacacagcattacataactgatacatccatctacactatcagcgtaccactcaggtcaacaaagggtatctcatgttgtgcaaactcagaattgagacccaaattgtaagcattttatgtgttaataattatattctccagaaccctttcacatgttccttttatttttctgaggcagggtcttgctctgcagcccaggctggagtacactggcatgatcgtggctcactgaagccttaaccctctgggatcaagtaatccttccacctcagtctcctgagtagctgggaccacagaaacatgccaccatgcgtgggtaatttttgtttgtttgtttgttttgagatggagtctctctctttcgcccaggctggagtgcagtggcacaatcttggctcactgaaagctccgcctcccgggttcacgtctttctcctgcctcaacctcccgagtagctgggactacaggcgcccgccactgcgcctggctaattttttttttgtttgtatttttttagtagagacggggtttcactgtgttagccaggatggtctcgatctccttatctagtgatccacttgcctcggcctcccaaagtgctgggattacaggcgtgagccaccacgcccggccatgactggctaattttttaaattttttgtagagatgggattgcaccatgttgcccaggctgttctcaaattcctgggctcaagcaatccgcctgcctcggccttgaaaagtgctaggattacaggcatgagccaccacgctcagctccacaggttctatctaatttgtcatgacaacccattgagaaagaggaaaaggaaatgtggtatctctccattaaacagataagaaaactgaggctcagagagatatgtggctgtcccaagattactcagcaaatcagtaaaggtgctgttatagactgaactgtgtccccccaaaacttatatgatgaagccctagtccccagtgtgattatatttggagataggacctttaaagaggtaattaagattaaaggaggtcataagggccttaatccaacatgactggtatcataagtaaaagaagagacaggccgcgtatggtggctcacgcctgtaatcccagcaatttgggaggctaaggcgggaggattgcctgaggtcaggagtttgtgaccagactggccaacatggtgaaaccctgtctttactaaaaatacaaaaattagctgggcgtggttgtgggcgcctgtaatcccagctactcaggaggctgaggcaggagaatcacttgaacccaggaagtggaggttgcagtgagctgagatcgtgccactgcactccagcctgggcaacaagagtgaaactctgtcttaaaaaaaagaaaaaaaaagaaaaagaagagacatcagggatgcgtgtgcagaggaaaggcagcagtgagaaggcggccgtctgcaagtcaaggaaagaggcctcaggagaaaaaaacctgtgatactttgatcttagacttgcagcctccagaactatgagacaataaatttctgttgtttaagcgacccagtttgtggtattttcttatggcagaaactaatatagcaactaaactagcaaactaatatagataccgctactcaaatttagctcttatgctttcttagaaggaattttcttaaaacaatgacataccatttcttgcatatcaaattggcagagatttttaattaaaagataaacttagtgctagtaaggatacagagaaattgactttctcaatcaccaggggttggaatctaaattagtacaactttctaaaggagatttggcaatacatatagaaagtctttaaaatctacttactaacatatggtaatagcaaaatattggaaataacctatggcagactgtattttctaaagatggaagcactgatatatcccatttcccatgctcttcttataatgcgatgttagcatcctcctttgagaggtagggtcaattccctctgcttgaacctgggcaaacctttgtagttgccataaccaatagaatgtagtggaagcaaaggtgtgtggcttccaaggctgggttataaaaggcatcacagcttctgcctcagcttcctggacagcttccagaggacactcgagcagctctgtggagagatccatgtagagaggaactgaggcccccacctacagccagcaccagctttccagctgtatgagtgagtaactctagacatagattttcttgagcccagtatggtggctcatgcctgtaatcccagcactttgagaggccaaggtaggggattgcttgagcccaggagtttgaaaccagcctgagaaaaacagtgagactcctattgctacaaaaaattgaaaaattagctaggcctggtggcacacacctgtggtcccagctactcaggaggctgaggtgggaggatcgcttgagcccagttcgagactagcctgagcaacatactaagacctcatctccaaaaacagtaataataaatttttttagaaagaaagaagtagatcttctagtcccagttgagccttcagataccttcagcctcaatttgcatctgactacagccacatgaaagaccccaagtgagcactgcccagatgaatccttctcaaatttcttaccagcaaaaaactgtatgagaaaataattttttattgtttttctaagccactgaacttctggataatatgttatacagtcatatataactaatatgtaaccatcaataagggactacgtctatccaacaggggactacttaaatatattatggtaaatgcatataataaaatattatgtagtactgacttggaaaactctacaagataatttcttaagtgaaaaaatgcaaagtgcagaatagtatagaggatactgctgtcttagttcattttgtgttgctataacagaataccacagactgggtaatttataaagaaaatacatgtatttggctcatagttctggaggctgggaaatccaagagcatgatggtggcatctggtgacagcctttgtgctgcatcatcccatggcagaaagtggaagggcaagagagggcaagagcaagagagcaaaagggggccagactcactttttttctttcttttttgggacagagtctcgctttgtcacccaggctggagtgcagtggtgcgatctcagctcactgcaacctccacctcccgggttctagcaattctcctgcctcagcctcctgagtagctgggattacaggcacgtgccaccacgcccggctaattttttttttgtatttttagtagagatggggtttcgctgtgttagccaggatggtcttgatctcctgacctcgtgatccgcccacctcggcctcccaaagtgctgggattacaggcatgatccactgcgcccggccccagactcacttttataatatgcccattcttaaaataactaacccattcccacagtaattgcattatcctggctctgccctcatgacctaatcacctctcattaggcctcgcttcccaacactgttgcattggagattgagtttccaacacatgaactttggtggacacattcaaaccatagcaactaccatttgtggaaaaaaaaaaaaaaatagctaggcacagtggcttatgcctgtaatcccagcatttggggaggctgaagcaggaggatcacttgaggccaagagttcgaaatcagcctgggaaacatagcaagacctcatctctatgaaaaagacaaaaattaactggatgttgtggcatgtgtgcctgtagtcacagctgctggggaggctgaggcaggagaatcactggaccccaggagttcaaggttgcagtgagctatgataacatcactgcactccagcctgggcaacatagagagacctcgtttctaataaaaattaaaacaaaacaaaacaaacaaagcagcctgtcatagtggcacatgcctatagtcccagctacttgggagactgaggcagggggatcactgaagcccaggagtttgaattgcagtgagctacaattgcaccactgcactccagcctgggcgacagaacaagaccctgtctctgaatatatatatatataatatatatatatttatatatattttatgtatatatattatatatatatttatatatttttatgtatatatattatatatatttatatatttttatgtatatatattatatatatttatatatttttatgtatatatattatatatatttatatatattttatgtatatatattatatatatttatatatattttatgtatatatattatatatattttatatattttatgtatatatattatatatatttatatatattttatgtatatatattatatatttatatattttatatatgtatattttatatatatttatatattatatatatttatatattttatatatatacacacacatagagatatatgtacatatgcatagagataatacacatatattttgtaatgtgtatatatacaccatatatattatctattcaaaagtaaataaagttgaacattttaaaataatgctttgcggcgctgcggcagtccagatcaaaaatggcggcagttggtgtgttctcggtttctcggctgctgggtcggtcccgcccacagctggggcggcctatgtcgagtggcgcccatggagaagagggctcagctcgcatgtggaagaccctcaccttcttcgtcgcgctccccrgggtggcagtcagcatgctgaatgtgtacctgaagtcgcaccacggagagcacgagagacccgagttcatcgcctacccccatctccgcatcaggaccaagcygtttccctggggagatggtaaccatactctattccataaccctcatgtgaatccacytccaactggctacgaagatgaataaagagaatctggaccactacccgggcaccagggaccacagcactggtttggaccattactctgcacatggaccagaaaaagtatatgggaccttaagctcaccttctttacttgtatcaaatgatgactggtatactggtctcccatccctttgcttgtggcrggagatggcttaaataaataacttaaayttaaaaaaataaaataaaataatgctttgtctttaactcagaagtttcgcttctacgaatttatccttagtaaatgatcatggcaaagatttagcttaaaggatgttatcacagcttcatttgatattgtgaaaaaggtaaaacaacccaattattcaacaataggaaatttgttgaatagcttatgccattctcgtactcggccaccgtctttaatggcctcttagaaaacgatcccatgccctgggaagtgatcatgatatactaattgataagaagttatgacatggcaccgtgtaatcttatctttcaagtcaattgaattatataagtgtagattgagatgtagattaaaacacagggagagatgaagatagatacagaaaccaaaatgttaacactgatctctgggaggtccaattactgttgattttgttttcttctctttcacctgtgtttttcaacaataaatgtgctactttgtaaaaacacaaatgctacaaatttgtctcctttttttgtgaaggattcctagatgattctataaatagcagctccagatacagaatttgaaactttgtttttaaagagaacagagttttcaaagtcaaagattaccagacatacatcgttggttagagagagctgccaggcctgttctaagaagtcctatcatgttggtgacaacactgaccccctcccagtccagctggccagtggtggccatgtccagaggggacatcctgagtgcaggctgtgtccctaaactacctctaatcaaaactagtaggcatgggaggcgccagaatttgcataggatgatcttgggaccagtatacaatctgcacttccaaagccagcccactgtttgtacttacatcatagcttaaaaagtgggctggggccagctgggtgcagtggctcacacctgtcatctcagcactttggaaggctgaggcaggaggatcacttgagggtaggaggattacttgaggttaggaattcgagatcagcctgggcaatatagtgagaccccctctctaaaacattctttttaagctagccaggtgtggtggcttgtgcctgtactctcaactactgtggaggctgaggtgggaggatggtttgagcccaggagtttgaggctgcagtgagctatgatggtgccactgcactgcagcctggacaacacagcaagaccccatctcaaaaaaaaaatcataagtgttacaagtttaattctatgtccccaaaactcctatattgaagtcctaaccccaagtacctcagaatgtgattgcatttaaagacaggatgtttaaaaaggtaattcaggtaaaataaggtcatgaggatgggccctgatccaatcagaagaggaaatgaggagagacatgtgcagaggaaagaccatgtgaagagaaagagagaagacggctcccggccaaaaagagaggcttcagaaacctgccctgatgacactgtgctcctggacttccagctttcagaactgtgagaaaataaacttctgtgtttaaaccacccagtctatgatactttgttatgaagacgtcatgtttactaaagacatttttttttttgaaacggagtctcgctcttttacccagggtggagtgcagtggcgcgatctcggctcactgcaacctccatctcccaggttcaagcaattttcctgcctcagcctcctgagtagctgggattcacttcgcttccacgtccagctaattttttgtattttagtagagacaaggtttcaccatgttgcccaggctggtttcgaactcctgagctcaggcaatccgcgcaccttggcctcccaaagtgctaggattacgggtgtgagccaccatgcctggccctgaagacactttttaatgtatacttcatataagactgagaaaatgtccattgtccaaaacaaagacattttctagtggtgcctctgaggtatagagctgatggcagttatggggactttgggcacctccagcccccaggcacctccactgcaggctgcaggtttgcaccctggccttcccagcaggcagaagcaatcccaccatcccacgagcctggagagcccgggtctcagctcctggtgggtcctcaggtccccgtgcagagctgcagcctggctctgaggctctgtctggtctcaccagtcacctctgcagggaccttttgggacctgctttcgtctgtctgacactcctatcagaggggtcttcctgcctcccagaccggaccccatctctaaccctagaggttctagctcactccctcaccaccaccctgctgctcctagacccccggatgtggtttctggcctgcaggaaattcactgtctccatatccccagcctgtcttccaagtgcgctagaggcccaggcatccttattcttgaggccacatgcttccacgtgtcaaatatattcaaatgcacccacatgcatcacatataatttacataaaccataggagttaagttgcaaatgtctagttaacattttgtagtcatttagtaatttcactcttaacagtttacttccctgcttttgaagctaatgatcgtcccctccctgctgtggctcaggtgttgccatgggcgtttgccactgctcatggctggggcacctcagtcatggacctagctgtggtccatgcccagggtcccttctaaggaagtccaggcatgcactggtgtgcctgacccaggggagccctccaaaccacccaacatccaggtacaatggcccagtctccgtgcagtgctgtagggcaagaggggcggcccatttccaagccaagatggcctcctcctcctctctacacttgctccttggctagctcactcataccttcacttgcttccagcagattttccactatgcaagaaaagctaagggctaagagggtcacttgacatcgtagaatccaaaagtccttcccattacagagataagaaaactgaggccccgagaatgaagcggtgaccttcaggtgcatccttgcattttgtggaatttgaatgtggaattctgtcctgggctgaggttgagattttgcagttgctcaaggggaaccctggaagcagagtgtatctaccctcctcagaccactgagaccctcagatttgtcttcatcccaggtcagtggacttctcccaggttttgttgtcttctctcggcaacaccctgctgaagccagggggaaggcgggagatttatcctgggtgctgagtatctagggttatcagataaaatgcaggatggccagttacaattgaattttagataaataacaaataagttgtttagcatgaaggtgtcctaaatgttgctgtttatctgaaattcaaatgtaactgggcatcctgcatttttatttactaaacctggccaccctgtaagtatcccatttcgtttgggccaggcccctccccactgcagctgtgagttttcctgccacccaacagcgtgagtcacacagctgtggacctccaggcaaatgtttttgaacagaacagcatcacggtttaggggaatcccctcgctgtccccataacacatgcttcagcaaagcaaaaaccttaaaacaacatctctgggaggaaaataaagaaggcatcaagagttcccaatgactcggggaaggccccagccacggccacattagtgcagccaagatggccacgactagatggctggctcttcacctctgggagaggcacagctggctttgacaatcgtgggaaattggagaccagaccttcccagccaactcctgtcaaggtctgatactcgtccttccccacctttctgagaagaggcctacgaggaagaatgggctcatgggctatgtgagccgagcaggttacttgactgtgggatcatgattgtatctttgtcatggcatcactgtggggattataggaggaaattaatgtaaaatgcttggcccagtacctggtgcgcaataagcacttacaatcaatggtggctattgttataagaacgtcaggacatgcacttggccatcaagccagtgggtcttctgaagagggtgagcttggaattctctgggtgcccatggtttgttgcccctcagaaagctgtgggcctctaatatgggcatatcccctggactggaatctgcattaagccagtgtcatctgtcagcgctttgtttgggttagtcgtttttttgttttgttttgtttgagacagagtcttgctctgttgcccaggctggagtgcagtggtgcaatcacagctcactgcagcgtcgacttgccgggttctagcaattctcccaccacaccctagtagctgggactataggcgcacaccactacgcctggctaatttttaaatttttttttttaagagacaaggtctcactgtgttgtccaggctggtcttgaactcctgggctcaagtgatcctcccgccttggcttcttaaagtgctgggattatagacgtgagccaccatggccagccctgggttagatttttagtcactcagcagggtcctgaggaggccggactcagaagagttcagctttgaaggtggaaaaagcaagttttctacctgggatgcccccaagggtagcaggccatacttcctaagtgtgcatgttggtggggagggagggtatcaaggagtatgtccctggagaagggagaaaggagggggcgtgggaaggggcctgtggaacgcacgtgtctcatttcctctttcggaatgtccgctgtgggccccaacaaaggaacttcggttggaactggggtgaggaagcccccgaagatcaacttctcttcctttaacatttggctctgctgagggccctggggttggaacacccaccttcttagaaagaaactgaaaggccttaggagaaaccccgccacttccccttcctcggtaagaggaacttggcgttgccctgacaggaaagtcttggtggggcttctcggaagccgccaccgctgcactgctgagcaaaaccacaggtcaggggccaggccgggggccaggctagtgaggactggccattgataaagtcacaggctccatctaagcccatcggcagaactggggagctgccaacatttcctcttccagcaccgcctgccaactcctgtttgggagccaccaacccctcagctctgccaatgggtccctccccactcacaccagccctccaaccaggatcgttctgtgtctgcgttctggacccccagctatgcccaccacccagcaaagctcatccatccagctcccatcccccacagaggcactgactctcccgtggagtcctgggggacctcacgggcacgtggagctgtgctttggaataggtcacaccctgtgagctgcttcggatggccttgtagattaagaaaaatggtcttttgctgggcacgcaggaatgcttgacttaacggtgactgctatctgctgcgtccattcggagatcagaaacaggcttctctctgggactggggatgcctctcctcatccctgatatatccaagggcagctgctgtggcaagggggacagtgcacaggtacaaatcacatctcaggccagccccaaaggggccgagagatccttgggtcctaaagggtcccaaagcttatttgtataagcttatttgtactaagctttaatataaacatgtcaggatggtgtggcaccagagcccggccaccactgtggggacagggtccagcctgcacggccttgcacaagacctgtgccagggacccctgtgctccattccagctcctcctccaggctttgctgtgacgagcctctgcctccttcacccagccctctcctgcccaccctgtgagactgagccccagtccagatgggtaggggctgcctgcatgacctcactgagtatatcccccagggacccttgtccacatcacttggtggttgctctgagcaacacccagctggcctataggctcccggataacagcaacagtgg

SEQ ID NO: 93397 - DNA, 88873 bp, Homo sapiens
  misc_feature (1)...(88873): n = A,T,C or G
acacccaacatgggagcacctaactctgtaaagcaaatattaacataactgaagggaaaatagattacaataatagtagaggacttcagcactttaaacagtggacagattatccagctggaaaatcaataagaaaacaggagacttgagcaacactacagaccaaatggccctaacagatagattcagaacattccatccaatggcagcagaacacacattcttgtcgagtgcacatggaacattctccaggaaagatcatatgttagctcacaaaacaagtcttaacacatttaagaagattgaaatcatatcaagtatcgtttccaaccacaatggtataaaactagaaatcaataacaggaggaaaagtggaaattttacacatgtgtggaaattttttttttttttttttttattgatcattcttgggtgtttctcgcacagggggatttggcagggtcataggacaatagtggagggaaggtcagcagataaacaagtgaacaaaggtctctggttttcctaggcagaggaccctgcggccttccgcagtgtttgtgtccctgattacttgagattagggagtggtgatgactcttaaggagcatgctgccttcaagcatctgtttaacaaagcacatcttgcaccacccttaatccattcaaccctgagtggacacagcacatgtttcagagagcacagggttgggggtaaggtcacagatcaacaggatcccaaggcagaagaatttttcttagtacagaacaaaatgaaaagtctcccatgtctacttctttctacacagacacggcaaccatccgatttctcaaccttttccccacctttcccccgcttctattccacaaaaccgccattgtcatcatggcccgttctcaatgagctgctgggcacacctcccagacggggtggtggccgggcagaggggctcctcacttccctgtaggggcggccgggcagaggcgcccctcacctcccggacggggcggctggccgggcggggggctgaccccccacctccctcccggacggggcggctggccgggcagggggctgaaccccccacctccctcccggaaggggcggctgccgggcggagacgctcctcacttcccagacggggtggctgccgggtggagggtctcctcacttctcagacggggcggccgggcagagacgctcctcacctcccagacggggttgcagccgggcagaggcgctcctcacatcccagacggggcggcggggcagaggtgctccccacatctcagacgatgggcggccgggcagagacgctcctcacttcctagatgggatggcggccggacatgtgtggaaatttaacaacacagtcctgaacaaccaatgagtggaataagaaatcaaaagggaaataaaataatatcttgaggcaaatgaaaatggaaatgcaacataccaaacctcataggatgcagcaaaagtgattctaggtgggaggtttatagcaataaatgcctacgttaagaatgatctcaaataaacaacctaacttcacacctcaaggaactataaaatgaggaacaaattaaggccaaagttagcagaaggaaagaaagaaagatcagagcagaaataaatgaaatacagacttaagaaacaatagacaggatcaacaaaactaagagttgagtttttttgaaaaggttaacaaaacccacaaaccttaggctagactaaaataaaaaaagactcagataaataagaaaattataaatgaaagaggaaagattacaattgataccaaagaaataatagacaactatgccaacaaattggataacctagaaatgaataaattgctagaagcagacagccgaccaagactgaatcccaaaaaaaactagaaaatcggccagggcgtggtggctcacgtctgtaatcctagcactttgggaggccaaggcgggtggatcacctgaggtcaggagaccagcctggccagcatggtgaaaccccgtctctactaaaaatacaaaaattagccgggcatggtagtgcaggctgtaatcccagctactcaggaggctgaggaaggagaatcaattgaactcgggaggtggaggttgcagtgagctgagatcgtgccactgcactccagcctgcgtgacgggagcaagactccacttcaaaaaaacaaacacacaagaacaaaacaaacaaacaaaaaactagaaaatctgaacagaccaataatgagtaaggagattgaatcagtgatcaaacacctcctaacaaaaaatagcccaggatatctgatgccttcgctggtgaattctgccaaacatttaagaaagaattaatgctgattcttctccaactcttccaaaaaattcaagaggaaggaacacttccaaactcattttatgaggccagaattaccctgataccaaagccagacaaggacattacaagaaaagaaaattatgggccaatatccttgatgaacagagatgcaaaaatcctcaccaaaatattagcaaaccaaattcaacagcacgttacaaagatcatgcatcctgatcaagtggattttatccttggcggaggtgacttctttgaggtgacagcccctctgctggtgtggtctggaagagaagataggagccaggctgagcctaggctgtcagtcccaaccagtgtaagatcaccccctatctgcctgctagtccccttctgagactgggtccagctccgccaggttgtaatactcacgtgtggccaccaggggcggtgtttcctgccaaggctactcttccagggcagacagcctggaggtgaccagtgactttcatccgtggtgggctgctgccctcacctgagtatctggaagggcattcagattctggggcccaaagagagcactgcacagtcctcccaccctccgttctgtgcaagacgcacagttccctggctgcccagccagcaccagcatctcctttgaaggttactcttgctcctgcagctggatggagagtcctggtcagtgctgggagtcctggtcagtgctggaagggcaaagctcccagatgccagcgggaaatgcaaaagggcaaaatgcagggtaagaactgtggccagctggagtaggagtgacccacctaagtgtgtccagtgggttttgggccccatgtggccagcttttcaagattgaagcttggaaatctggatttttacagggagtttccagggcaacacatacaaagacacaaagcacagcatgggtcatgccagggatcccctgcccttgggcaggcacatgagagccctggaaggtttggctgactagctgaggggtctaggcggtgcttgtgggtctcagaccctggtgagcccaggcttccagcttctgccctccctcttgcttctccatccttctctccaaatccccagtgcagactggggccctacgccagggctgaggtcagctccccactgtgggcaggaagtccttctgaagccccatgtcctgtgtccccatcagacggtggcagtgcctgcggccatggacacagtgccccgagatgatttcttttcttttttcttctttttgagacagagtctagctctagtctcaggctagagtgcagtggcgcaatttcggctcactgcaacctccgcctcccgggttcgcaccattctcctgcctcagcctcccaagtagctgggactacaggcgcgcaccaccacgcctggctaatatttttttaaaattttagtagagacggggtttcaccgtgttagccaggatggtcttaatctcctgacctcatgatctacctgcctcggcctcccatagtgctgggattataggcgtgagccaccgtgcccggccccgagatgattttgaagcactcctggcacctgcctggcataggctcagccgccgggatccaccatgtttccatggattccaccgcggattccatccaccatgtttctttcactcacaaacagtgttaggccatggagtggagagggtgctccggggaatgaggatctgcattccggccctcaggagcccgagcccacaacggccccaggccacaactgccaggtgggggtcacttcagcagctcattcctgggaatgcctgtgcccagatggcttcaggcctggagcaatttccacctgcctctgtgcatcggtgtcaggcagatgggggcagccacctgcttctcaggaaggaccacccttaccctgggagggcatctcttctactttgacagaggatagaaaacattctgtcttcatgaaatcacggggatattcagtggtagttttctttttcaggttcttattgaaaaaataaaatcttggcagtgtaaattcagcccttgaaaattgttctggaaatttccctggcccatgaatcacctgggtctggcacctgttggctgtgttctccctcagttttcccatctccacgatgggtagcagttgttgctgtctcatttgagatgacacgtgtgaagcctttagcacgctgcctgactcccaggaggccctcagaggtgactggggcactgccttcctcctggtcagtggtgatgttggctcttatagtttgggttgggatgctgttgctcatgtcctctttcacagggctgcacgcagagctcggtggaggagcctcctcccccaacgcctccgcttcttcctccctggacttctgccccgtcagagggcagcctgcaggcacctctctctgtcctggaagcctggccagcaagtcggggccaagggctggtgggggcctgcagagagggccagcctgagccagaggaagagtcttggggttggctcaggtatgtccaggccatgagggcagaggaacaagtctaccacagtccccactggagcggtggcggggaggctggggagggcagtgaacctggaggcagcccctcactcctgaatgtagagtcaactgtgactttgatttgcaccacagttttcttcagagtgcactaaacatagagtcatactcattttacgagaccagcattaccctgataccaaagccagataacattacaagaaagaaaattatagaccgatatccttgatgaacatagatgcaacaatcctctcaaaatattagcaaaccagctgggcgcggtggctcacacctgtaatcctaacgctttgggaggacgaggtggggggatcacttaaggtcaggagttcgaaaccagcttggccattcatggtcaaaccccgtctctactaaaaatacaaaaaattagctgggcacggtggtgcgtgcctgtaatcccagctacttgggaggctgagggaggagaatcgcttgaaccgggaaggcggaggttgcagtgagccgagatcgtgccaccgcactccagcatgggcgacagagcaagactccgtctaaaaaaaaaaaaaattagcaaaccaaattcaacagcacattaaaaagatcatgcaccgtgatcaagtagattttatccctggtggggtgacttctttgaggtggcagcccctctgttggtgtgatctagagcaggactgaaggaaatttactcagggaaatttacaaggcttctgtgaaactgacatggcagggcttccagcctcctgttccaagatgggaaaactaagtctcagcaaagggagaggtgataagaccagcccgagatcgtacaggaccctgtcttggcctccttgtccggagcctggcctctccagagctgtgactactagtccctggggggagacagcctttccacctctcccagaccggagctgggtgctaacaggccctgccggatgaaaatcctacgatactaacagacagctaacaggccgggaccggcccccagccaccaccccttgtccaaagtgcaggttcattgtgctgccctcttggcttgtaacagttttgcaacagttgcaacttgtctttgagtgcagggacaggagaagtgtgggctacccggccactgccctggagctgtggtgactgctgcgtttttctcccatgcacttgcacgtccaggactcctgggagaacttgggccacactccttccttgccctcttgagctcattcgtcaccctgttgggtgagcacagccctagctcaggccactgggcaagccacaccatccaaagaggaggtcctctgccccaggacccccacaccaccccaggtaagcctcaaactggcggggccagctttccactgggcagccaggggcctaagccagtgggccctttgcctttgaggcagggactgagaatggtgtcagcacgtggtcaggcccagagcccaggccccctcctctaagaggtcctcctggattccctgctggaaggaagccagccttgtggtgtcgtgtctctccctggatctgtctgcttcgtggaccctgagcccctcgagggcaggggctgggtcttagatgtcactataggtttcccagcagtgctttgtacacattgggcattcagtaaatgtagaggatagacaagctggcaacaagacagtcggacatcctcggtgtgaataagaacacaatgatttgattggtattaattacagcagtttactatacgatcgcttccggtattggcagctggcatcattacaatattaacagactgccattgaaatgccccgtctttgatccagcgcgaggaggagatgtgactttccatcagcacctgttctgattctttgggcatccagaggtgtattctttctgggtttcctccacacccctcctctgggtgtctacttctgtctgggaaggggtaacttgccccagcccagagtcaggctgcagcatccggtctgcctcctccaccagcttgctgtgtggccccctccctgggcactgctgtccccaacagtcaatggaggctggaatccctgccctgggggctacgtgctgtgcagtagccagtggcttgggggcatctccccaaacaccagaggggtctgggagctcgggaaagcaggacgcagacagaccaggagaccctgtccctgggaagctgacccaggccttctcactcgcctctgaaggcagtgagcatcctgtccctgggggtgagcaaactggggcatgtgctgagatgacctcaccaaaggagcctccctgcagtggacgggcccctggcccaagctgctgctgaccccacctttcctgcccaccctgcctgtgcatagctccttctgggcgcggggagctcgggcggctccagcaggcaggtggtgcctgggtctactgcagcaaccctgaggcgcctgtttcagagacgaggaaatgagggttggagcggaagggtgactgccaggtcgcctacgggtaatggggcatggggttcacaaccctgctctgccgccctcagagggagctgcccacagggctggcctagaagccccaactaagctggcctagaagccgcagtggtgggcggtacgctccgcccagatcctgggcggagacatggggctggcagcgagggtsgggggcgggggaggcctggagttccggccaggccactgcttgggaagcaagaaggtgaaggcacctctgctgggccaagcactcttagggccgaggggcactgcagctgacaagaggtacttggaggtacacccccagggagggacgaggctggggcctcccctatgtgggcggggctgggcctggtcagatctggctgggatctccctctgcctctggctgcagggaccatccagctgcatgagcaggaccagggttcaccatatgggcagctgcctccccgccccctgccgctcctccccacaagtctgcctaccctcaccaggcgaaggtgccaggcgctctcctcgcttgacccccaccaccccctgagcctgggaggaggagggcgttcctgggtcctctgctttgcagtgaggttaagttgttgctcgaggccccagtcctgtgacaaaacccccacccatctgtctgatcccaagcccagggctgtcctcagccctcactcctgggaagctgactcaggtacgagacagagttggagggggcaagagagtgggttaatgtggaggcagctgtttccagggaggtggcaggcaggaggggctctgggctgtccccgctggggccgctgccagcccccagtctgacagtcagaagagccctgactgaccaggcaggtggtgaaggggcacgtggcagcctccggcgccagcagctgtcgctttttgggcacagtcggaaggaggagggaggcttttgcccacagctgaccaggtgtgctgtgccatgcggcaccgtggtgggtggtgggtggtggggtgggggtgttcagccttggagggccttcctcggtgccactcaagctggctttcccctggtggggcaccacttttgggggctcctggaagactgtggaccttcaaggactgaaggtatgtacagacacatgcaggaggcatgcctccttgtccggggccacctctgcaggcaggagccaggcgggctgacacactgagggctgagaggctgaggacaagctccaacacctcctcactcccctacgccgctgcaatcagactccctgctccctcccttgggatggggcactggggcaggagatggggggcagccctgaccagcctgagagctgggatccccctcacatcccccactgtgcctaggacagggttctgggcttcgtcagggcttgggcagtgcccacagttcaggtgggacagagtgtggcagtgggtcctgagtccccctgggatggtcagaagagggggcaggagagagtccctggcactgccacatggaggccctatgaccctggtcacctcagggagcctctccgtgtgtcagactcccccgctgtgaagtagagacattatcatgtgtctataggtgttcaatgagagtgaacgaacgtgcatagctatggtccactcttgaaaaaggatgctgactttcttagataattatatcagtcattcatactgacgtaggtggcacagcacttcacatcttggatcacagccacatccctttcacttttcctgcagatcccagaaaagggcagtggaggtccacactgggcaggacaccaccccacccttccattgagggctgttgtgagacctccgttcttaacttcttagtttaaagaatttaggctgggcacagtggctcatgcctgtaatcccagcactttgggaggccgaggcaggcggatcacctgaggtcaggagttcgagaccagcctggccaacatggtgaaaccctgtctctactaaagatacaaaaattagccaggcatggtggcatgcacctataatcccagctactcgagaggctgaggtgggagaatcgcttgaacccaggaggcagaggttgcagtgagccaagatcatgccactgcactccagcctggaagacagagtgggactctttctcaaaacaaacaaacaaacaaacaacaacaacaacaacaaaacagaatttaaacatgagacacacagcaaaagagctgcaacatagagcaatttattgcaaaagaaaaagaacattttgaaagttaggtgcggatgcaccctgggagagagaggattccaggcggggggctgctcctgagtgtgaggcagcattgatgattgttggagaaaccccctttcagggagtcttccacaattattcataagtgggtggaaagagaggaagaggttactaggcagcatgtgatggctggtcctctgggtgcacatgcggtagctgtacatgtttgttcatacgtcacatgtctcwttcgcatctttttttttttttttttgagacggagtttcactcttgttgcccaggctggagtgcaatggcacaatctcggcttactgcagcctccacctcccgggtttaagcaagtctcctgtctcagcctccagagtagctgggattacaggcatgcaccaccacccccggctaatgttgtatttttagtagagatggggtttctccatgttggtcaggctggtctcaaactcctgacctcaggtgatccgcctgcctcggcctccccaagtgctgggattacaggcatgagccacagagcccggcctcattagcatcttaaaatctccaccgaggggtgtgtttttttactattagaatgagcaaagggtcagtttgaggacaggtaaaatcaatgtgcacatgccctctccagggraaaggccctactgcagacagctttgcttgaacgagctcagttaacacgagctcagttacagtgcaaacgtggaggctgattgtgtggattgcagtcaccacggttgctgcgtccccaggacatggtgactcctttgactgcctgtcctgcctcgcctgcacccaaggagacatccgtcttcatcrgcgccttctctcctgagaaggagggctccctcttgcattctcattgttattggatttttctggctgggcagatctgggagggtttcctgaaggaggagggagtcggggtgggtcagctgggaaggagcagaggggaggaaggcctgttaacccggcttctgagcccctactctgcaatcccaggtggccccaagggagcagagccgggacaccacatccttcatcagcttccgccttagtcccaccgagctttggggctgatgagggggcaacccctcttgtctgggtttgggaggggcctgcccaggaggaggtgctggctccaggcttgggggttgggtgccccgtctcgaggctgcctgccrataccctgcggccactgctgtrgcatccacgatgcctctccctcctcctggctctctgtctgggagcgcaagtgtctccatcmctcaacacaaccccctccctgccctgctgtgccactaccaccgccttctctgggcactcctgcctcccaggtcccatccccaccscgcaggacctggggtctgccccagcacagacctgtggggcagcagggctgcttggcccctcaggagcatcttgagctccgaaagggctctcaaggctggcgggacggcccccgcccagccccagcctctcgctgtctgtgatctgggggtgagtgtccctgagaccggagcccctcctttccagctrttggtcctctgtcctcagtcccctccccatcctccctgcccggcctcacggggcagcccactttcctcaggtctcactttggatctctgccagccacgycacccmctcttctctacctccccttgtggccccgacccccacttctacccagagcttggcgctccctgtcttttctgtgggctggcagagacctatcctcaccaaggttgcyccygggcactgacagagcctgctgcataccaggcccttaatacatacacacagaatgaatgaatgaatgartgagtgaatgaatgartgaatgagtgaatgaatgartgartgaatgaatgartgartgaatgaatgagtgaatgaatgaatgagtgaatgaatgaatgagtgaatgaatgaatgaatgagtgaatgaatgaatgccatggggaagtggcaagaggaaggccctgggaggtaacaccatagggcccttatttccctgggtactcagcacagcccccagcgtgtcccctctgcaccccacccagctctgattctctccccagctccctgtttygctgaggcctggagcccccatggcctcactgagccgagccctacgtgtggctgctgcccaccctcgccagagccctacccggkgcatggggccatgcaacctgtccagcgcagctggccccacagccgagaagagtgtgccatatcagcggaccctgaaggagggacarggcacctcggtggtggcccaaggcccaagccggcccctgcccagcacggccaacgtggtggtcattggtggaggcagcttgggctgccagaccctgtaccacctggccaagctgggcatgagtggggcggtgctgctggagcgggagcggctgacctccgggaccacctggcacacggcaggtagggaccgggggccaggtaggggcagggaaggatagsacatagcgaggggccacagcccattgctagctgggacagttcttggttcacaacaaccagcctggggaagagaccctggggaagggtgcatggccagtttgcaggtgggcggagctgggggcactgcttgccctcccagtcgctgaagagctgtggtgggaggagggagcagatgctgcttgtgtggcctggagagtgaagctggggccagagctggaaactccaggcagctgtccagagggcagaagcccctttcctggacagagccaccaggactgagggcattccagggagtggagaaggacggacggggaccattgagggtgaagcagacctgtgtcctccatgagcaccagaggcttctacagttctcattctcctaactaaccagggggcatatattaagcacctatggtgtgcatgtcccaggacagccaaccttctgccttcaccatttcagccatggrtgtcctggcaaactggatctcctgacctgcagtgttggccagttcctgtggtgtgaacactcccaccctggccaatagcaaaagccaccagtgtgaggtcactgactgtggagttgggaagaggtttatccctgggctcctgagagctgatgcgagccggctcccacaagccacygctccaactcttgctcttgccttctcactggccccctagctgggctgtcatagmctcttccctgacgtttcgccagccacacccctggcctgccacctctcacattcagctgctggagggcatcctttgttggggagagtgcagatttaagcttcmttcagtagtgggttggtgyctcggcgccccctccactcacctgctctgtgatcttggccacagaactgttggtgccacttgaacttgatctataagagaatcacgccctcctcatagggcatgacaggcttagcacggggcttggcacrcagtaggtgctccaaaaatgggggcctttgctatgtcactctctgagctgcccaagggcgggacctccctcacattcatcttggtccagttatttyctgctcaacaacctctccaggccccccaggtcctgcagagaaagaccttgcagagaaagacacccatggttgaatatcagggtatcccctgatattcgtctgggggaaggaggtgcagtccactccctggggagtgatggcacccaccctcccgggcaggcctgctgtggcagctgcggcccagtgacgtggaggtggagcttctggcccacactcggcgggtggtgagccgggagctggaggaggagacgggactacacacgggctggatccagaatgggggcctcttcatcgcgtccaaccggcagcgcctggacgagtacaagaggctcatgtcggtgtgtgctcccctgcggggggcaaggaggggggcttgggtgggtgggtgcactccctggggggtcatattggtgggtgcaccccctgtgggggggtagggtgggctccctgtgagggtggaggtacgctgggggttcatgtccgtgtgcgcatcccctgcggggggctggggtggggggctcgtgtggatgagtctgcttcctgtggggtcgggagtggggctcatgtcggtgggcacccttctgccgcgagagaaggggacacgccacagggaaggagccccggcaggtgacagatctgggttccagcccttgcgctgccccttgctggctgtgccacctggagaaagcgactttgccaggcttcattcagaattcccagacagagaatctgattggcccagcttctccctgtcccagtggtccacgcctgaggacactgattggctgttcttgggccaatcaaatgtgggggcgtggtctatctgacagtctgaaacaggatcttggcctctcttgacagctggtctgactgggaaacctctcaggcccaaagtattagacctgtggggttatttatcttatataatagacactttgtgccaggcactggtctaagttctttgtcaatgacatacactattctcacccccacttcacctgagtgagcctgaagcgactttgccccaggttggtcacacagctggcgagggtcggattggcacaggcggcctggccccggagcctgcctcagtgccctgctccttaactcttatgctgaagcggattcaaggracaggctccgggggcgtggggaccggctaaggcttctgggagaaagtgaggctggggtttgcggtggatgcccagttggggaggggagtggcccaggggtctgctccccacggactcagttaacctcccctgggtccccctagctgggcaaggcgtatggtgtggaatcccatgtgctgagcccggcagagaccaagactctgtacccgctgatgaatgtggacgacytctacgggaccctgtatgtgccgcacgacggtaccatggaccccgctggcacctgtaccaccctcgccagggcagcttctgcccgaggagcacaggtactgatggccgcctggctctgggtcccytgttcccagcccactcctcytgccttagaaccctgagagcagaagggaagagaacaagagccattctctgactgctgtgtgactttgggccagtgaggacctctctgagccttctggtccactcctgccaaggggaggctatgccttcgttctgttcacagacatcaggtcgtgccgtgggtgcacccattcctctgctgcacaagcaaatcgtatcaaaagcccttcttataatttgtatctgtgtttgtctcaactccgcacatcattgtagaacaatttttttgtttgtttgtttgagacagtatctcgctctgtcgcccaggctgtagtgcagtggcatgatcwctgctcactgcaagctctgcctcccgggttcatgccattctcctgcctcagcctcctgagtagctgggactacaggcacccgccaccactcccgtctaattttttgtatttttagtagagacagggtttcactgtgttagccaggatggtcttgatctcctgacctcgtgatccaccggcctcggcctcccaaagtcctgggattacaggcgtaaaccaccacccccggcctgtagaacaattttaagaagacaaataagcaaaaaagaagtcaagatcacccagcagtaatagtattgacattttagtatgttttactccaaatatttttctatgaaaatatatatgtatgcaaaatagaaccaagctgttgttattttgtgattttttttttttaccaagcagtagactgcaaacatctttctgttaatcaaatatcttgctttttttwwwaaaaaaaaaagtcagctactttttcacgttatgaaaagagggttccccccacaagtcaagtgaaagaacttgcccaactttcaagttctccaagtcaaggcatgggtgggtctagttttctggcgctgtggtcatcyggtttccctgacagtgtygcaggggacctgctgctggcagaaatagtgtccccagctcccctctgggaggaggggttggttggagtggggtgggaagcacccccggggagtcccgtgggattttagaagcagttcctctcaattccaggtcattgagaactgcccagtgaccggcattcgtgtgtggacggatgattttggggtrcggcgggtcgcgggtgtggagactcagcatggttccatccagacaccctgcgtggtcaactgtgcaggtgcgagtggcatttctcctgactcctgtgtggccatgctggctgctccctaaacctgctcccacctctgcagggcttctttctggggtggggagcccctgctagggcagacaggtctgcagaggcagcctgtgcacacctgagaggcagctcccaccaggtgtcagcagagctgagctgtctgtgctctgcccgcaggagtgtgggcaagtgctgtgggccggatggctggagtcaaggtcccgctggtggccatgcaccatgcctatgtcgtcaccgagcgcatcgaggggattcaggtaggtggacagccccrggttcygtgtcagtctgtggggggcacagagacctggctctraatcccagcttgaacccaggtggtgtgacccttgtgggtcccctcactgccccaagcctcagtcacctcatctgtgaaatggggattgtaacatggggtatttccgggtggtatgaggattaaactaggtagcacaggcgtatccctgttggggctgacccccttgttcctcaggacctggcctctctttgatgcccagaacacagtccagcctgtcctgcgtggtgcaggcagcctagctttttgccatgttctgtgcccaggagtttcggggaagacccgaatgtttgcatgctctcagtgtgcctggggtgcctgtctcagagggtgctggttcctggcatgaataacctccctgagagccttctgccaagggaggttgggggcctgggttcacctcctggcacctggggctgggtgcctcctgccctctcttctctcctgtcctcaactcctccctccagggatggtggctgggagcttcctgccactttgttactgacccccctctttccatccrttcatcatgcaaccctcccttactcattcctctctctgtccagccctccatctctccatccgtctctccatccatctactcccgtatctatccatgccttctcccatttattccttcatccctccacccatcccccttcccttcatccattcctccctccactctttccctccctctattcatcttgccatctcgccatccattcttccgtcctccatctctccatctatctattcatctatttatccacatgttcatctgtccatcccttctttcatatatccttccatccacccacccacctaaacttctacccatcaatccctccctccctccctctagccactcatctctccctctgcccttccttcagcatccacccacatattaatccaaccattcacattccattgaaccctctctgcatcagacattgatgggtgagcttggtgtttcaggccctattctagaagctgtggccataacacagacagacacctagttcttgctgggtagagctggggggaggtacagacaagtacatgtgcaattccagaacatgctgataagggctctgatggggtctcaggggctataggaattcccagccctagtggaccaggggaggctccctggaggaggcagctgcatctaggtgaggctcttgagggtggcatggtggacaaggagcgtgcacagagcatggccgttcagagagccagggccagaggctgtggggcagggtcagtgtgagaacagactgcccttgtttagggtcagggccagtgagagggaagcctgggcccctgagctgggagcctcgtccctgggggctgcccattgccaccctgtgccagcctggcttccctatggtcaccggggaggtaccaggcttggctgcttcgtagaccagggtagtgaagcgggtggcgaaatggggccggaacctgggtcccagtgcgctgctgcctctgactcctgtgcgctgggcaagccacgccccactggacacaagacctcttgttcatagaatgagcctctcactgcaggtggctggtgccatgtgccgggttagggactaagagtagtcacacggtgggtgtcggagctgagtgctgaggcctcctccctggctccgggtccctggggagagcctcctcccctaggtggccgccaggggtcacgctcaggtctcagtgggttctgggagggcgggcagagctgtgtcctggggcgtcagggagggtggccacagaatgtccaccgagcccaggactgtggctccatcctccatccctaattcctcccaaggcctgcctttgaggtgcctttccagggaagaagcaaggcagagttggcctaggtccctgcagctgccccytcctgtgtatgtcaagattcaagcgaagctagggggtgttacttacaaagccagtccagatcccagcgtgcctctggtaccggaggcacaggaaaagggccatcagccccagcagctctgagacctggtaggagaaaagtggagatctggggcttcgcacaaagcccctcatgttcctctgacacctggccatgtgcaggtgtctggaagttgtcccttccagaggctgcagctaggcagttggtgtgaatctgaggaaggagccaggccgctggccctgacctgcccacctgctgtggtctgacccttggatgggccacagaacaagccagggggccctctcctgggcgcatggcacctgtgcagcccatttctgtctgctcaggaagctccctgggcgtggcagcctcgtgcagcaggacgctgtcyaccctgatcagacacagccacacacattggggcctgggggctccagctggcaggtgagggctcaggtctcacgtgtggttcatctttcttcttgggtggctggagggctgtgtggccccaaggacctcccttttctgaggatctgtcccaggcctgkgtcctagagagctctgcccacagcttcctttgtggctagggctcatctcttccctctctgagctatcattaaagcaggtggctcgggcgctgttagggggtttcacagtcgtgctctggcgtacttttgcagtggcaaggagcggctgctccatccgtgggcagagctgtgggtaagagcctgggtgctgggtttaaacactgactcctccattacccaggctggccaagtctgtcaccgctctggttccctttcctgcaaaatgggtcataaccatccctactgcctcaggctgtgctgcaggaaggacagagtgatgcagctgggmgtggtgcccggcatacagcaggtgctcatgaggtggtagctgtgtgatgacaaggacaaggacagagggttgtgaagtcgtcaccagctggcgcttcggaggaagagaacacggagggcaggagcaatcaggcagggatcagatggaagaaagaggcagatggaaggcatgggctgaggtcaggaggcagggagtcagtggcaccagggccagactggggacagccagagcaggaggctgctgcctggagagaaaggccagggctccactggacgctgatgctgaactgggcactccgctgggtgctcagaggcagcaggatctgtgcaaggggcaggtaagtccagacatggatcctgctgggacaaacatcaggggcttccctggccaccaggtgtccccactgtcctgctctatggaactctggggctggctttgtttttagagtagtagtgctagcagaggtaaggatataactactactactactactactactattaytattattattattattattattattattattattattattwgagacagggtctcactctgtttcccaggctggagtgcagtggcatgatcatagctcactgcagccttgacctcctgggctcaagcgatcctcccacctccacctcccgagtagctgggactacaggcatgtgccaccactcctggctaatttttgtatttttatagagatggggttttgctatgctgcccaggctggtctcaaactgctcaagcgatcctcctgcctcagactcctaaagtcctgggattacaggtgtgagccaccttgcccggctgtgattatttttaaacagtgctcagttactaggaacttctatgtgccacctgacaacgatcccctggtgcagatattctcattccaatgaacaggactcctgggatcctggcggagagggaggragcatctgccagaatgtcccttctggtctctgcacatcccctttcctgctcccagagacaggacaggggtcgtatctccctgtgctcatctccagttctggggcaggtgacagagggattgagagaaggctgttcctcgggtacagaggagtccacacgccatgcctgcttgctttctaaacggtcttgtttggtttggcttgtttattggttaaatcagtggttcctctctgcaatattatgatgatgtaaacactgcttttttktttgtttgttttgttttgttttttttgagacagagtttcactttgttgcccacactggagtacagtggcacagtgtcagctcactgcaacctccgcctcccgggttcaagcaattctcgtgcctcagcctcccatgtagctgggattaaatgtgcycgtcaccacacccggctgatttttttttgtattttagtagagacrgagtttcaccatgttgccaaggctggtctcraactcctgagctcaggcaatccacccatctcggacttccaaagtgctaggattacaggcgtgagccaccatgcttagctgattatgtaaacattgttaatacctgagcaagtagtgtccaactttttgtgtttcttggagttattaacagtttttgtcccagctgctcagtttcttttgtaactgttatgtgtgtgtgtgtaacattatcttcrtgccccaaracccatacccgttatcaatcactccccatttcccaccctgtccccagacttaggcaatcccaaatctgatttctgcctcgatggagtttcctattctggacgtttagtataaatggaatcacatgatgtctggcttctttttacggttttgtcygtgtagtacatgtatcagtatttcattcttttttgcagctgaataatactccattgtatggatacaatgcactttatccgttcacccactggtggacatttggtgtttctcatttctggttattttgaatagtgctgctgtgaacatccatatgcatgtttttgtggggacctatgttgttatttctcttgagtttaaacaagttgagcaccccaaatccgaaaatccaaaatgctccaaaatccaacactttttgagcactaacatgatgctcaaatgaaatgctcactggagtattctggattttgatttttggtttggggatgctcaacaggtaagtataatgcaaacatccaaaatcaaaaaaaaaattaaaaatgtgaaacactgctggtcccaagcatttcagataaggaatactcagtctatacactggagtggaattactgagtcatatggtaactctatttaacatttcaacgaactgtcggactattttccaaagaagctgcaccattttacattcccaccagtgaggtatacggaggggttccagctcccctccatcctcaccaagtcttgttattttttgtctttttttatgccggtcatcctagaaggtgtgaggtggtgtctcaccgtgggtttgatttgcatctccctgatgacatgatgtggggcatctcttcatgtgcttactgactatttgtgtatcttctttggagaaatggttactcagacactttgcccatttaaaaatagggttgcttatctttttattgagttgtaggagttccttaaatattctggatacaggtcctttgttacatatatgatttatgaacattttcttccattcagtgattgaaacttctattcagtggttgtcttttccctttctttttttcccccagaatccagaagtctttacatagccttttcgcttttttatggtatggtttgtagcacaagttttaaattttaataacgtccaattcatctctttttttcctcttttgtcatttgtgctcttggtgtcatatttaagaagacatttcccaacccaagactataaagatttacttctaatattttcttctgaggcttttatagttttagctcttatacttatgcctgtaatccatctcaagttaaattttgtgcatggtgtgaggtaggggtccaactgcattcttttgcatgtggctatccagttggcccagcaacattttttacaaagtctgcttcccccaaggaattgtcttagcacccttgctgaaaatcaattgactctgaagaagaaggtttatttattttattttatttttttgagacagcgtctcgctcttttgcccaggctggagtgcagtggtgtgatctctgctcactgcaagctctgcctcctgggttcatgccattctcctgcctcagcctcccgagtagctgggactacaggtkcctgctaccacgcctggctaattttttgtattttttagtagagacagggtttcaccacgttagcaaggatggtctcgatctcctgaccttgtgatccacccgccttggcctcccaaagtgctgggattacaggcgtgagccaccatgcctggcagaagaaggtttatttctcgactctcaattctaatccattgatctgtaggtctatccttacttagtacctcactgtcttgattatgtagctttgcagtaagtttggwatcaagaagtgtgaatcctccaactttgtttttccttttcaaaattgttttgggtattcttggtcccttgcatctctgtatgaactttagggtcagctatttaatttcttcaaagaaactagctgagattctgacaggcattgtgttgaagctatggatcaatttggggtgtgttgtcagcttaacaaaaataagtctttcatttcatgaacgtgagatgtccttctatttatttaggtcttctttaatttctttcgaaagtattttctagtttttagagtacaagttttgcaattcttttgtcaaatttgttcctaagcatatttattatttttgatgatattgtaaatgaaattatttcttaacttccttttcagattattcartgctagagtatagaaatatattagttttttggctgagcccagtggctcatgcctataatcccagcactttgggaagctgaggtgggtggattgcttgaggtcaggagttcaagaccagcctggccaacatggtgaaaccctgtctctactaaaaacacaaaaattagtcaggcatggtcccagctactcggtaggctgaggcaggagaatcacttgaacccaggaggtgcaggttgcagtgagttgagatggcaccactgcactctagcctgggcgatagagcaggactctgtcagaaagaaagagagaaagagagagagagagagagagagagagagagagagcgctagtagttttttagtggtttccttaggattttgtatatacaagaccttgttatctgcaaataggaatatttttacttcttctttttcaatctgggtgccttttattacttttgctgcctaattgctgccctggctaaaacctccaatgtaatgttgggtagaaggggtaagaatggatatctttctctaattcctgatcttggggggaaatcagccatccttcttccttgaagtatcacattccatgtgggtttttgtagatacccttcagcactttgaggaagttcccttcttccaagtttgttaagtgtttgttgaggcttttaaaaaaaaaaatcattaaagatgttggattctgtcaaatgcttctcatgcatctactgggatgattacgtggtttttgtcctgtactttgttgatgtggggtattctattgattggttttcatacattataccaaacttgccttcctaggataaattccagttggccatggtgttttgttttgttttgttttgttttgtgtttttgagacagagtgagactctgttgcccrggctggagtgcagtggtgtgatcttggcttactgcaaccttcgcttcctgggttcaagcaaattctcctgcctccactcctgagtagctgggattacaggcatgtgccacgacacccagctgatttttgtatttttagtagagttggggtttcaccatgttgccaaggctggtctcgaactcctgacctcaaatgaccctcccgccttggcctcccaaagtgctgggattacaggcatgagccaccacgtccagtctrgccatggtgtatcatctctcttatatattgctggattcagtttgctattgttttgttgggggtatttgcatgtgtatatataactgtcactatttttccccagttgtgtcaagggatctgtcaaacatattgatactattgatactattttctgaatacgcacacacatcagataaaccacctaacgcccccaagtcccatttccctcccctggaggacttcctgctgccttcagatcttccgctcccttttggactgaccgctgcatggtctaagctgtcactccagggccttcttcacgcctccccgctggagccatggctttcactctttctgggtttattttcttccttttgtcacagcgtgttctctggctgtttactgcaaaggagtacgagagaagtatatgttttgtgtccatgaatgtctgaaaaagcttttattctttgcttacactcgattgatggcttgacaggatctagaattctgtgttgaaaatcatccattagacgtttgaagagtttgctccatgtcttccagcctccagcgatgcagtcccctgttgatggccctcctggccatccggtgttgtgatgtttcccacggcgtggccttggtgcaggcctctgtccagactcagggcttggtgggcactcttgggcccttccatatgaatgcgtgattttcaatyggaggactcttcttgggctgttgcttggacatttttctcgactccatttttctctgtcttctctttctggaaccgctgtaaaatggatgttgaactttcaagacggaccttctgatattcttattttttttccactcctgatttctgttttgttgtctttttcttttagcctaatcgctggatgatggccccagccttatctggcccttccattgaattttaaattttgactatcatatctcatttaaagacctctttcttcatcttagattcctttctcatagcactgtctgtcactctgatacagtttggctgtgtccccacccaaagctcaccttgaatcgtaataatccccatgtgtcaagggtggggccaggtggagataattgaatcatggggtggtttcccccatactgttctcatggtagggaataagtctcaggagatctgatggttttataaagggagttcccctgcacatgctctctctctctttcctgctgccatgtaagacatgcctttgctcctcatttgccttccaccatgattgtgaggcctccccagccatgtggaactgtgagtccattaaacctctttcctgtataaattacccagtcttggktatgtctttattagcagcgtgagaacacactaatacaccatcttcttgtattcctgatgttcttgttgtggtttgtggttatttatttatgagacagagtttcactcttgttgcccaggctggagtgcaatggtgcaatcttggctcactgcaaccttcgcctcccaggttcaagccattctcctgtctcagactcctgagtagctgggattacagctgcccaccaccacgcccggttaattttttgtatttttagtagagatggggtttcaccatgttggccaggctgattttgaactcctgacctcaggtgattcacccatgtcggcctcccaaagtgctgggattacaggtgtgagccacagtgcctggcctgtggttttgttttatttatttatttatttattttgagacggagtcttgctctgtcacccaggctggagtgcagtggcacgatctcggctcactgcaagcaccacgttctgggttcacgcattctcctgcctcagcctcccgaatagctgggactacaggcrcccgccaccacgcccagctaattttttgtatttttagtagagacgaggtttcaccatattagtcaggatggtcttgatttcctgacctcgtgatctgcctgccttggcctcccaaagcactgggattacaggtgtgagccaccgtgcctggcctgtggttttgtttttaggagagagtgagcagcagtgtgattggaggcttggaggggaggactggagagcctctcaggaagggtgggcggcaagcctttcgcttttagagagaccctggtgtcaacatctcaagccttccctgggcctctcagtgtctcacagaagagtctccaatctgctcctggggtgggggggtggggggatggcagtccactctccccacttctggagcctctcaggacccacctctccagaggaagatccttccatacatgagcaagcgcatcaccccctgaagagggacctggggtggctctgaagattcaagaggaggcaggaggggcacactggcttgccttgctcagtctccctctcctccagccccagctaagtctcacccctcctccatccactctgcgtcctccagggttggttggaatctcccatcctctrctgctgcctctgcctgttctctcatctttgtcggttatatgttttgcttccctcccttcctcccttgctctcttcctcgatccattccttcttccttcttccccttttgctgttattttatgggatttggggaaggagaggcttgaatggcagtgacccattcactgtgtgtaacttgaggccccgtgtccactctgtcctcggggtcctacaacgagaaggaccatctcgagcccgtgaccctgggtggaggtgctggcccaccacggggcatggggaaccaagtccccacccagttctgrmtgatgccaaggcctctctctctgccttccagaacatgcccaatgtccgtgatcatgatgcctcygtctacctccgcctccaaggggatgccttgtctgtgggtggctatgaggycaaccccatcttttgggaggaggtaagatgccagggccctgggataatgggagggagttggggctgcatctcagcatggagagggcctctttcaggaagtccatcctcctgaagctcctcagaggcacacctgagaagtggccggtcccctgaccccaccaagctcaaagccatcttgctcttaccctgacggtcctggcaggcagtcaaatacagacccagggcagctggagggctttgcctcaaaacatccacagagaaggtctgcgcagtgtggagtgatgacctcagaagggcatgagagcacacaagtcctacgtccttcagcaaatgacactgccctcccaaccagctgctgcagcggcatttcccctggcctgggctgtttcccgggcagcttctggggttagggcagccctgcagccctgttctatgtgtatatgcatttagtccacacatggaacgactgagtggctactttgggctaaaaactgctttaatttctggagaaagagggaaactaagataaaagtccctgactctgggtgcctatattttggtggagagacatacaataaacaaacaaatggctgggcacggtggctcacacctgtaatcccagcactttgggaggctgaggtgggcggaccacctgaggtcaggaatttgaggccagcctggccaacatggtgaaatcccaactctactaaaaatacaaaaattagccaggtgtggtggcgggcacctgtaatcccagctacttgggaggctgaggcaggagaatcacttgaacccgggagatggaggtggcagtgagccgagatcgcaccactttactccagcctgggtgacagagtgagactgttacaaacaaacaaacaaacaaatgaacaaggaatgaaattctggaagatgatcgcgcactgaataaaattagcaggttaaggatcagcctagagagactggagcagaaggatatcctttagatgggtggtcagggcagggtttttcagggaggggacatccaagcagagccctgcaccgcgacaacaaaccagcgtgccaggtctgggygaagaactgccccattgaggggtgaaggccttgagctcacacaagcttgctcttcccaaagagctgcaggaaggtcagggtggcgggcccagtggtagaggtaggcaggctggcacatgccatacagggctttggggccatcgtgagctgcagggggccagaggaggcttgtgagtagggaaggggcatggtgggatctaggggagtgggtggaggcctgggctggggtggggagggggagcagacagaccttgctgatgggttggtgggtgggggagacaaacggctgggacgtgtgggtgaccaccagccctctaatgcatctgattcagcagaggctggcctggcagccatcacaaggcaggtttggcatggggatgcatggccttcttggggacaacggagatgttcccctgccctgccttggcaggtgtcagacaagtttgccttcggcctctttgacctggactgggaggtgttcacccagcacattgaaggcgccatcaacagggtccccgtgctggakaagacaggaatcaagtccacggtctgcggccctggtgagtgacagcctcggagctggggtgggcgtccatgggtcctttggtctgaygactgttagtagtgaygccccgtgagaccagcctgtgtcacacaggggacccagggctgtycccggtccctctcgctgcttggctccagcagccctgggtactaggtgtggcctttattcccctctacgggcgagaggcctgggcttcacaagggccatcatctgccccaagcacgaggccagggcctcctcctgcctcaagggtggctggtcctggcttccccacctgggcttcttcatccctagacttgacttgtccctggaattctgtgttttcatctgtaaaatgggaatagcgggccacatcccagcaccctgtgaggctgagccaggaatggaagggctgagaccttccctgatgagaggcttatacagctgtgagtcccagttctgcctccagccccagcccccaccgctcccagagagcactgccctggccaggaccccatgctgctggcctccctcctgttcttggcggcttgcacctggaggccagctcagcgggggaaggttcttgtgtcaagattcccctaactctggccctccttgctagccccaggagaacttagctggaagaggctggagcaaaaaggtgggctcagctcccagatgccccacgtgggtcatccacagcgcagctcagccccaccccaccctactggcctggggagccyggaaggctctgccccagggggcgggtgtggggctgaggctgctggcctggggagcccggaaggctctgccccagggggcgkgtgtggggctgaggctgctggcctgggccctggcaaaggtgcactctctgggaagcaggaggggctgcagctgaccttggcaccccagtgtttataaccacgggactttgagccagacgtccctgagttgagtgtggggcagcccaggagctaccggtgaccccagagcaccagcattccttcatgagggcattcattctacattaagtggcacttcgtckgtggtggaggcaggcacgctcagggccagcgccctccttctggcaggggagacccaatgcaagtcactgatcacagcccgtgggtgggtgctctgacacgaggcatggggtgactgggtggccacagcctgaggacacagacgggcggccaggaggaggggcagcctagcccggccctggagggcgagtcagcgctgggcctgccgcggatacgtgatctgagcaggggagcaccaggtgggcacagacaatcccccacattggggttccagcagaatcacatggtgttccccactgcttcctggtagggggagctctggccccgcttcagggctgggagagaggttcaggaagacacagtgttgcccccagggaaacttcgtgtcagaagcctggtgagtccctctgtgcctttagtgaagggcactggaatgggtgccctctggagtaggtgcatctgtgagatggtgacggagcactgactcggcagggtggcctagggaccagaagccacaggggcggtgcagggcataggccaggcccagcagctgtagagagcatttgagtagaggtgggcggcacaaagcggggagcccagggacttccacgggccatgcagggagcggatgagggccctaaagacagggaagagtcccgacacagaagggctgtggccaccgaggagtccagccccctctgtcctggcacgctcagcatctgctcagccgtcagcaggggctacttgaatgaattcgactcctatgggagcctttggagtgaagtgcagccccggggagaagcagatagagccccaggggccggggcagcgtgcagggtaggagcacacagccgtgactcactgcccccaccccscagcttgcgtgggtctggcagcgagaaacacaggcccggaagaatcccaggggcacagataaccccaggcgtctctctgtctctctctatctttctcttcctctygttttaattagcctggggagccggtactccccacgaagccctattttggggaagatgtgcaggcaaggacatcttggatctggtctgtcggctggatgggagactggtggggaatcagcatttctccttgccaggcacggccaatggcctttggcctccaggaaagagcagggaagtcccaggcccccgtgacttagggagcgcctsggagggcaggcagagctctcattccaggatggtggagctcaccaaggtcagggtgggagccgcaggcctggcccctggccatgttgcctggaggtcccatgtgtcctcgggttactcaacccgcatgagtcatttgtgaaacatccaagagacccttgttccctgcagctgcccctccgctagctcttgatagcgctccccgcagattccctgtgaggttgttcagagcttctttcctgccctccctgggcctagaaatagttccagccctcccaaggtgctccctgggccatccccaaacccagcccaggttacctycccaatccccccttttttaaaggtcttgctgtgttgcccaggctgcagagcagtggtgcgattttggctccctgcagcctctacctcctgggctcaagccatcctcccttctccgcctcctgagtagctggaactacaggctcgctccaccacatccggctaattttttgatttttttgtagagatgccgtctcgctatgttgctcaggctggtcctgagctcctgggctccagacmtccgcctgccttggcctcccaaagtactgggattacaggcgtgagccactgcacccggcctcagctcactctttctgccccatcrtcacyttctctggagccttccttgtctctcacccagatggctgctccggcctctgccctctgccctgataacccaggccctccacgtagggccctgcccctctagcctgcctcctcyaccctcccctgcagtggccctgccaccttctgcccctcaaggagccctgcctctcctggccaggctcttagcccaggctccccgtggctctctgccccctcagctcctagcgtgggggccctgattgctctccagggagcgggacggcacttgctcctgatctgcatgcagaggatgaycccccagacttggagccatccccgtatcatcgttcacgaacgaagtgccctggggtccctcagaccagggccggccgcttcctcatctagagtctaacatggtgtggtgctggggtgccaacagtagcagctggcacctcagtgacgcgtggccctcagttcatcgtattttctttacgasaccrtctgttttttgcttatttaagtatttgctccctccctccgtcagctcctcgagggctgggacatgtcctgctcagcgctgcctcccagggccaagcccaggacatgaacgtctgtaggctggcgagcgcacagctctgtggaggttctgctatcccagttttatagactaggacgctaagccttgctcagagaggcgaagtgactcgcccaatgccacacagctaggaaggggtgaagcaggttttgaatccaggactgtggccacagagagccagggttcccctcccaccgtgtcctggcctctgtctgaggctcagctgtggccgccggagtgggacattggtctcctcccccgcagaagttgggagcctttgttggctcaacagacatttatcaagcacctgcacttgctgggctctgaccctgtgctgggcggggggaagtggagtgagaaaactggtcyctgccctctcaaggtccagtgggcaggagtgacaagtctctggcagggacacagcaggacgctggtgcactgggggagccgcagcatggtctccagggtcagagaagggctccttgtcggcaggacaacggccacaagacagcgggaccccaccaggcagaacccagccaggtcgccgtcagctggytctggcagcacacgtggaggggctcagagagcacgggcaggagccagcggggaggcccccatgaggaagtggcgctgagcagggcctagaggagggagggggttgggtggaggggcccctgcagaccctgcctgatcactgctctcttggaagacctcaccccaagagtatgtgcactgcaaaagggactscaggcctctctctccttctttcagaatccttcacgcccgaccacaagcccctgatgggggaggcacctgagctcygagggttcttcctgggctgtggcttcaacagcgcaggtgagtccgggcagcagccctcctggcccccaagagggaggtcctgtcattcccagagctctgggggaggcgggcgcaggagcacygtggcccccgacagtggtggggacaggagaggctggggagtccagccccttctgcttcccagagagtgcacctgtgccagggtccagtccagcagcagtccaatcaggaggcgtgcagcaccccaggtgtgagagcagagcttggagtgtctgtgctgtccgtggagatgggggcacatgtttggacatgggtgggggaccctggggggcagaccgcagccctgcrcttctcttcctgccaggaatgatgctgggtggtggctgtgggcaggagctggcccactggatcatccatgggcgcccggagaaggacatgcatggctatgacatcaggtaagtgcccattgggacctaagggcagggccygccactcaggacaggtggcgtggggtaaacagcgagggctactgagaaaggagccttgcctgaaatccaggtggcttcctggaaggggcagcagtgagggaggaaggccaccagcagaaggtgggcagtgctgagggggtggctggggggcaggtccacgcccctttacagctttgaagatctcttgtcccagggtcctgcctgagcccctggacagctctggagtcatcagtgggatggcatcaccccacctcacagatggggagactgaggcctgggggcaggagggagcggggctgagctgggaaaactgtgctgagtgtgtatgccrcggcttgcagccaggcagccccggctgtcccgttcaatcgtacactgacaaagcggccaggaatgagacccagtgcaagccacttcctcgtctctaatgcagggtgayggggaggggctgtgraggttctgggagcagggagggcatttgtactggtgaggcrcccagcatggggtctgcacatggaaacgctaagtcatccccagccgaggcatggactggggtgctggtggccagagccggtgacggcagcctatcccgatggccttctgccagtcagggycatctcttgcagagcacaggacagtggtgcaggcgctccccggcaaggggggaggctcctcctgtgtctygtcctcatggcggtggcctctccgacccacacagcagggcctgtggcycgggccactccccgtgcrttgtggggtggctgtygaggcaggacggcttggagggagcccggcctccgggtctctccagcccactctgctcccggctgctgctgctggtggacagcctccctggggaggcagtaggtgggtgggctccggagggagaaggcctggctcagctcggtgcgcccctcgcctctgctgacctagtcctttcctggcctgatgaggacattacgcccactgtggagaagaatgtctgaccccacggagacagtgasactgaggccccccagctgccacccctccatggcacccgacacagtgaagcctcctctggctgactcagagcccgtctgggcctgcgcccctgcactctcccaagcgaggaatgtcccggaaatgataaaactgtaaaggacttcaaggaagggccaaytcaggcccctcctgctgcaaacagcaaaatggaggtgacttgcctgaagtcacccggcttttgaaccagagccaggtagggacccagctccctccccaggagggacagtcytcatgccctggcctcccttggggattccagctctggaacccaccaaccagggttctgtgtggcctctctgtgcctctgtatcctcggctgcaaaatggagctgcccagcctgcccagctcctgacctggggcctagtcccgcactcagcagacaggatgtttgctcatgggctggcagaggccctgaggcgacccctggcaagttgggggcaggcctgggcctccctcggtcagctgtcttccttccatcactgggactttggcgggagtgtgccatgggctgctctggggctgggagccaagggcacaggtggggagcccctgagagctggagtacagcaggaggaggagcacccaccctggagtacagcagcaggaggagcacccaccctgttggtcccagacccctgccaagcagcctggctggtggcacccagggcacacaggctaatgccgtcctcagcccagccgtcactgaygtggggcttccaaaccccttcagtgtgccagagtggacggccgccaccagcaggaccagccaccggcccccaagggctgtagcactaatgcaatgttctgccacctcgggcctgcgcccggggactgagacaagacacagaccctgaaggagagagacagagcgaggagaggaaggaggtgcctgagaaagtcgttgaaagacccagaaaagaaagtgaacagagagcgtcggcgccagaacggagctctcccctgctcagagactcctggttgctcccctcaggccagagccagaacacgcgtgggtcgtccttcatcatacacatgggagacacgcacagcgagggggcgtccygggagaccaggcagcctgagccgtccctgggtgcggggcctgtctgggctccgggctgcgcgtgagggtcccagggctgaccgggcaccagggggcttccaggccatggcagccgccctgcgcgtgagttccttttgaaatcagataagaggctgtctctccagccccatatctgtcagctgcatggcccttggtcagtcgctcctgttctctgagcctcagtttcgccacctggaaaatgggaacaatgtaccaccctcttggagcgcactcgaggctcatgcgtgtggacgcttggcccagtacccaacagaggcagagccagagtgtgggctgggctgttttttcagggaaattccttggggaccaggtgagccagggaagagttgctctttatttaagtgaaaagggtggtctgggccggcctggtccctctgcccacttgctcacaggccgaattggcagctgggactctgtaggtcactcgctgctcctgccacccgacgtgcacctcactgctgcccccaagaatcctcccagaccttcactggctccatcaccccctccttcagctcctggtcagcatagcctggcgcaggtgtgggctgcctttgccgtggccttgccgtgtgactgtgaacacttgtgagacccttccgagcctcagtttccccctgcgtgaaagagttaatcttgggtcccatgcagaaggcagctctggggacaaagagagagggatttcctcccacagcagcactcagctctgagcctgcactggagctgggtgccataagcgacagcagctgttaatgataatatcattaataataatcctcacgtctgcacctctactccccacccatccagatcagaaaattctgcttgctagaattacgtgcagactaagaatcagccctgacaggtgtcactgaggatagaaacgcctctgatgtggctgctgaggcagccttgagtgatgagtgaggttctagcaggtggagcgtgasggggaggcggggtgctgggaaagccgggggctgacagggaggtttgtgcgtgggaggcggctgcagggccctgatgcagctgggcccgggtctcactccagccagcagttccrcactgtckgattcgggacgggtggctggtctgaggagaccagggaacaagccgcggggcactgattgctctgcccactcaggggcagcagaggcctaggccgcaggtgcagccacagagctccgtagctccatgagaaatagcatggggcccgccgggttcgtgctggacaccaccgggggctgccgtggccrcacactgtgtccccagcctcgaaggaacaaacccaaaactatygcagccacatcatctccggtcccaggcgctggattgggcagccgctccccagacacagctgggattttcccccagagactctgtacctcttgggtccctggtctgacccacagacgaggcccagctttgggatcacagacttggggaggcctgatgggacaggcggccacccttgcccccactcccctgctggcgggtggaaaggggggttccttgatgaggagggggacactggtgttctgacgcatcaccaggctaaacttcaaagacccttcacatggaccctccccagagcattctggggatctgagcccatccctcccaggggccgctccctccccagtcatgtaggggcaccccaggactccccagcactggaacctaggcagcagacagcaatgtgtggagagcgaggcyggagtcccatgtccctgtgggggatgagagcctcagctgggccctctgtccacaacgcccactcactgagggccactggggtggggtggctctgggggagaaagctgagttcacccaagggtggggcgaatggagagtcaggggcccgctcaatgctgagccacaaaggggactctggwgcaggggaccggggtccaggcttaccctgggtcctaggctagcccttccctgacgggccatccccaaagcagtgacccgtccccctgtctgcggcaggcgcttccatcactcgctcacggaccacccccgctggatccgagagcgaagccatgagtcctacgccaagaactactccgtcgtcttcccccacgatgagccgctggccgggcrcaacatgaggagagacccgctgcayraggtaacgcccctacagctcctgctggggactggcagcgagggtctgggacgtcctcagggcagcggagtgacagaaatgcaaggtgtaccccaaccgcaggtcaggtgcggtgacaaggtgtctgtcattccccaggtagtaacccggcacccccatgtgttgggcacagtgctcagggccaagaacattagggaataaagtggaaatggctccctcccacccgggggcttctgttstagtggaggagcaggaacgcacacccaggaaccgccccctgccaactgctggcagcagcgccaacagggcaggggtcctgggggcggggtcttggtgggtgtatgcagccacgtattgggrgagcagccagaacacggcgtacattggagaggggctcctgcctgtagagcctgctgcggaggctcttctgccctggtgagcttcgactcacccattcagtgaaacccactgtcaggtgcccctttctcaggtctgcccctgtgccctcccctggtcccccaaagacaaaggagctccttctctgcgctcccagccccgtctccattccttccccctctccctggccatctcgtgctggacgctttgctttctggggaacaggggctatgtcctaggcactctggttcctgagcattgaggtrctcgggggatgtttgttgaacagatggatgggcggggaggcaagagggaggctcagggagcaggtggcgtttaaactgaagaaggggcctccctcacctgagattccagtgtctggccccaagagagatcctggtattagctgtacctcctggggagaggcccagagtggtcacagggctggctcccagactgccctggccctttggcctggcttggtggaccagctatgatctcaggccacacatggccctggggtctccctagcatgcccccgggcctgtaatcagtaatcacgcccttgccagtcctgacagttcagaagcctccctgggtgaatgcagggtttgctcctctcgcagtcagctcagacgcattcctcagaactgagcagctctaccgaagaaacttggcaagggctgaagcacgcccctgccccccagggaaatcttggttcacccacgcctcgacttcccttcctagttagcagccttcttgcgacacttgacagccgcttaagtttgttctctttctttcttttataaagaggggagcctgccctcttttaatgggctcttgagatgaacagtttgcctccttagaaaggtggcccatgggatgtccccatggttcactgagaggtgggtggattttgtgccctcgattgccatcccctcagaatcccaggcaggcagggaggacatgtccatgtcattgatgaatgctgtggycttgggcgtgcctcctccttcttggggcctcgggggtggaggggagggcaagtgctgttgggacagaccctcagcgggccatctggaaccagatgctgcccccgaggccctctcagccctgcgctcggggcctcrttccagtcagagggggtggcccctgggtagggcccttccaaacccgagagtgggttttcttttttttcccaaaccaaatttatttttaaagaaacctcccactctgtttctctagtgtgttcattacattcgttgttgtgattaagtaggcagatcttaaaatgagctattttaactgctctaaagtgtacaattcagtggcattaagtgcctttgcagtgctgtgcaaccgttcccattacccagttccagaacattctcatcaccccacagggaaacaccatccccagtaaacagcccttcctcatctcctcccaccagccttggcaaccactaagctgtttcggtctctatggatttgcctgttcaggtcacttcatatgctggaatcatccaatacatgaccttttgtgtctggcttcattcctgtagcatgttttcaaggttcatcctgtgataaaatgtgtccaaatttcgttgctttttatggctgaataatattccatggtgtatgcarwccatgctttgttgatccactcatcagctgagggccacgggggttctctcccctggttagtggttgcgcatagagctcagtgaacatgcgtgaacggaatttgtttacaaccccgctctcagttctcttgtgcatacttgggagtggaattgctgggtcgtatggtgcatctttctgctagggcagccacagcaaaaggccacaagtggagaggtttcagcagaacttttttttccccacatttctggagactgggaggtccaagatcaaggtgtcagaygatgggttcctggagagggctctcctggcttgtagtcggccaccttctcactgtcctcatgcagcggggagagggccctggcgtcgcttcctcctcctataagggctccagccgtatgggattaggacccaccctgatgacctcatttaacctaaagatcccatctccaaatagagtcacgtcagggtcagggctttgacatacgaatttatgtggggatgtgattccgtccatagcagatggtaattctacagatgggggttctcagggccaaggcagatcagggcaggtggtaattctacagatgatggttatcggggccagggcagatggggcaggtgctattctgtagctgggggttctcaggatgagggcagataggggaaggtgataattctacagatggggttctcagggtgagggcagatggggcaggcggtaagtctatagatgggattcctggggcaagagcagatcagggcaggtggtaattctatagatgggggttctcagggtgagggcagatggggcaggtggtaattaattctatagatgggggttctcagggtgagggcagatggggcaggtggtaattaattctatagatgggggttctcagggtgagggcagatggggcaggtggtaattctatagatgggggttctcagggtgagggcagatggggcaggtggtaattctatagatgggggttctcagggtgagggcagatggggcaggtggtaattctacacataggggttctcagggtgaggcagtgagggtagctgcaaacactgggctggaggcctggttccaagagtcagggcctccttgctctccgcacccttgggtgtaaagtggcggatgtggctctctgccctgcgcaggggtatcaggccatgcgtgacagatgcctgttccccactcctgctcaggaactccttggacaaggctgcgtgttccaggagcggcatggctgggagcgaccgggatggtttcatccccgaggcccagctccggtgannnnnnnnnnnnnnnnnnnngtgtcagacgatgggttcctggagagggctctcctggcttgtagtcggccaccttctcactgtcctcatgcagcggggagagggccctggcgtcgcttcctcctcctataagggctccagccgtatgggattaggacccaccctgatgacctcatttaacctaaagatcccatctccaaatagagtcacgtcagggtcagggctttgacatacgaatttatgtggggatgtgattccgtccatagcagatggtaattctacagatgggggttctcagggccaaggcagatcagggcaggtggtaattctacagatgatggttatcggggccagggcagatggggcaggtgctattctrtagctgggggttctcaggatgagggcagataggggaaggtgataattctacagatgggggttctcagggtgagggcagatggggcaggcggtaagtctatagatgggattcctggggcaagagcagatcagggcaggtggtaattctatagatgggggttctcagggtgagggcagatggggcaggtggtaattctatagatgggggttctcagggtgagggcagatggggcaggtggtaattctatagatgggggttctcagggtgagggcagatggggcaggtggtaattctacacataggggttctcagggtgaggcagtgagggtagctgcaaacactgggctggaggcctggttccaagagtcagggcctccttgctctccgcacccttgggtgtaaagtggcggatgtggctctctgccctgcgcaggggtatcaggccatgcgtgacagatgcctgttccccactcctgctcaggaactccttggacaaggctgcgtgttccaggagcggcatggctgggagcgaccgggatggtttcatccccgaggcccagctccggtgagtagtgcctgctgggctgtgctgctgggaggccctgccctgacaacccccttgcccctccrygtgycccgtccttgcccctccgtgtgcccygcctccccaggtggttccactgtcgtgatcagttattctgcacacgggaagccgagccctgccgacytgcccccaaggctcagtgcattctttgtgccgttcacgcaattcccactcctcgtcctccccactacccgtccgctgtggccaggccttccatggcctaagtgggaagggctgtaggcagagcagaaggggtgtcctgcggtggggagacagcaagaagactcccccaggttgcaggaggaatggagcgtctcctaattctgtgcatctatttttggccactccgactgttggtttatgtccgtaggagggcaggcactgggcaggttgatgcacccagggtgctcagtttcccagtggaggtttcacagtggcctggactctgggcgtcctctggggactcccagggacctgggtcctcagtgagaggaacaaaggcagtcctgctgtgaaacctgggacccagaccctcgggagcaggggacgcgaggccttaaggccagctgaggggtagcatttgatccagatttacagaaatcsaaatccccttcccggggctgcgtctcaccagtcccctctggtgcacccaccttccatccccatggcaacccacagcccaggccaggctccagagctccagggcatcgggaggggagatgagagccagagctggctaacggggccacggctctggggtcagagccttgcaggtcatcgtctcttctcctgctggcccctagggacatgccgtcctcatgaaccctgcggggaggaggggtctgggcagaccctgtcttgaagtgcaacccactgtgttccagtcagatctggccctggaagcccctctcccctgtccctgggcgaggagaggagagtcaggaacacaccccaggtcccaagatgggcrgattttgcacccccacccgggagccagcctgggtgtccaggacaccttggcagggctgcagtgggtgggatgtccctgctggggaggggggtactccatgcagagatgccagcaaagcctgactcccttacaacctcacactggctcccacttgtgtgtgaagaggaggtgaggcttgggcggrcggggctggcrgccctgggaggttaagaattgcccrcacctgcattcacagctgtgccgtgtcggcagttaggagggcaggtggcggggtggggggttgtctgcaggagcagcggccagggaggggcatggggctgtggggctgtggggtgtctgatgggggcagatcccagggaggccaaggcagtggcagaaaagctggactctggagcccacgcacctgcctggcttcgtgccactgccaggtccaggacttgtctgtgcccttgggcgagatataacttctctgcgcctcactttcctcatctgtagaaaggggcacacctggtaggagtgtaagacgcttcccgcaggggctggcccagagcaggagctgggcctgggattgccgtggctccagggagcagccctggctgaggtcctgggtaaccacctctccctgtcgttccccaccttgggtgcatccagctcctcctccagcctcctgggccctggctgggctctcagacccaccaggcaaccctgcggcctcctttgtgcctctgttttgcctggacctcatgggrgccccctgcccgcgtccacaacacacgggcactcagtgcagggctctccgagggcagggccaggcctgaccccatcacagcctcagcgggaccccgctctggggagggaagcggggaggggccaaagaggcaggctgaggaccacgtcttttcttcccaggtcctcgagtacgactactacggggcttacgggagccgcgcgcacgaggactacgcctaccgcaggctgctggcagacgagtacaccttcgccttcccgccccaccacgacacggtgcgtagctggggtccaccgtgggggtccgtccttctgcctgtccctcagataagccattgcrccggccctcggctggccctgcaggggctcccctcccccaggagtctcttcgggctctgcattcacgcttttttcggctgactccattttgaggaggaatcatgcgttttcctctccccctcctccctctgtgccgagattttgccagcagccaggcctgagcggaagtggtgctgctggggatggggtgaggtgggggcggaggcaacgggctggggcccggtggggctgcaccgctctgagcctccgcctcccgctctccggagctgcgccgaggctggcatgagacgtggtgggggaagggggtcctccctcctggaagccagcgcagagtagatccaggacaagggggccgcaggctcctgggcatcaggccccgtatgggcccctccaagggacaagcagagggaaccagagccgggagggccgtggcctggagcctgcttgctgttcctctggctccaaagtgggcaggcgaggctgctcacacggggcagctggcagcccgtcgcccctgcctggggacctggctcccacgtgcagggggtggaggtgaggagtcttgggggtcttctcccccgcagcagcctgcaccacacaggggcgttctcccccgcagctgtccgggaaggagcgaggccagcgtctgccctggcctgcccagtcgtgttgtaaagtgctcacaggtggagcacagctgttgtccccgtgccaccccagggagacgcgtgacacctcactgcgaatctgacataggagcagagccaaggcctgagcccagagtctcagagcccagggacagcttaggaggcatccacgagggggttccttcctggggcctctrggccagtcgcaagtccggcttgggtagggtctgaccctgcggtcgtccgttgccttgaagggccccgcttgggttcatgctgtgctgtcagtgccttgagactcttcatggtctttgagcaaggtccccactgggtcccgcactgggttctgtagccagttctgaagggaakaaaccgttcatttccaccatctccccgaaagcttgctctagtggtggaacatctgttcaaggcgtcggaagagggggctcctgcaggaaggaggaggcgtgtgtgtcatgaagcgccgcagcagcagggccggctcagtgcccgagtcccttgtcgctgcctcccagggagtgctcggggctccgtctggcacctccgcacccacagcttctaaagcctgtgggactctggccctcgaggatgtgggagctcgggggagatgccaacttggctttgtggcttcatccggcctccgcaaacgcgcctgaagccgtcctaaagcacgaaacacgtgcttgttcttggcgctggcagcttccccggcctgctagaggagcccagcgcgggaggctgctgagggttttggttggcagccccggtggcatcagcaaaggtacagcagaaaccgacaaaggggagccctgtcctgaaggacagtratgcctggtggggctggagaagccatggagagctcaggaggcagatggtccctgtggtgtgctggtaacagcttaacaaccagctctctggggcagaggggaggaagctggctctgtagcaccggccaatttccctgatgtaaatgctttctccatggctgatttcaatccagtccgccaatgaggcatcactgaatgtggagctgggcagggatctgcctgaccagctgtcagggtcagtgcacccctgcacagcctggctggaccataactctgccactgcctggctgtgccaccatccctggcctccctgagtatgtgaggggtaatatgagttcccttgtggaaactcaaagggagtttgggaggagatgaaacagcttcccgacacacggcagctgttcaggaagctgtggttgttgctgtcatgattatttttttcctgtaacaacaatgaggtgggcacctctgctcagcagtggggggcatgttgagccctgaaggggaagaccaagtagaacatacagtgaagaatagaagattctcaaaacctcacccaggcatttgtaaacctggggaaggaaatagggagtgatgttgtttatgtgtgtgtgtgtgtgygcgtgcgtgtgtgtgtgtgtgctttgaaaacagctttattgagatctaattcgcatactatatgatttattcatttaaaaggtacaactcagtgttttttagtgagttcacgggattgtacaaccatcaccatgatctagttttagaatgttttcatctcccagcaaaagataccccacacctcaccctatccccagcccagggcaaccctactctactttctctctctgtagatatatctagtttggacgtttcacgtaagtagaatcataaaagatgtgtgcttttgtgatcagcttcttccacttagcgtgatattctcaaggcacattcatgtcgtagtgtgtgtgtcagcacttcattccttttttttttaatttttcaaatttttatttatttatttattttttgagatggggtcttgctctgttgccccaggctggagtgcaggggtgcaattcggctcactgcaacttctgcctctcaggttcaagcgattcttctgcctcagcctcccaagtagctgggattacaggcacaggccaacatgaccaactaatttttgtatttttaatagagacgggatttcaccatgttgaccaggctggtcttgaactcctgacctcaggtgatccacctgccttggcctcccaaagtgctgggattacaggcatgagccaccatgccaggccacttcattcctttttatcccaatcatattccattgtatggacccatcatattttactcatccattgatccgttggtggacattggaattgttttcacttttgagttcttatgagcagtgctgctgtgaacatccacgtaccaggtgtcgtatgcatgtatgttataatttcttatgggtatataacgaggcctgggtcaagtggtatctctgtttaacattttgggggaacgccaactgttctccaaagtaactgtaccacattacattccccaccacagtgcgagagggttccagtgtctccacatcctcgccaacacttattattatctgactttttgattctagacatcctggtggttgtgaaatggcatttcagtgtggttttgatttgcattcctggaacaactaatgatgttgagcacattttcatgggcctgttgtccacttgcatatattctgtggagagatgtctgttcagatcctttgtcccttttaaaattgggttatttgtcttattattattattattattatttgagacagggtttcgctcttgttgcccaggctggagtgcaatggtgtgatctcggctcactgcaacctccgcctcctgggttcaagcaatgctcctgcctcagcctccccagtagctgggattacaggtgcacaccaccacgcccagctaattttgtatttgtagtagagatggggtttctccatgttggctaggctggtctcaaactccagacctcaggtgatctgcctgcctcagcctcccaagtaattatcctgcctcagcctcctgagtagctgggattacaggcatgcaccaccacgcccagctaattttgtatttttagtagagatggggtttctccatgttggtcaggctggtctcgaactcctgaccycaggtgatccacccgcctcagcctcccaaagtgctgggattacaggcatgagccaccgcasccgactgtctttttattattgagttgcaaatttttttatagtttagttacaagtctcttatcagatctgtaatgtgcacacactctccccatcctgtggttgtcatctctcttccttgatggcattgtttgcagcttttaaaatgttgatgctgtccaattcatctctatgtttttgttttgttgcttgtgtttttggtgtcatgtctaagaacctaaccgaaggtaaaaaacatttatgttttcttctaagagttttatatcttcgcttttacacttaggtctaggatccatgaaaattaattttttttgcatggcgtgaggtcgggtccagccacgttcttttgcatgtggctacccagttggcccagcaccagttgttgaaaagattgctctacccttggaattgtcttggcacccttgttgaaaatcaattgactgtaaagatgagggcttatttctggactctcaattctattccgttgatctataggtctattcttatttagtacctcactgtcttgattatgtggctttgtattttaatagcaagtttggaatcaagaaatgtgaattctgcaattttgtttttccttttcaatattgttttgagtattattggcccctttgaatctccatatgaattttaggattggctagtcaatttctgcaaagaaaccagctgagaattttgatagggactgtgttaggtctgtagatcaatttggggtatcttgtcatttcaacaatagtaagtcttttgtttcatgaacatgggctgtctttccacttatttaggtcttctctcatttctttcaaaaaatctagattttaggatataagtttgggactttttaattaaatttattcctaagcattttattatcttgatgatattacaaatataattttttaaaacttccttttgagactgttcattgctaatatagaaatacaatagttttttgtgtgtttttatatattgaccttgtatcctgcaacctcgttgaactattttattagttctaacagttttttttcttttttttyttttttttttttagtggattccttargatttcmtatatacaagatactgttttggcaaatagggatgtttttatttcttcttttctgatctggatgccttttayttttcttttcctgcctaattgccctggctagagcctccagtgcaatgttgaatagagtggcaagaatggacccccctgtcttgttcctgatctttcatcatgaagtataatgtttgcaatgtgatttttataggtgtctttcatcagctgagggaagctcccttatagtcctagtttgttgtgcgtttttatcatgaacgggtgaattttgtcaaatacttttctgtatctgttggaggatcagatggtttttgtcctttgttctcttaatatgttgcattacatcaattgatttttgaatgttaaaccaacctcatattcctgggataaatcccattgatcatggtgtgtaatctctttcctatgttgttggatttgatttactagtattttgttgaggatttttttgtatctatatttgtaagaaatattggtctgtagttttcttataatatctttttctgcttttggcatcagggtaatgctggcctcctagagtgaattggcaagtatttcctattcatattttttggaagagtttgggaaaaatgggtattagttctttgactgtttggtaaaattcatcagggaagccatctggacctgggattgtggacaatttttcaattacgaattccatctcttttttgttttagttctattaagatttgtcatgtcttcattctgtttcagtaatttgtgtgtttctaggaatttgtccatttcgtgtctagtctgttggcatacacgtgttcggagttccctcagaatcccttttatttctgtggggtaggcatgatctcctgtctttcattcctgattttagcactttgagtcctctcattttctctgtcactctagctagaagtttgtccattttgttgatcttttcaaaacatcaactttttgttttgctgttttttcctatttttcgattcttatttctgttctaacatttcattccttctgcttgctttgggtttaattatgctctttttctggtgtctcaaagtggaagattgggctattgatttgagatcttctttcgtaatgcaagcacatacaagcagaaatttccctgtgagcatcgctttagctgcatctcataagtggttgtgtgttgtgctttcattttcatttaattcagtagcttctaattccctttgtgattcttttctttgatccattggttctttagcagtgtgttgtgtaatttccacatatttgtgaattttccaattgttcttctgctattgatttctaatttaattacatcgcggtcagaggacatcctttgtatgatttcaacctttttgaatttattgagccttattttgtggcttagcatattatctatcctggggagcatgtcctgtgcttgggaagcatgtgtcacagtgtgcacctgagctgagaagggcttggtgcgggctggaagagagggaggggaggctcagtacaggtgtgttggamacagcccccgttctccacgttcttgaggaagaagcacaccccaaaggcccccgtggcattcccacctgtctggaacttttcagatcaagaaggagtgcctggcctgcagaggggccgcygctgtgtttgacatgtcctacttcgggaagttctacctggtggggctggatgcaaggaaggctgccgactggctcttctcygcagatgtcagccgacccccaggtatggagcctgaggttggggggcatgttcctgtcactccawgggcacagcctcaggcactgagatgagctggcaagccaccctgtcccctcgggcaccctgagcacactgctccttgccctcacctggctttgagctccccccgtccggccccctttgccccatccsaggccccaggccctcattactttcctccacctctccctcctgccttccttctcctccctacctctgccttcctctctactcttccagaaaggatgtgtggcagctggccctcagccacgtctctcctgggactgtggggcccagtcccccccatgctctcacaggtgggattgccagaattaaatagaaacacaggatgctaagctacatttgaattttggatacataatgactcatttttaatgtaagtatgtcccaagccatatttgggacatacttgggatcttcatctgccttttcgtcacccacccacccacccacccaacagctcatgcgtccccatcttcatgagtgttctgggctgccagaacagaggatcacaaacctggtggcttaaaacaacamcaatttattgtcacggttctggaagctggaggtcaaaatgagggtgtctgtacctgacactctgcagaggacccttccttgctcttccagctgctggtggtggccgggartcttggccttcctcggcatgcagctgcgtcactgcagtctctgcctgtgtcacaaggccttctccaggtgttctcttttttgttttgttttgttttgagacggagtctcgctctgtcgctcaggctggagtgcaatggcgcgatctcagctcactgcaacctccgcctcctgggtccaagtgattctcatgcctcagcctcctgagtagctgggattacaggckcacaccaccatgcccaactattttttctatttttagtagagacggggtttcgccatattggccaggctggtctgaaactcctgacctcaggtgatcctcccacctcagcctcccaaagtgctgggattacaggtgtgagccaccgtgttagaaggacagcagtcagattagatgagggcccacactcatgacctcactttaacctgatcatatctgcaaagacctcatttccaaataagatcacactcccagtcctggtgaggactttcacatatcttttgtgggggacacaattcaacccctaacatcatctcttcagccagccaaccaacaaacccactccccagactcccaggcacctgctgctcacctcccattaatccagccacccactcagtcttgcatccacccatccaccagcccacacatccctgtttctccatacatctgttcccccttctgctcacccactcccatcctcccatccatctgcccaccttcccatctgtccatccatcctccatccacaaagtaatttatgccacagacatttatggagtcttctccggtaccaggcacggagctaggagccccagaatgaayggggggcatgaatcctgtccctagaaacttctcagcatggtggtggatgggtgggaggggccagtgccaaggcatttcaagaagaaagaagcttccttcccgcaagggtgacggtgatgggatgtcctgcccatggccagtcctctctgggtcattaagctgaaatggcatccctgggctgaggagctctccaggtcacctcccagtagggcatcctgtctgggggttatccagcctccgtgacaaggagctgcccctgtgagcggccctggggaaactgaggcagcacagacccggctggggcctcagcacagacccggcttccttctccctctcgcaggctccaccgtgtacacgtgcatgctcaaccaccrtgggggcaccgagagtgacctgactgtcagccgcctggcacccagccaccaggcctccccgctggcccccgcctttgaaggtatgggatgcctctgtgcacacggcrctgtgactgcggcctgctctgtggactggtggttgtggacagggcaggatggacgggatgggctgctgacggcagctctgtcattagctgttgtgcccgctgtggtcagagctgggagattagaggtctcgtttcaggctaaatgggggctttgttcaggcggcattgctggagctcccagtactcagtgattgcatctctgaacctgtccacgctgttgcggttcggagtggctgcagtgtgggcgtgctcggctcggtttcccggaacaaagcgtaccaatgctaggccgtgcctcccactcaaagcagtcagctcctttctgccactgacatccttgctgggttgacttctcaggcccgtgtgaccctctagtctggagcttggataggcccttagaagacgtccagttcagggcccacgctgatgcctgattgcctgctgcagtcccaccatgtctgcttgcataccctcagggacaggtagctcagtaccttcatcccttgtttgctcagccccaactgttacgcagagccaggacctgcctcttgtcccttcagctccctgatcctgtccctgggttcacacaggagccatctgatctctcgtcctgtaacccatccccaccagggatgaagaagcagagagggaaacattctctttctccaggaagaggcattgccacctctgggatgggacctgcacaggggaaggtgctgaccgtgcagctctctgtgctgtccccggggcaggggcacagtcagcggggagggctcagcccattcagaaaacctggcatctcctggttcttgacctgactccgtgctgctggcaaatgtagttgtttcctcactgggactcggtcagtgtcgagccccagcttgggcactgggggagagaggcaaggggagaaaggggctcattcatgatcagctcataacccgcaccttcggcagcagtcattgagcaccgactgtgtgtcaggctcagtttgaggcacggaggacccaacagtgagccaaacacaggaggttctggcccatgtggagtttgtatctctggtgggaggaaataggattaaaaaaataaaataagtggaaggtgtaggatgttagatgggtcaagaggaaaaatgaagaccggagggggtgggatattgggggccagggtgggaagacagcgctcctcactgcccagcgggtcttcggggctgggggctggcaggggctcctgggcctctgcggttctgccaaaagcagggagtagtgaggtgagccctgcggtctggaggctggtggcggagatgaggctgagagcgtgagtgaggggtcctatggggtgcgcagagctcgcccaccccttccctcctgccgttggcgacgtggaggctgagggagccatgggctgagccacagcgctcgtgcctcatggatccatgagctcgttccttcgctcgttccctcaacagtcatcacgtgagcctgcactgtgtggaagcaccaggtagccagggtcgggaggagktgaaggaggccggtggggcttcagggaccccacagtgggctgtatgtccagacgggggcaggaagggccccgtaacacctggagggggacatgcaaggggatgggaaagagcgaggtgttagggaaggccatgtgaagccgccgagccgggatgagcaaggcttcctggaggagagggccggcctgagcttggaaggatggggaggagccactggctacaagsgtgtagaggtgagaaccagtgtgacctgcccatcgctggtcgtctctgggtcattcagctgaaatggcatctctgagctgagaggagtgttgcctgtaaggagctaggcatcagcccccagtagaggggcggcccaggcacagcccatagccgcagacttagtgagtctagctagggagacagtagaggggccaaaatgaggacacaggtcaccaaaaatcctggccaggtcctgccactacctggctcagcgacctgcccccccgagcctcagtttcccccattggtggaatggagtgaggaagacgcgcctcccggggctgcgatggagaattgagtcagagtctgggggtgctgggagggctggggagcagcctccctgagcctcagtttccctggctggggaatgaggaccttgctcgtcccccctcataaggggaagctgtcaggaaagtgctttcaacgctgagccatctcccagtggtgcacaattagctttccagaggattctggtggattcctagagctgagggctggggatcggcggtgctggttgctgggaaggtttgcacttggtgggtgtggagttagcacagtgagtcacatcccccagggctctgcgggtcctggggacaccactcaacaggagaaaaccaccatgtgggctttgctttactttcaggcttcaaaactgcactgtttgagttatgaatatgcatgggcattaaatatgcgcgtgttgaatacgtgcgctacctacccatgctgcatcagatcaccacggagccgagagaatgtgatgatttacacaatgtgatcaaggtggcatacaaagcagctgtcaatctcaaaagtaattttaaatggtctttattgatctttttgtaagattacaaaaggatacatgctcctgggaaccattccaatgatactgaaaagcacaaaatcagctgcacagcccacagctccccccacacccactgccgatggtgcaagtccccggccaccctgccttctcactgctctctgccatgtcagctttgcaggccaggcctggacctgggctgactgacctctggcctcaggactggcgtcttgttttcagggaagttgatcatggatggtcagggccacaggaggccaggcccatcagctgccatctccctgggcaccagttggcctcagtagctcccatgccctcctgggagaggcctgggatggctgcagactgggggggccactcaggagccaggggcctgagagtggccgtgtgtgtgtgtgtgtgtgtgtgtgtgtgtgtgtgtgtgtgtgttgggggaggtgaggtagggtgtctgtctgaatagagctgaggattccatccagaaacggccccagttcaggtgtcggggaaccccttgaggactggcttgtctctttgccttcattctctgttgtgcttatggtgtcaagaggaagaagrgagggagcagcctggctggggcctgcctggggccctgagaggtctctcgtccaagggtgcttccaatagccctgtggggccagatgttgtgggtctgccccttttacagatgagaaaatgggggctcagagaggtgagaagcaaggccggtgagccgcagaactgcatctgggccaggctggcctaggcctgtgtgttcccaagacaccgtcctcccagggtaggggcatccctttgaggtgtctgcagaggggtgggtggtaggggttgagaagcaggtccttctcctaacccccatggctcagaggatactctgcaaggcgtggccctgggggacccagggagggacagatacggttcctgggcaytgtgaaggcacaggcccctgagagggcatttgttttctcagccgggagacccttgggccaccctctctgtccccacctcccaggccctgaaatcctgctctaagtccaggtgcctctcttccaggggacggttactacctggccrtgggcggggccgtggcccagcacaactggtcccacatcaccaccgtgctgcaggaccagaagtcccagtgccagctcatcgacagctccgaggacctgggtatgatcagtatccagggcccagccaggtgagagaggactgggagcccgcccctgggtgcacctgctgcctggacccaggtcctccaacaggcccttgggcagaacagcttgtccagaatgggccattctgaatagttaagcgctctggtaaaccagagatgccattctgaataaatatcttcaaagcactggaatgcagataagccggtaacacgagtcagactgaaatttacagctgttcagtcactgaggaccccaggatcccagaggggagggcagtctctgagtcaccagtgcagtctaggaattaccgtccaccatcccaaagtgggcagaaccaggccagatttcgccctgctacctggtaatttctgtacgccaccttgatcacatgggcagaataatatcctataccgaggggtccctggctcctccggaaacaccctccatgacaaggttaaggcttatccatgcgtgcattccttctataaacacctgccgggctgtgttcccyacccatgagaaaccaggaccggggaagaccctcggctgctggctcatgcacacagccacagaagagtcttgggcaaaaggacggctgagcaggtgtgcaccttggaaagacccctctgactgtgcttcggaggctgggagaagggactgggggtgggggacagggaggaaggacatcatgttagcagccaccartggagcacctgtgacttgccaagcctgagccaacatctcccatccccacggtagccctttgaggtggtcataattgttcttatttttactgatgcagaaactgagaaacagagaggttgagacatttgcccaaggtcacacagctggtcagtgccagggctgatggggatgcgtcccccttgtgctcagaagcctgcacacgctcaccgccaccctttttcaagagttaaaaatcctctgtgagaaaacggcctagtctaggccttccattggtgaccctcccccaccaggctaaggggccaggacactcatctcggtgtgcttcctgccgccacatctgccttggggctggacagggtggctctgctggactgggcaggaggaagaggcacgagatgagggcactgcttctggggacatggaggatatcaaaggggtgatctgtctctggaaaatgatggtggcagcttcggggagaggatgggaaaggagaggaggagaggcrgggaggggtgggggggagatgagtctccagcctgaaggtcgccgaggtgagcacttgaygtagcagggctgtgtcctggtgatatcctgtcagcctgggattctgccgagacctctggctggagtgcccagacyctgccatggggtcygctttccctggcaccccacgctgagtcctrggccagttgctcccctctcaggctgcaagggaccgagctgttgctktccgtccaagcatatgcactgtggtgctcaggggcacacggtagacgcgtgcttgctgaggaagggatagaatcggagagggtcgagtgctttaacactaactggcttctgccaagtgtttgacttgaggctgctcatagaaaccaacatgcattaaggagacatttgggcagaaccctgcaggaaacgagtgacccagccttggtgttctgggggaactgctcccagcagtggtaacagcaggtgcaaaggccccgtggcaggccagtgcgtatgtctgaggcacgcattgaggctggratggagcaggccaggagcygggctcagagggcagcagggtgagatactggaggcccagcagctgctcctctgagggaggggtgctgagcagaggaggaacatggtcgggcttgggctttggtgggggggtctctgctgttgggtcagcgggcagggggccagcaggcctgtgaggagcctcaggccaggcgaggcagggatgccaggagggagtgatgagctgagtccatgcggctcacgggcgagggtttggcgttgtggtggttcccatggactgggcgaggctcatagyacccgacagtggatggggtgtgctgagagggtcgggggagggtaggggmcagagacagcttccgcgtgcatgatgaagagtggagggtgctggccgcagctgccgggaaagggactgggatgcggtggaatcatgcagtccccagcctggcccacaggcagccgygatgctgtgtgcttttcatttctcacctgggtgaccccaacctccgcatctctggggtagagggaggggtgtcaakgcctggtccttggaatcctctggcttcattgccacgccarccttggacagggagtggggatatttttagtgtgggggaggcaggtgggccgtggagggaggaggtggcagatggaccgatcaaggtgcggcccgggggcggccggtgcgcccagcctcattataagctgctccaggcggtggcgggggaggcagccagggcgggaagaggagctcgctgcctcctggtaatttcttaactttctcctccaaaatgtcctctatctttcaaaaataacccaaagtttcttagatgaataataatactggtgctgctgataaaggctgcactttcggaattgttattcaggacgtgctcagcacacctactggacaatggagtaggggctgtgtgagctgctgccccatggaactttctggaaatgctccataactgagtggtccaacacgcagccactaaaccctgtgtggctactgagcctttgaaatgtggctagtgggactgcatttttaatactagtggatgtaaactcaaatagccccctgtgctggtagaggctgggctcggtggctcatgcctgcaaccctagcactttgggaggccgaggtgrtaagatcgcttgagtccgggagtttgagaccagcctgagcaacatagcgagatcctatctctaaaaaaacaacaaaaaaatttttcaattagctcagcacggtggtgcacacctgtagtcgcagctacttgggagcccaaggcyggaggatcgcttgagcccaggaggtcaaggctgcagcgagctgtgattgtgccactgcaagccgccctgggagacagggtgaccttgtctcaagccaaaatgaaacaaaacaaaccaaaaccaatatccttgcgtggctggragagacggtgtcgtgcagcccagaactggccatcgctgtggtcatggttagcaccaggggctttgtgtgctttcttgctggttcctcacagtggccygyggcatcacagatgagggactggggcttggtagggttcaggggtaagtacagggcstgggactagaaccggggcctctgactgggaagctcgtggacccctggaactgggcttcccctgaggttgctgagcccatagcctgggtcagagcccttcaaagccttggaccaggtggcagctccaggcttctgccccagggtcccttccgtgcggctgccactcaaggctgcagagagcatgtgcttgtcaggtctgaggcrctggtatcactctccagggcttggcaccacgtgggtgctgagtggttacataagggtcttggccaactgtaccacagctgagcacctcaggctgacgtgggtggcggctcccagcactgtgacgattgggattagggtcagcagtacttctggacagcccaccctgcagcctcaacacctgctgggatcccagagggacagaagtgggggggcgtctcctagcaatgggggcctcaccctgctgtgccaagccagggtgttcacagtcagttctatttactgagagcctgctctgtgccaggcacattgggatagggggatgctgttggcacggagctcctgggggtggatgcattgggggtgggtacaaccaatgtgagagacaccctggcaggagactgtgggatcttggacaacgagtacctgcccaagacctagggagtcagggagggctycctggrggaggtgacagctgagccaagagctgaaggatgacaaagggttaagtggtgacaggggaaggggtgagaatgcgaaggggcacaagagggctaggcctggaggtgggcacggtgcccaggaggtgagggcttcctgggagaccatgggtgttggctccagtgaggtctccggtacttgcgcaagtgtgagagtagatgtggtgctgggtaccacggagcagggaaagtggggagcgaatccccaccctcgcagagcttaaaagcaggggtggacccagcaagtctgtgcaaactgtccagtatggactgagtgtccagtgctcaggaacattcccgggccctcatagcactgtggcactcaggtgcagccctgccctcggtaggtgacagtcccctaggaggttgaaatggctcttagcacctgctgggtgctaagcccagctctctacctcctccaagtctgcagcctgagcgtctcacacccatgtcaggcagaggactttggggccgaggtgcccagttggagggttaggtcagggaacagarcggggtggtgtctgggaagagcactttctgcagtgggctgggaggaggccggaatctgctccaatccggctctgccttgggcaagttactctactcttctgtacagcactgaggccaccatagccagctcctctctcgggccgtggctaccaaagcagcagctgaggcccctctggcctcygaagagttggaaacctggagaggcctggggatgtggattgtggattgtggacctggtccagatgctctgttcctcctggcctgtgggcttcaagggcattctatggttagataaccactctggcctcasttccccatctaagaatcrcgagtcccgttagagctatctccaagtctggcctcccccaggggtcctgctagccctagcgttaccccgttggaaggtggctgtcttatgtatatttggaacgtacatctgtcttggtgtatttttattaatccatgtttattgtcatctgtctcatgaggacagggacttatcccactcatggcaggtccccggggcctttcctgcccaggccccacccgtgagcacttgctgactgagcgactttgctcttgcctgcagccgagccattttgcaggaggtgctggacgcagacctgagcaacgaggccttcccgttctccacccacaagctactgagagccgcagggcacctggtaggttccagctggccacgtcctctgggtcgtgggtggcagcatggtgtgaggggtgcgccgggggatctgggggctgggggctctcgggcaggttcctttgcctccctgggcctcggtccccaactgtgaaggggggacagtgggaccaggcggccctcctacaggctgttgggagcttggagaggtcatgtggatcaaagtcacagcgtcttccatccctcctcggtgcctggtgcatgccagggactcagtcccagggaaggtggccttggcctcactgcctgcatcgccacctattgtatcccctcctgaaaggcgcggggcagccctcccgaggccaagtgacctcctggaaacgggagggccgagctctgctgagcagtagctggctccggagagctccgtgtggcagcctcccagctgccattgtgggcgtgggaggaggggctgctggggtgggagcacagccagtccccaaacagcaccccacatgtcccccaccaactctagaaagcctstatcctgggggccagagcccgtcccttctgagatggtggtagtgtccggagccagcactccatgggacctggccccaggcaggaggctccctcagagaccaggatcggggcccagattctagttctgggccagcacgwccctcttctgggctttgtttccttgttggaaaacaggcatcttggcatctgctttgacttctcgaggctgagatgaggatggtaaacacagcagcccctgtttgccgagggcttcctgtgtgccagacactgttccgagaacatcacagcacactttcccatgtaatcctcgccatagtgcgggcggctctgttacagggtctcccaacctcagcactactgacgtttggaggagatcctctctgctgtgagggccctcctgtgtgacacaggtgtgtggccgcctccctggctgccgcccactaggtgccagtggcacccaccgtcgtgacagccacaagtgtgttcagacatggccaagggtccgctgggggcaggatcgcccattgagaacctcagtgcatgaccaccctgcttgtttgcagggctgtaagccatgtagtggcagcgggggccgggcctccagagccctccagcgctcatgctggaggagatgtcgccctgcatgacggatgttacccagatggagctcagagaggctggatgggccaggctgctcagggccgcccggctaaagaaacccagaaagcccccgatatgtgtcagtgacacrgatgtggccttcaggagggggtgggcgggtgcacggccgcgtttggaggcagctccctgtctctccttcctgtatgttcgtctggggtttgggtggggaaatgctaaggaaggttggggaggagcgaggtcctggcctgcagagggactggaggtcctgggggacaaatctgggttctgttagcagataaacaatctggcgatgactgtcagggaggaggcggccagaaactagggagatcccrgcggctctgctctcacctcccctctccagaggctgcacaggggcaggaagcagggccggctgtgtctagcttgcttcctgcctctgtggtgcaaagctgcctgctgggaccagagagggtgggcactcagagagagcagcacagctggatccaggccacacggccttcagatggcccgactccagctccagcaggccggggtccacgcagcatccagctttgtctgcagctgggttctggtttgcagaaggggaggggggctgcgggttctcccaccttgctgaggcttggcataggtgctgcttctgtctggtttggctacaggacggggagacgaccaggtgggaacacgtcccctyccatttgaggcccagcagccttgcccccacccgcacggccactccagcaagctgctgggacttgttctcagacaggcggctccagctgcctcccctctcytggggctggccctttcctggccctggcagcctccccaagcctaggcagtggctgcctgggtcagcctctacctgtgtggcctargagccaggccaggccaggtgcttgctgagctgacccaaaggctctgcttccgggatgacatcccccagaggaacaggccaggccaaacacagcgtggggggtgcagggggtgcaggggccgcctctccccacagtctcctgctcattggtgtaaaatcactggtgttgtaaaaagcacatcacggctgcataaaatactgctcattgctcggtttccaaycatcactgcgcrtgggtttcagcacaggggctgagtgcagacctcgcttctagcagtttccaaccatcactgcgcatgggtttcagcacaggggctgagtgcagacctcgcttctagcagtttccaaycatcactgcgcgtgggtttcagcacaggggctgagtgcagacctcacttctaccaagcccactttgggcacgacccttgcccmctcagaacaaggatgctgggtctgtgggcaggtctcgtgagctgcggcacgaagctcatctggctgggacatggtggtcagcggcatctcagagkaccgttggggacattcatagcctgccaatgagttagcgaaaacccctctaatcccatcccagagaaaccagggttgacagttgagtgtgttgcccgccatcttctttccgtcatctgtgactatctgtggattttaaaatgtaatcagggcatcccatgcagtctgtacacactgctttattctccgaatgtcgtgactgttcccctgttcctttgaacgttccccgagaaccacttggaacgccctcagctgcgtctccagtgccctgctcatgygtttcacacmgggtccacctctctgctttggaagtggcccygggaggaacttcccttgaacaccgtcctcccagtagatgctgactgttggtctgagagagggtagagctgggccyaccaggtcggaggtrtgtgcggttcatggtcccgggtcactctgtggtgtgttcttctctgtccttccgtatttctgcgcccctcgcttgcccagtgctaccctaggtctcaggcggagtgggagagaagcacaaygytttctaggctggggtccctgcgtgtgggatgggggggaggggaaacacaggggaggtgggacatgagcgtcaactggcrtgcgcgatcgtggggacacaggaaayaggcggcggggaggtgctacacgcataaggaggcccagctgcygggaaacacgccgcgcaccrgccgtggcagttatccatggtgtacctcccagcaccgtcagctcacgtagggccactgggactctcagtcaagcactagtgttttactaaacttaacgatccgttcccagtgctgtgcttctcgtcctctccctcactagcgctcgagagactctggagtgaactctggacatgctgcctgggagcctgctgggtgctggaytggggtcccaggatggaagatgtggctccttccctcgatgggctcagaccccgagtgaggttggggcccaggaagggacctgcagccacagcccagcctgtactggaragaggtcctaggcagggtgaggggtgaccccaggccaacgggttctcatggaaccgagagtcccgcaaagatggccacagagaactgagtgttggcaagaaccagacagggtggggcaaggccccgagtgtctcracctcttggctagaaaaaaagtgtggcccgtgttggggggctctgccctgggactgaccccaggggcctgtggacgagccgggagcccacatcagctgcccctgctctacccactacccaccagcattctccccatccctgtgggccccatcctgacacctcccagyccccgtggcaggaccagggcrgcagatgtccccggtgctgagggcaggcttccatccccacacagccccagccaggagctcgtctctgccgacagccagtggcccagggccccactccttaggaagacagacgaccttagcgcacagatttactgtcacctgggctgagtggccggctctgyggggtcattcccatgctcatgttcttggagtccgtggggtccatcgrggacagactgggggtgagctggggctaaccatcttcacctagagaccctgatgcccagcactgagcgcagccccactggcttctcgtccctctccctccttgtcctcccggcrgctctctggagtggccagtgtgggcctggcggccaggtctgcrtgtgtctggagtggccagtgtgggcctggcggccaggtctgcrtgtgtctggaggacgactgtggccctcaggagcttgaagttgctgggtggccggtgggtccagatcccatgagatgaggccrgggactcgaggagcgtgtggaggacggagcggccaggaatcctgtcctcagtgacctctgcctcctcttgagggccctggggaggtgtgggccaggagagcagaggttctgggcccttagtgtcaatgttacagtttttgctgacctgggaggctgtccctcaaagtggccagggccaygcgctcccaggtggccccagcctgggacacagtgccctccccatttcctggccagcaagacgggtggggatacagccactggccacggccagctccccctgtagggggcctcacaggcaggtgggagatgggagttgagtcagccacagacactgggkggtttgggaccaaagcatccaygttacccaaggctcggtggagctcaggccagaagcctggcttcccatcctgcccggtccytctgcgggtcgcctctctgggcctcagtgtccccacctgtagcacggagtctagcacaatgtctaaaattctttccgggcctttccataagtctgtccagacactctggattctctgaatccagggagaatttcatattctcctaaataatatcttgtgctggcttaaaaatgtgttgatgacatatccctcaacgtgaagaaacgctgggctggagcgtgggcctgagccaggtatttataggcgatcagttgggttccagccaaccagatgcaggcgaggaatgcgtgtgcctgcgcagtcagcggaacctctgggttgaargcagttgtgagggccgatgaggacaagggccagagctgcagacccgggccccgggtgygagagcgggcgcctgccgctgcccaaagaccctcctcrccaccagacgaattgggcgcgattcccagctgagcactgctgctgttgtgcagtgattgttctccgagaggctgggatctgacccaggctgccacgatccctggactgctagaggaggaagcagggtggggagaagttattgtccgctcagcagccagcagaccagctgtccttgctccccaaatatcttgcctcgaggccagcaagattycccgtgggtcagtgctctcccggcgtgtctcccagagctccgctcggccagacacggtgttcccagrgcccctgccgaggacgggccccgccgcgaagcagcatgctgggctgggagcactccgtggggcacggtgatcaagtgattttctctgaaaattaatttcagctcaaaaggaaattgaatctcttttcctgacagcragaagtcctagtcgcggcgctgttaggatttgattagctcaggatggagcagtcctgcacccacacacgttagataactatgacatgccagtcagagaccagctgagttccagccactgcctaaacactcgctttacagaacccgtgcagatttgctgaggcctgagacagatacccgatatcatgggcaggttccctgatgcagcacagagagactggtggccgcaggctggggcaccgtgttccctgtcacgggtcgagctgttgccaygatagtgtgaagggcctgggccccaaggggaagttggagcgagggtgtttgtggagtgggtggtgggaagcttcgacccccacccgggtttgctgcttctgtctggggcaagtgacctcaggcagaactgggtgcagagggctctgagctgggggccttggagacttcaggggcaatcggttccaggttctcatcttgcccttgtaaggaaagaaaaggtgtgagccctcccctcacccattatcaggggcatgggagacagccctgtaacaaaagactggttcacaagagaaaagcacaccagatagatttaatcaragctttatgtgacatgggagccatcagaaagggggacccagagacccagggaagacggttcctatgcttaaggtcggtgaagaatggggagccgtgtggacaggtgttggacggcaggggatgcctgtggggatggactgtggggaggctggcgaggccagctstgcagctcccccttggcctctccgtgcagtgcttctcactcccaggcatgggacaggacccctggagcaarggtcttatgacccacagtcagacaaggtaggcggagaacatctttatggccagctcctccccagaaaagtggggaaggcttgagttgtatttctaggtctcatggctggctttgggggagagggcctctactgtccatgacccatctggggaaagaggaattctggcttctgtgacttgctgcaggggagaaagagggcgggagacaagaggggatgaggaggtcagagagatttgggctgcaccagaggccttctggtcccctttagtcccgagtcctcatgccaggtgccctgcttgggggatcatggtctgaatcctagaacccttgccgcagatgagcctcgagcctgctggccactgtggtggaggctggtgggaatgggtaccagtgctgtgtggcccagggagggaggcctcctgcacctgcccactgaccgacacttgccacctaagtggcytgaatggaatgggacaggcaaggtggggggtcctctcatccttggggaccaatggcatcccacagaactccctccagggcctggaagggtctgacctccagaaccttccaaaaagagagggtcctcaggccaatttggagggagatagccatggtcatagtagtggcgcttgcctaagtgtgggggactcagcgggcctcagcccygccccacatgatctcattccacagagggatcctctctcatcacaacctatagtccaggagtctgagccccagcgaaggccaccagtggcaggcggctctgctggcttcaggaatcattcccctcttgtccaggccaactggctgggaacagcgcctggccactgggaagaygggcaacaggcagccctgtgggtcctgagcccttgcccccagycagggccaagcargaaggggactctgttcccagcagggtccacgctatcacaaaggacccctgccccaaccctttatttgcagagctacatctgataataacagacatgtcactccaggggactgattagttccatgggtggagaggtcccctgtagccccacccttcatgggtttgattccaaagcacctattcctaaacaggaggcagagttcccctcaccttggtcttcctccctctcagcttgacccccacctggccaggtatctgctctggtccgaccctcaagctgcacccaggtgaggtcaggggcccaggattgaaggtgcatcccctacggattctttcaacaagaatcgtgcgtaataagctctgtctgggtctgagaacattgtcgattcacctcactcctctcacccctggaggatgtgggtttccaggctgacagttatgttcgaagctctgtgcttsgaagatactgttctacrgtagattagcatctactagagccacgccaaggggtggtttcagggtttcaggcctctctctctgtcttatgtatttgcgatggagtctcactctgttgcccaggctggagtgcagtggggcgaccttggctcgctacagcctccgcctctcaggttcaaccaattctcctgcctcagcctcccaagtagctgggactaaaggtgcccatcaccacagccagctaatttttgtatttttagtagagatggggtttcgctgtgttggccaggctggtctcaaactcctggcctcragtgatccgcccaactcggcctcccaaagtgctgggattgcaggcgtgagccactgcgcccggactctttctgtgatttccatgcagggattcactggtatttatcctgtttggtacccactgtgctttctgcagtctgactgctcatgaccgaccatcttcacttctggaacattctctgctgttatctgtttaagtaccgcctttccccccggtctctctggtatctccttgaccttctgttggacgcagactgcagcttcctgtccggcccagggccattccctcacattccccgaattcccatctctgtgtctacaccccccggcctcccctggcacctctgttcctgtggtccaggatgtcgagaaagtgccggtcacttagttcctagcctcagtttcccatgaagaaaaggagttggtttgctggctggtttgttaatttaattgtacagttcggtagtgttaagtatgttcacattgttgggaaacaaacctccagaatgtcttcattttgtgaaactgaagctctgtccccattgaggcaattccctttccctctccccagcccctgtgccctccattctgctcttgatgtctatgaatttggtgactccagggacctcatatgagtggaatcagacaggatttgtccttctgtgactggctcccttcacttagcgtgatgtgtttataatgtttttgtccgcgttgtgttatgcatccgaagttccttcctttttaaggctgaataacattccttcatgtggatagaacactttttgtctgttcatcatctgtttttggtgtgtktttttttttttaatttcagacagggtcttagtctgtcacccaggctggagtgcagcggtgcgatctcagctcactgcctcaacctcctggtctcaagtgatcctccccccttcagccttccaagtagctgggactacaggcacatgccaccaaacccagctaattctaaaattttttttgtagagacagggcctccctatgttgcccaggctggtctcagactcctgggctcaagcagtcctcctgccttggcctccccaagtactgggattacaggtgtgagccactatgccctgcttgttcatcctctgctgatggacacttgggttgcatctacctcttggctattgtgaataaccctgtgaatatgagtgtgcaaatacctcttcgaatccctcctttcaattcctttgggtgtatacccagaagtggggttgctggatcacatggaagttgtatttttaaagttttaaagaactgccaccctgttttccacagtgcttgcaccattttccatttccactaacaatacacaagggttccagtttctccacatcctcaccaacactcgttactttctttttcttgtttttataattgtcatcctcatgggcacaaagtgataactcactgtgacttgggtttgcgtgcctctgatgggtagtgacgtggagcatcttttcctgggcctgttggccatttgcatttgcttttgagaattgtcgattcaagtcccttgcctattttttttttttttaaatggagtctcactctgttgcccaggctggagtgcagtggcacaatctcggctcactgcagcctccacctcctggattcaagtgattctcccacctcagcctcctgagtagctgggactacaggcatgcaccaccatgcccaactaattttttttttaaatatttttaatggaaacagggtttcactatgttggccagggtggtctcgagctcctgacctcagatggtcctcccaccttggtctcccaaagtgctgggattacaggcatgagccaccacacccggcccctttgcccatttttaatggtggtatttgactttttattgttaagttgtaggagttctttgttctgtctgggtagaaggcccttatcatatgtaagacttgcaaatgttctctcccatcccgtgggttgccttttcactctttgttagcgtccttcgatgcacaaatgtgcttgtgatcaatgtccttccatctgacttttgcttttgtgacctgtgcttttggtgtcctctccaggaaacccttgccatttccaactccccatgccttcttccagaggttgtacagctacagatcttacccttgtgtctttgttccatgtctagttaatttttggacaagatgtaaggtacgcgaccagcttctcgcttctgcatgtggctatcggatcctcccagcaccacttgttggagactctttccccatgagtggcctcagcgcccttgtagagatcatgtgaacacatacgtgacggttcatttgacttcactttctccaactttgctgatttcgtttaatagtttcagcaggcttttttggcatggaattttcaggatgtggaaagggtttaaacaaaacctgacataagacccttcctgctgatcttccataattctgtgactccatccacggccaggagttccatcttgcaatttggggctttcagagcccacctgagtcagagtggccaaggacgacgtgccgggaccatgtgcttggtgcacacgcacccaaccctggccgatgggtcagagcagggcactgaggccaagtgggccgacccccatgggcgctgggagacgctgttcccacccaagcccggctgactgggagcccgtgtttgttctggatgtcctcgcttggcctgtccctttccttgtgggtccccacttggaagaactggggactgatcccactccactgctttggtggagaaaaatgtaagacgcctcaacaactagtgattccgtgaacttagagaggcccctggatttccccagcctccctctctttggcaggaagcaggtgtggcccccgttttgctccttcgttcagggactgtttcttgggccaggctgtgcacggcgtacaatggagacccagacccagctgaccccatcctcgctgagctgctggagccaggaaggatgggactgctccctcccttccacccgtgaactccaaccctctccctgagctgggtgacgggtctttgtctgaacagggatccgcaattggagggccgtgcataggtgcactttaaaaattatttttcctgtttcaaaatgagattggttttgagccccgagctcctccataggctatctaaaattagaaccccgttgacaaggcaatctttgtcaggggcctacggcttgcaccaggraagcagggaaatgtcaacagtatattttctgtgtcaattttgagttttttaggaggcctgggcaaatggcaacttagagcaaatttgcgctatttccaaagcttttagaatccagcccctcggcggccatgtgattaaagtgtcaggtttataaggagctgcccctgtggttgggagagcggcctctgccctccttcccacaggcgtatcccagcgggagctgtacagggagggcctttccactcagagcagtggtggaatcagctcctccgctgtctrggatcctgcagtcagcctagctctccccattccttttgtgagctctctggtcccagggctgagcactcaggccttcccatgggagtcagtgggttcaacggtttgcctgaaggtgaggacgcagactccagttactgggtgtggacgtgccaygcaccygaaccaagtgtgtgaggaaaatcacrcctcctgtgcaagaagccccccaygctgtctgtggcctccacgcagccgagtgctagcctgttgtgcaggygtgcgggacacaccctcccaaagacaccagctgtcctcrgcggagcagggtgtgcctaggccckgctcagtgcctctgggagcctctgtgtccgcctcagcccacagacattaytgaccgtgttcccaccgttgcaagggccgtggagggacgagatgaagcttagcccagagcacccgataatcggcactgtcacttctgcagggcttgrgccatcgtgtctttcacagtcaggtatccacagccccacaggcctttctctcctgcctcccaccatgtccgctgcccaacgctgggcctttgcacctcacctggaaggcccgtctgcgacggcaatctcctggtctgcctgctagcctggtctggcgtcccaggcaggggtcttgctttccggccccttcctcacccagaacatggttgtgctcacggccgagctgagtcctgaagggcagaggctatggctgtcttcagagcccggtgctgggccggggctgaccagaattggtgggtgacgggctcctcggacaacgggcttggcacctggctgtccccttccctgatgcctctatccccacctggtgcagccagggtggtgtcccctgagctgggctgctgccttccccctgctcctcgcagacgtgtctcagagcttctgaaacagataaagctgggctcccaaccccatcttacagacaaggaagggtgagaagcttgccccaggtcactgctgtggactgaatggtgacccccaaaacatatatctacatcctaactcgtcagaacctgtgaatggggccttgtttggaaataggatctttgcaggtgtaattaaggtcaggatctccagatgatattatctagggctagggaaggtcctaartccagtgacaagtgtccttagaagacagagacacaaaggggaggctgtgagggctgaggcagaaatcgcagtggtgcagccacaagccaaggggtgccgggaggtgctcgggaggtgctcgggaggaggctccctcgagagtggaagggtcgtctccggagcctgcagaggaagcgtggctyrcccacatggtgattttggattttgagcctscagaaccgagagagagtttactgttattgttttaagccaccagttgtggtcgtttgttatgacaggtaggaaactaacccagtcctggagaagacctgaggtctgcagatagcaaacctgccatctccccttcccaaaggtraccccctacttctcctcaaagatttccagagcagctggagggagcagctctccttggaagaccccatttcttgatggcaatctggctgggacccagggccagctgataatcctggtgacagtaggagctgccaccaggaagtggtggcctgggcctggacctcagccatcttacatggccacatctaagccatgaccttgtcccccaggtccgagccatgcggctgtcctttgtsggggagctgggctgggagctgcacattccaaaggcgtcctgcgtgcctgtgtaccgggctgtgatggccgcgggtgccaagcacggcctcatcaacgcagggtaccgcgccatygactccctgagcattgagaaaggtgagtgcagggtctggacagcayggggcgggggcgggcgcagtgggggscagtgacgctcgagacacctggaggccgagaagctgtttaccttccctgtgttgtcacccggcttccttctttccacaccatgatttcctcccctacaccccagcgcctgacatcctccatttccccaaaacctcttgctgcccagggtcttcgtgcagggccccagggacagtgttgggatctgcgacacctacacacacctgaactcagagagctgaggtgctgcctgacacctgggggtcaggcccaggctgggttggaattgagggccttggtttctctgagagctgtgaagaatggagccagggagcaggtgctgtggcctctggaagaagcccagaccctgwccagagcaaggatgaaggctcagagcgggctttgggcggttccccagcgtgttgggcacccagcttgggcgtcaggcagctcccctgggtgttgggcamccagcttrggcattgggaagctcccccttcacragcccctccctgacgcccccacctgagggtgcagagggctgcagtgctgatgggcagtctgctcgggggggcggtcgccccagggaacctyctggagttggggatgcccctgcctcctgcccaggtgactaagcagctctgagagtgtggctaggggctggagggggtgggtttaggcagcatcctcatgcatctcctgaagggcttatccccctcagggtggcaccgaccccatggattcccttcccacaggctaccggcactggcacgcggacctgcggccagacgacagccccctggaggcaggcctggccttcacctgcaagctcaagtcgccggtgcccttcctggggagggaggccctggagcagcagcgggccrcaggcctccgccggcgcctggtgtgcttcaccatggaggagtgagtatccygctgttccacgcccaccyggaagcaactgcctacagccagggcaggcaggcgcttcttggtcccccactcaaagcccctggtaccaacacttcccatgtgccagccrtgctcttccagaacgcacccaacagcccactgcagataaggaaatcgaggccaaagagagaggccatctggccaggtcacatgttgttaaaggcagaaaggcagagagagtttgctctttttttttttttttttttgagacggagtctcactctattgcccaggcyggagtgcagtggcgcratctcggctcactgcaacctccgcctcccaggttcaagtgattctcctgcctcagcctcccaagtagctgggattacaggcgtgcaccaccacacccagctaatttttgtacttttagtagagatggggtttcaccatgttggccaggctggtcttgaactctcctgacctcgtgatctgcctgcctcggcctcccaaagtgctsggattacaagcgtgaggatcccaacatgctgggattcaaaccaggccagtgtaaggttgcgcacctggggcccctcccaggccagcagggcccgtggggaggtagagaaggctccacactcttcccatgcaggtctcaaaagagaaaggtgcagccaagcccaggccacccctctgtggcaggtctaggccgagggccttgggagggtgaacccagggagcctgacctcycagtcactgcaacacgacctcccatcccgttctggttcagtctccccacagccctgtgatagggggagaggggctcggctggggccgtcatccccactcacgaatggagaccacatggtgccaaggagcaggggactcacgcccagtcacacggcagaggtggaaggagagactctgcctgggggcgacctgacctcctgctctccccactgagagtggctttgagcatgctgctggagcccggcgcacgtgatccctgggctactgggagagttkggattccaggaacccgagtcccacttgggttgcagggcagtctgagaagatcaggccctgatcagaggccctcccgtggtgcccacgggggtctgaagcacaggtatccggggaagtgggcggctttgggctctgtggacatggagctgacagccagctgcaaacactgccacttctcccagatttctggagccttcaaaaggagtgtcagagtgacgaggggagggagagggaggacgagggagagggagggtaagggagagggagggtgaagggagagggagagggagggtgaagggagagggagagggaggctgagggagaatgagggtgagggagagggagggtgagggagaatgagggagagggagagggagggtgggggagagggagggagagggagggagagggagggagagggacggtgagtggagccgtgtcgtcgtcatcctgtggcttctccctgggtgcctgtcaggctctgtctcttgtgtgacagcctgtccagctccctgaatcagctcagctcctggagagggggccccttgcagacaggtcagcatccatgggtcctttctgcttgcctgaccccgaccttctggccctccatgaagtacctgcagcctgatgtctgggtttaggagggcctcggacggcccctgtgacccagtgcgctctgctcaggggtttcctgtcaggctgcataatagctgccctgcgccgcggctctggactgttgcagttccaggacaggcgcagagaagatgctggcagtggagtcacagagaacagccctgccacactgctctgggactccgggcagttggggcctcagcgtcctcacgtggagaacagaaactagggtgacaccaaagatgtttacgaaacctccttccagcctcgtcctaatctgatggacaggtgggacccaaacrgtgactccaggctgaggatgcaggaggtgccctcaacatcaccccagcccttccattcagggacccctttgcatagctgccgccgtgataacccattgcacagggagaagtctgcagactggcaacaaaatgttaccagttagccctgggtgctggcctttctttgattttagcttacttttttttttttgtcttcctgcttttaatctttaaaacttttacagtgagcattcatgtattacatgtagtaaagtcctttgaataaagtatgtattgtactataaaaaaaatgaacctggccgggcgcagtggctcaagtctgtaatcccagcactttggraggctgaggtgggcagatcacttgaggtcaggagttcgagaccagcctggccaacatgatgaaaccccatctctattraaaatacaaaattagccgggcatggtggtgggtkcctgtaatcccagctactccggaggctgaggcaggagaatcgtttgaacctgggaggcggaggttgtagtgagtctagattgtgccactgcaccaaaaaaaaaaaaaaaaaaaaccagagttgaacaacaatggaaggaaatcggaagcaggggccctcccaaatatacggggctcgcttctggaaacagcaaagtccactcctggttttgatgttttctattcatcccttttactcactcgaagccygagccctgctgtccaggccaggtgctgggctggctctggggaccagcgwagtcctagtaggccagccctatctgcstggagccacggttgggtgtgcatcatgcagccccccattctcctccaggccgctgtggacgcgtccccaccctgcggtttctggggccccagctttctctactgcttcttccagcaaagtacccatgtttggcctggaggccatctggaggaacggccaagtggtgggccatgtccggagggctgactttgggttcgccatcgacaagaccatcgcctacggttacatccatgaccccagcggtgggccggtgagtccccttctctggccctgctaaggcagatgccgatccctcaccagctccaaaccagctccctgcactgcaccctgagtgtgccgggcatagggaggaggcacgggtgtggtccagaagaggaggagggaagagaaaggagggaggagggaagagggggaggaaggaaggaggagaaggagggggaaggaaaaaggggagagaggaaggaggaggaggagggagagggaggagggagggagaaggagaagggggaggaagaggcctcagcaggtggaggactccccagctgtgcctgggcagagccaaagctgctctctgttttctttctggaagaatccgactttggtgattccaggctttttttggttagaaggaggtgccagccagccaggctgataccttccagctcctcacaccagagacccaaacctcaggccacccacagcccaccctttgcctggggtgcaggggtggcccccagggtgaccgactagagactcagagacccatgttcctatcctctctttcctcacccccgacacccctgaccccaggcaaccccaccccctccaggtgaccctgacccctggctgcaggaggcaggaacaggctggaaagagcaggcactgcccccaggagcaagtcccaggacagctctgggtggccaggggtggtggggcagggggtgggcagcctccccagaaggggaaggggtggtctctacctccacctccttttcccatctttctggcactgcaagtagaggtgccggtgaggagggtcgtgtctctccatgggagccgatctgacgtttggcctaagccctaagtgaggccgggaggtgctggcctggctccagagccttccagcctgagcccctgatggacacgtagagggaattggggagggagcgagcacttgggagaagccatgaggaggggtaggctggagacggagcagccttagcaagagctgcagaacatgcgcaggcccagctcgcaggcccaatggggaggggacaccgccaggcctcgggcaagaccatggtcctgtggagctgtggggaagtggcagcccatggggctgagtccggcggtggagctgggaggctggggacacacttgatgccactagcctttggatctgccttttacttgctttgtgaccttggataaggatcctctcttggagcctcagtttcctcatttataaaatgtggacactcacctaccatgcagggctgtcatacaggccactgcacaragtgagtcttaatatgtggggattgtgatgrcatggctcccacggtgggcagggcctcctgacacagccctggggccatggtcctgggggccacagccctggggcccagccaaaccggagtttatgggctccatgccagggtgggctggggagtggaggctcctttgccatttcttcaaagaacagtaatgctcgcctttctccggagtcagggatgggtccataaccaacgtgaccagggaagccgaggttccgaggttaaacggcatccagacaggcagccsgggaaccagtcgatgcacccagagcggccggtgcacgtctcctgccccctccatcagggctgtccagagcatttgcaccatggaaatgggcaaatgctacagtcacacccacctcaccccagagctggttgttaaacattttctagcacccaagtggggtaacggaggtttctkcctaagatagggaaacctgctcattgatgggaaaggctccgagatggggaaggcgtttctgcctcgtaggtatctgttagcaaggccagatgcccgctttgagttgtgcmtgcccgtggacatctgaaggccaccagctctccatgctgcctgcctgcggggggcagctcagagctctcagccctrcaggtgcacacatggctcagaagcaccactcctaaagctcctgtcgcagaaaaagcttggtttgttttttatttttttcatccagtcctgagctgctaggaacaagaaggagccctctgactcccagagcrgagcccgagactccctcctgtggccctgaccttgggtttaattgctstaaaggaagaacagcttccctgagtggcctagcctgccctcctcatagcagctgcagcaaaagtgccaggcgtcaccagcwgtgccaggctggaggtgacaccctcctcctgcctaagagcacctgcacctggggctgactggctcccgagsrcttgctggggagcccgagccagggtgtgggatggggagcatgcagaggccaagctgtctagaaggctgttccagccgcccctgccccgagggattcgagccggattggcccccagcctcggcgctgctctggccgctgtgcttgcccgggtccggggaagccaccgtgttgctgctgtttcccaggcatctggaattgctggggtgggaggtgtgttgtccggtggaagtcatattggytgccagaccttggctttgccggaccccagatgcccatgtccaactcaagatcacatggacacgaactgcacctgctctggggcaatgcctgggttcagaaaggagtccctggcacagggatgagtttgcccacagggcaggtagcaagaccaagaccccctcctccagagaarcaggcagacgtgagccctgtacctaccaacagagagtgatcctcatccccacctctgctcctaggtctcgctggactttgtgaagagcggggactatgccctggagagaatgggggtgacctatggtgcccaggctcacctgaagtcgcccttcgaccccaacaacaagagggtgaagggaatctactgagggctcagaccacatgccccatcccatgctgtccatccattctcacaggtcccaaatggccctgggtcccaggaccctggacccagccagaacttgtgccctccctgtccttagcctaggcctagtcctgcgaaaacccccaaaccagatacggacagagaccaagatggcccatcctgtggtcactgactggaaggcagtctctaatccaccccaatcctcccagaaagcaaacctgtaagtgtcttgggctcagggaccatggcttgtagccctttccaagcttctaraaggtgcttagtaaatacttgataagccccacgtgaaaacagcgaagcaaataggcttcatcttttactccaggcttgactgatcggtggcgggcytccctggggcacttggctgaagagcatgaggctgtgtctgggtcaggaaagagaggtgatcgactggcattgtctgccacagcgcacatggaggcctgggaccaaggccattcttcaggatggtgcctctcggctctcaggtcggaacaggagctggaaagctcttcttaccttgctsgacctccctgttcttcaggtggcaaagcctcctgagagtcggcagcccgggaacacagaggagccgaagcagggagcgggcggggcctcagattggtgycctcctcacccacacagaagtgccagctcctgcctcagtttccccttgagcccctcgctcaccaggcccaggcaggagggacgtgctgctgggtaagagtctggtggagtccccctttctaggtgacctttgtctttgctgttgatttggacgcggttcctgcccatgccctcctccttgtctggcccttgcaggaggaccctctcttaggctctgccctgcacgctgccttgagatggggtggctcctctgcccaccttctcttccccctgataactgcctgtgtgtcagaagcagctctgcctctcctgcctgggaggggtgtgcatctctgtccatcccacgtgctcagtcccctcccttgtccccccgagcccaggttcagatcaggcccgtcagagcggcactgcgcagtcttgccaggcatgccctgcaatctgggaagagcgggaggcagatgcttgagggtatcgtggagccggggccccacagagccacacacacagcaaacagcgatctgggggcagcagtcctggcaggccccagctgccactggacgctcccaggccacgcggcccactgtggactgagctcgaacaaagctgtgggcagacgtttgggttacagatggctgtgaaaagtgggtttggccccctgagtctggggagggggctgcggctggagaccagggtgggggctgttggctttcacacgcttcaggctgaaggaacacctgcagcctccccttgctcacaggcgggcctggcttctggatgagacagctttgtgggagccaggggaggagaggaggggagccggctccccagatggcctggcctgcttcctccgggtctgcggtttggccatagacccctggattgggccggtgaccacattcatctcacggcccatccctgggggaaggctgaggatgaggggaggtcagagcccgggttccgctccaaattgtttctcgtggctgcagctggggaatgcacgcaacrgcaccaccctgtcccgaggagagagaacctggctgcgctccctgtcccgaggagagagaacccagcacccctccctgtcccctgtgtgcttcccccgcccctgtggagagagaacctggcccctcggggagggcactgggcattgatgtgagcgcagcctccacaactcacctcccaagctcatcacctgcgggctccatccctgcgctgccagaggtcctggccccgccatggctcccaagtgcaccgcccggggaccacatcacaaaagacccaccttcccagaccccgagccaggtcttccagacctcaactttaaaaacaccgtttcgtagctatttttaaattttttttctggaaatattgataccatgacgctcactgtggctgagtactgcctctcaggaattctgagcaaactgttttgaaagtgcctacactggccgggcgcagtgactgacgcctgtaatcccagcactttgggaggccgaggggggcggatcacctgaggttgggagtttgagaccagcctgaccaatatggtgaagtctcatctctactaaaaacacaaaattagctgggcgtggtggcacacgcctgtaatcccagatacttgggaggctgaggtgggagaattgcttgaacccaggaagcggaggttgtggtgagccgagattatgccattgcactccagcctgggcaacaagagggaaactctgtctcaaaaacaacaaaaaaaagaaagtgcctacatcgtcaccggcagagcgctataccacagtgtgcagtgagacagccttgggccatgtgaaaagttgggggtatgaatgggacgcagaaaggttccattttgtttttttttgttgttgttgttttttttttgagacagggttttactctgttgcccaagctggagtacagtggtgtgatctcagctcactacaacctccacctcccaggtcaagcaattctcccacctcagcctcccaaatagctaggattacaaacgcgcaccaccacagcctggctaatttttgtatttttagtagagacggggtttcaccatattggccaggctggtctcgaactaccgacctcaggtgatccgcccgcctcagtctcccaaaatgctgggattacaggcgtgagccaccgcgcccagccctaattattgtattttttgtagagacaggatttcactatgttgcccaggctggtcttgaactcctgggctcaagtgatcctcgcatctcagcctcccaaagtgctgggattacaggcatgagccacagcacccgaccttgtatcattttaattaatttaaaattaatcgtaagtagccacatgaggctagcagccaccagaaagcacagccctggtgtgctctgggacccagtcgggcaggcacccctatgctggctggagcctggggtcgccccacttctctcaacactgatgggcatgagcattcctcaccccagggctctgagcacctcacagatggggggttgtgccaccctagcagtccctgccccctgggaggctggggaaccctctcctcggtgggcagatagggagacccaagcctagggaaggaaagtaactaactcagggtcacacagcaggggcaggaatagcaacctgggctgctggactcacaccccaatcattcggaaggtgggcgagcccagagtccctttggcttggggcatgtaggtcattttcaggtaacaaagcacttcccctaagcctctaaataaggaacttattttagataaaatcccccacaagggtcctggggaaattcctgtttcctaagtaagcagaggttgagcattcagacactggagtcagacctggggacacttcgagctccccggcttactctgggtgaccttggcacctaactttaggtctctgagcctcagtttcctcctccatcaatggaaacagaaactacatggcttcacgagattgccacggctgtgcatagcctcagtgtggggcaagtggcaactctcagcaaccacggggttacgcttatctgggtgtaggaggtgcgggtactgctggagcgkggtaggggggacacggctgctgtctctgcaagaggaagaggataaccagcctgagagcaagagtgtgagtggggggtgaggtgggggtggggttgtcgctgtggcaggttccagagctggctaggattcccaatcactgccgctcttgggcmccaggtgaggtacttatctgggagtctcagtttccctgcccgagatcggcaggctacaagtgccccccaggtgtttgggcaggaccctgggacccttctctgggctggcaattgggtgtgatcgcgggaagaggcttcttgggcctgctccgtgtctactgtcacctaggctgtaaagatgacagagggccggagyggctctccaggctggggcctggcatttcacagcgctagcgccgtgacttatggaccacaagaagctgtgatttatacaacgtgaggcagagctcctgggctcgtgasttcccttctgtgatgaagtgaagtgccttgcagaagcagcagccgcttagctgatgcgaggggactccgaggcccatccatctccctctctccccatgaggctgggcagcgttttgctgaagtggctgaacacaagtgcatctgttactgtctccagaaaccatcaaagagctgaacttgtccctgagaggcagctcagagggcaggaaggggagacccacccaggccagctgaggcagcttcaggacgctcagggggaagcacttggtaccacgcctggcacagggaggaggctcaggagcaagcttctctctcctggagcgacggcccggagtgcaaacatacccacctccagtgggtgccagcccaagtgtgagctttattggctcattagcccgcacggcatcagcctggttttacagatgagaaaagtgagggtcaggaatgtgaaatggcccgcccaaggcacactccctaagtggcagaaccacgcggaaagcacagccctgactccaccccggtctgttcagcgctggccccaccggcagagaagcaagctggtgctaataattccaccccacgtggaaccggcgcccagaagccccgctggatctttgccgcctcgtcttttggtgatagttgttgtcagggcttccctttaggtgggcgaaaatatctgtttactcaggaatggagcaatttcccaggcgagtctctaactagctaaatgcctggtcctgcctccgtcgcagggaagccgcccactgtgaaacacgagccactcagcagggaaatgtttaagcggcacccgcacccgctgcacaccgggagcagcggggcgggggcgggggcgttcccggtgattccacaccccggcccagcatggtgcctgtcccagaagccaggccacacccagtgaggcggaacagggctggcggagggctggaccctggaccactgtgcaggctgtccctgcactgagtcagccgggtttaaatggacgaggtcgtggtccactcggtccagggtaggtcaacagggcacccacaccctctcagccatgcaggggaccctgggggaagaaggctggattggaccgtggtctcaggcaggggcgtggtctggccccttcatcctgggcgtgcagggctgttccatggggatcgtcgcagagtagagtgcacagtgccggtgtgagcccacagggacagcatggaggagggggaggagtaggtcccccctcagcctttgcccccaccaatgctgacaacggtggggccagcagggcttcggccctggctggtgggrcactgtggggtgggctcttccagtgtggagatgaccttgggcaggggctgcarrttccattcaccctgcaaggaagggggcaggaggtaaactgaggctggargggcaagatgggtggctgcttccccagccacttcccagccacctcttggattcttgccctcaaactcagcttgtctcaaactgaactcactctgctcccccaagttgctttttgggggtcctcacctcagtaaatgccccctcccctggcttcccattcacctagtcaggaacctgggagtcatccaggcctctccccgcctctgtccccacccaatttaatcattcaccctagtgtagcaaccagagcccctggctgcaggctctgatattttttagctatctcttcccctcaaggctacaccaaatgccaagttttcaaccccatcagacgtccaccccacactattctcagcaagccagtattagcccttccttcccttggtgctgaggatgtttgacttagcagttaatctggctcccaaatgcttctgggaaggatcttcctggatctccaggctgcggcaccttacgcgactaactctgcataggccctggcctcctgaccacagcccagtgggcccaggataaattagatgccttcgaataccagtgggtctcagataaggaggaaaaaaccagctcgcagcttcagactggttcgtttcttaccttcccctcccctggtgctttatttttaggcaggttagtgcgccctgctcacaccacctgcatttggcattcggtacagtgtggaggtgtcaccagagagggtgcctgccctcccttccttgcctcgttattggttctctctctctccctctctctctctctctctctctcctctctctctcctctctccctctccctctctccctctccctctctcctctctctcctctctctcctctctctcctctctcctctctctctgctggctggctggctgtctaggcctatgtgtcaccacctggcacttgctctcattgtcttgtgcgagtgcttttgccagcagtttggagtgcagrcccatcacccctcactggggccccccatgaggcctgcctgactgcatgccccacccgggcccatggcagcgcacctggaagcggacggctgaggacttgttgcagtgcatggagatgggcgcgaagctgtacagggccttcagtacgtcgcrgttgaaggagttcsagggaacagaggtgaactgctgagacacggacgcctgagggcaggtgcagacatcctcgttgttgaacctggtggggacaaggaacagccaggctggggagcagctgacgggcagggagcccags

SEQ ID NO: 93398 - DNA, 13169 bp, Homo sapiens
tttccgccttggcctcccaaagtgctgagattacagacctgagccactacacctaagcttatcttttaaaactgcatacatttttgccttttttgttttttggtactttcacctatttcctgacaaattaagcaaccttaagacctgtttccagacaaattaagcaaccttgagattccctaacttaataaatttcacttccaagttacacattgttattttattttaattctttctatattatctccacaggacattaatactgtttatatgtttagtattcatttaatcttttttctttgttctttctttctgcatcttcaggaatctgtttgggattattttctttcagcctaaagagcatctttttgtatttcctttagtgcaagcctgctaggtgacaaattctttagtgtttttggtcttaaaataggtttctttcattttcttcttgaaaaatatttttacaaggtgtagaattctagtaggcagtttaaaaaagatcattacactatcttctagctttcaatgacactaacttcttaacaaaaataatctgtttattcattcattgaaggtcatctatttgtggctgctttaaagatgttatttttagcttttttatagcagttttactgtattcacccacttatagcatttatagggctttgaaatcagtagtagtttgatactttctttcattttatgttttcaggaatgatctttctatagataatgcttctaagttattctctttatgatatctttttttctgggactccaattatacataagttagagttcttcactgtatcttttatcctcttattttttctgcaatatttcccatccttttgactccatttcttcattctggattgtttctttttatccttctttgaatgcactaattttttattcagctgcttctaatctaccattaagtagatctgttgaggttttaatttggctatttgtcagttctagaattgctcagtttttaaaattatttctagttatctgttggcattttttctttctgtttaaaaatttaaatcagggtctcatgttgtttcccaggctgaagtgctgtggtgcgatcatagctcactgcagcctcaacctcctgggctcaagtgatcctctagcctcagcctcccaagtagctgggactacaggtatggacaccacacctggctagattttaaaattttttgtagggacggggtctctctgtgttatctaggctggtctcaaactgctggactcaagcaatcctcccaactcgacctcccaaaagtgttggcatgactggcatgagccaccactctttgctgaagtctattttgtcttttatcttcttggagagatttaacatagctattttaaaatgtgagtctgataacaatctaggatccctgtgtgtctttttctgttgtctgttttcctattgatttttgtttattttttatttatgtctccatttttctattttttttttttattttatgctgtgcaaatgcttagtttgatctcatcttttcccagataggatttatgtttgcttttgccggggacctggggcactaatattccaagatcaccttgaggtatgttcaaagatttagatgctttgaagttgaattttagccctgaaaatgttcgacctgccttcttctagttaatctttgttactagtgtgatggaattttagattctaaccccaagtgagaggtgttggtagggccagtctctcttagaggtcagggtcctccagtccctttccccggataatgtgtccacaaactctcacaggaatcctgtagggtgttgaggggtgggggcaaaaggatcccccatgagccaacctccgctcactaggtctgtgttctcccttgaatcctggcttgctaattttttcttaatttaatattccctttcctcttcccttcaagatatatataaactcacatttatgtgttccatgttttttatatatatgtatataaatataaaatatatatatataaataaacgttacctcattatataattatacgttatgtagccattagctcatgtattattattattaatttttttttggagacagagtttcgctcttgttgcccaggctggagtgcaatggcacgatcttggctcactgcaaactctgcctcccgggttcaagcgattctcctgcttgaacctcccgagtaagtgagattgcaggcgccagccaccaagcccagctaatttttgtatttatagtagagatggggtttcaccacattggccaggctggtcttcaacttctgacctcaggcgatccacctgcctcagcctctcaaagtgctggcattacagatgtgagccactgcacccagcctcgtgtattatatttacaatataaatttatagccaaatactttcacttggcaacataccataaacagattttacatggcattcaatgagatgtgattttaatagctcttgattgtcccactatatgtacaaattaaattttttattcttactgctatttttggaaactctactttttttcttttgtaaaaatgcaagtaacattggaataaatatattctagtacataaatatttttgcatatcactgatatattctccccttagagaagacttctatgagtggaattggtggttcaaaacagatgggttgactgggcgcagcggctcacgcctgtaatcccagaactttgggaggccgaggcaggcggataacctgaggtcaggagttcaagaccagcctggccaacatgatgaaacccaatctctaccaaaaatacaaaaattagctgggtatggtggtgcatgcctgtaatcccagctacttgggaggctgaggcaggagaatcaaaccaacttgggaggcagaagttgcagtgagccaagattgtgccattgcacttgagcctgggtggcagagcaggactccatctcaaacaacaacaataacaaaaaacaaaaaaaaccaaaagggataggtttttaaattattttgatattaaatttttctgtagaaaatttgtgccaatttgtatctcactggtagtaatgttagtgcttcttttaagcacagctaagaaaacactcctttgtcatttttattttattttgggtgggggggacagaattttgctctgacacccaggctgaagtacagtgatcacagctcactgcagcctcaaactcctgggctcaagtgaatttcccactttgtcctcccaaagtgcttggattataggtgggagccatagtgcctggcctatttgtaaacatgtcagagatctcagttcatcctggggtttaatcttttgatgttatcttattattcttttacatttgtcattttacatttgtcattttacatttccatttttaaataagcccttttatttaaaagccaaccatagatgctttgggcaatcacatttatgtgttccatgtagagctgttttaatggctatgttatagtgctgtgtgaagattgtggcagaaatagaaattataagtgtgaagatcatgcaattatttaaaaaatctgtattatttataaaaccatgtgcactatgattacagctacataaaacattcaaagaaaatttagaaaataggctgggcacggtggctcacacctgtaatcccagcactttgggaggccgaggcgagtggatcgcttgaggtcaggagttcgagaccagcctggacaacatggtgaaaccctgtctctactataaataattggccaggcatggtggcacactcctgtaatcccagctcctgaggaagctgaggcagaagaatcctttgaatgagccaagattgcgccaccgcactctagcctgggtgacagagtgagactctgtctcaaaagaaaataaaatttagaaaatatacacagtggatgctgtggtattatgatactgattagttattgtttttcttatcttcccctctcaaaacaattctatagggttgtgctattattttttaataattaaatgattaacgcaaacccagatattgtgagttcaattcaggctactgtcagtagatctaccttttatccagccagtcagtcatcttataaatggttcaaatgagttaaaataaatggacatctcagctgggcacagtggctcacgcctggaataccaacattttgggaggctgaggtggaggatcacttgagctcaagagtttgagaccagcctgggcaacatagcaagactccatctctccaaaaaacaaaaacaaaaaagctaggcatcatggtactcacctgtagtcctggccacttgggaggctgaggtgggaggatggcttgaactcaggaattgaaggctacagtgacctgtgatcacactactgcacttcagcctgggccacagaatgagaccccatctctttaggtaattaaataaatacggcctttttgttatttccccaatagtaataatgtgtttattgctacctagtccaaaaagtatttacaatgattaggaaaaaaagatatagtaagaaaataaaaaggtgctattttagtgaaaagattaaagaaaagaaaaaacaatactgaagtggaaccaggaatgagactaatcaaaaacacatattccagaatctccaaacatgtggcaggtgggccatatgtgaatttcactgtttttttaaataacaaaaatgaaaagcacatctgatcaacacaatttatattgtccctgagattaaaaaaaagaaaacacaaatggccaggtgtggtggctcatgcctgtaatcccaacactttgagagggccaggcaggtggatcatgaggtcaagagatcgagatcatcctagccgatatggtgaaaccccgtctttactaaaaatacaaaaattagctgggcgtggtggcacatgcctgtagtcccagctaatctggaggctgaggcaggagaatcgcttgaacccgggatgcagagactccatctccgtctcaaacaaacacaaactcaaaataccatccaactatttagttctttagacagagctgtgaaattataagatcaggaataaatgtgtcttcagagccctcctacacgagatattstgtaatgggatgggcattttcagtagtcttctgtggacttggcagtcttgtctcagatatcacacccaagcccaattcagttgaggcaattctttttgaggtcagtaggacaaggtgtagagccctctgctggcctgagatagatttatctacataatctagggatagattttatttgatttgatttgatattgttttgttttgtttttgagacggtttcactgtgtcgcccaggctggagtacagtggtgcgatcacagctcactgcagcctcgacctccccccgggctcatgcattccttccgcctcagcctcaagtagctgggaccacaggagtgtgccaccacacttggctaatttttttatgtaaaatttttttttctgtagagatagtcttgctatctcgtcctggctggtctccatctcctgggctcaagtaatactcctgcctcggccttctgaagtgctggaattataggcgtgagccaccagcacacctgaccaggacagattttagagtggttataaagaaatcagtgagctgcatacttcgaggcaatttttatttttaatatttttttccccttcatgcaaactgtggcatcaggtgggagatagtactttatggaatatctgggatatagttaccatattttgctactttaatatgggtctgctggccttgatagacaattgagctggggcagtgctgatagtttcttattaagagaggaacttaaactcagattaattcccacacagatggacattctgtctctactcacagataagccaatcatggaatgagaatagcaacagttcctctcagacagtaataatctaggttctgcattaatatacagtccatccctggcgccgaccagaacccgtggacatggtgaaccaggttatcaagtgcaaggctgcagttgcctgggaggctggaaagcctctctccgtagaggagatagaggtggcacccctaaaggctcgtgaagtttgaatcaagatcattgccactgcagtttgccataccaatgcctataccctgagcagagctgatcctgagggttgttttccagtgatcttgggacatgaaggtgctggaattgtgggaagtgttggtgagggagttgctaagctgaaggcgggtgataactgtcatcccattttacatcccacagtgtggagaatgcaaattttgtctaaatcctaaaactaaccttgccagaatataagagtcactcaagggaaaggattagtgccagatggtaccagcagatttacttgcaaaggaaagacaattttacattacatgggaaccagcacattttctgaatgcacagttgtggctgatatctctgttgctaaaatagattctttagcacctttggataaagtctgccttctaggttgtggcatttcagctggttatggtgctgctgtgaacactgtcaaggtggggcctggctctgtttgggccgtctttggcctgggaggagttggattgacagttatcgtgggcggtaaagtggctggtgcatcccggatcattggtgtggacatccatcaagataaatttccaagggctaaagagtttggagccactgaatgtatgaaccgtcaggatttwagtcaacccatccaggaagtgctcattgagcggactgatggaggagtggactactcctttgaatgtattaggaatgtcaaggtcgtgagagcagcacttgaggcatgtcagcagggctggggcgtcagtgtggtggttggagyagctgcttcaggtcaagaaattgccactcatccattccagctggtaacaggtcgcacatggaaaggcactgcctttggagggtgaaagagtgtagaaagtgtcccaaagttggtatctgaatatgtgtctaaaaagataaaagttgatgaatttgtgactcacaatctgtcttttgatgaaattaacaaagcctttgaactgttgcattctggaaaaagcattcgaactgttgtgaagatttaattcaaaagagaaaaccagcgtccatcctgtcgtgatgtgatgggagcagcctaacaggcagagagaagcgcctcctagaccttcagcagctactccagagaatggtgtgatgtgcgtcattcatgaatctctgtaatcaaggcaaggataattcagtcatggactggactctcctccacataaataattgctagctcattaaggaatattttaacataataaaagtaatttctacaaaaaaaatacagactattggacaatgaaattttcttgcatatggaagaaccagaaaaaatgttgatctgaaatattttaaggtgggaaccaaaccctcatcttacctgtaaaaatctcagcgaagcactcttagaatgcctacctttgagcattgttattttctggtggacacactatgataaattatttgtggattatagctctgagttattttaggtgttgttatttataacctagtgaaaagatggggaaatagctgctaaaagtaacttttctctttcttaagctagcaggcctgtagcctactttacgccacttttaggttgtgtttttaaagtttctcatatgcctatggtagaaagtttgtatttgttttctttaataggaagatacaatgtcattccgcaaaagccaaaacagatctgaagaatttaaggatgtggagtggagtcatgaaaatgcatccctgctttaacccaaaaataaaactgtgatttgctctgttaaacaattcttatccatcctgaccttgtccttaatactcacagtatgttgattatttatacttgacattcctgagaaaacaagggaatgtaggatttggtaactggtagctagaaactcatataccctattcgggaaaataacacatttgtgaaatattacacatacacatacacacacacacacacagaaaaagacatttatggatggttgaggaaatatcacagggcaattgttaattgaatgcaaaactggttgacaaacagcacaaatgccaagaaaactcagtttgctcaactacttatagtcatgcaaagagcacagaaagatttagtgctggttaagtagagatgatgtgtaggtgagataatgattttcaattcctctgaaaaggatttttttaaagaaataaagtgtgactattgtaatcaaacatagatttttaaaattcaaaacaaatagtattcatggcatattacatttgaatatcaccatgtaattttcatagttcttttcacatatcatttactcttccctcatgcaagctcccccaaaaagacaagggacacatttttcctgatttactgatgagaatattgaggctccaaaaggtgatgaggtttgcttaggggggagcaatgaatatatcttaggaattttatctattccatgttttttctttaaatagttaattaccaataggtttagacataccagataacctgataccttcctttttccatatgatacccacaaagtttccttttggttccttggtaaacaaatgaagaaaatgagattagcagctacagcctctgcctatattgaccagccatctcttttatttatttttacttgataaatgtgttaattcagtaggcagccagtggcccttttttttgttttttgttttttgtttttttttagatggagtcttgctctgtcgtccaggctggagcacagtggcctgatcttggctcactgcaacctctgcctcccaggttcaaacaattctcccgcctcagctttccgagtagctgggactacaggcgcctgccaccacgctcagctaatttttgtatttttagtagaaaaggggtttcaacatgttggccaggctggtctcgaactcctgatctcaggtgatctgcccggcttggcctcccaaagtgctgggattacaggtgtgagccaccacgcccggcctcaagtggcttttatgtagtcatcatagcactgtccagagctaggggagatttacaagacctgtgtccacccttctcatcctgaagtcgtttgcagtcaatttgaggaaacatgatatacactcaggactaggggacaagccactgttttggatagtacaccattaagtgttgaaatgtggggtgacaggtgtgctgagttagctgtcccattcaggagtggcctttcagcagaggtgggtctgattcaggtgaaatgggacttcaactagattttttaatgattgattagactccttgagtgggtagagctggagaaggcattctagtggcatgaagcttggtttaggaaacaagaaatgaatctgggaaggaagatggtgggaatataggaacgttgaaatgatatttaagttgaagagttgggatttgattctgcagacacggaggaaccatggaagaaatctgttttgcttattttctgctagtggagctacgtgatgaatgggaggctttgagattactgttacagcccagtaatacattacagttctgaggtgtggttcaaagacagggggactgaccagatacttttgtttgtttatatgaggttttatagagtgcttttagcatgctttgtattttggtgaatgatgaaactcagtgagatagtttatccccttggttgttggtgctacctcttttatatggaaaaaactatgtctgaggctgttagtaggatgatggctctctaggcaaaagtctttttgtggttgatcatgatgccaggtctggagcctctcagtcactccagccctgcttctctccaccaactcccagaggagctggtaggccaagcatttttctaagcatgctatagatagcatattttacacatgaggaaccgaagctcaggcttagaagcatgctgttgtggccaatttggttctgctactctggaaaatattaggagggcaatggctgcaaagatttaagataggctgttttctggggctgtgtagaagaactgtagctaactgtagctaaaataggtatcattaccactaactggagggcggtgaaggatagagtggagagggcattacatttcagaaacttcttttctttctgtttttttgagacaaggtcttgctctgttgtccaggctagagtgcagaagcatagtcatcattcattacagcctcaaactcccaggctcaagtgatcctttcacttcagcctcctgagtagctaggaataaaagtgtgtgccaccatccctggctaattttttaaaaatttttaaatattctgtagaggtggggtctcactgtgttgcccaggctggtcttgagctcctgggctcaagcaatttacctgactttgcctcccaaagtgctgggattataggcgggagccacatgcctggctacagttcagttgttttcttaagccatcacagtatccatgttacctcttaagaactgacttgtcaattttatcatgtgctgctcttgaataagtgcatcttagctatccccaacagccttgcatttactgtttttaaaaaaattattaaaaaaattttaactgttgcaaaatacacagaacattaatttaccaccttaaccattttaagtgtccaattcagtgttgttatgtatattcacattgttgtgcaatcaacctccagaattttttcttcttgcaaaactgaaagtctgtacccgttacattgcaacaacttcctatcccccatctctccaatccgggcaaccaccatttgactttctgacaatatgaatttgacaatgttatgtacctcatatgggtagaatcatacggtattcgtctgtttgtagcaggcttatttcatttagccaaatgtcctccaggttcatccatgtggtagcatgtatcagagtttccttctatttaaaggctaaataatttcccagtttgtatatatatcacattttgtttatctgttcattcatggatggtcacttgggttgcttccacctttcggctgttgtgaacatgctgttatgaacataggtgtacagatgtttctttgagatcctgtttttaattctgtggcatatatatccagaagtgtaattgctggatcatatagtaattctatttttaattttttgaggaactgccatatattttccatagcaacagtatcattttacggtatcactaatagtacacaatgctttcaatttctccaatccttgccagcacttatgttctatcttgttgttgttgttttggatagggccttgctcttttgctgagctggagtgtagtggcgtgatcatggctcactgcagccttgacttccggggctcaagtgatcctcccaagtagctaggactacaggtgtgtgccactatacctggctaatttttatatttttgtagagatgaggttttgccatgttgcccaggctggtgctttattttgttgttgttgttgtttgtttgttttttaaatagccattctcttgggtgtgaggtgatttcattgtggttttgatttgcgtttccataatgattagtgatattgagcatcttttcatgtgcttgttgactattttgtgtatcttctttgaaacaatgtctattcaagtcctttgcccattttaaaatcaggttatttgctttttgttgttgacttgttaggagttctttctatattcaggatgttaaatccttatcagggttgatttgcaaatacttcctcccattttgtaggttgccttttcactctgattgtgtcctttgatgcacggaagttttaaattatgatatagttcagttcattgatttttaaaaaaatttttgttccttgtgcttttgttgtcatattcaagaactcattgccaaaaacagtgttaccaagtttttcctgtatgttttcgtctaagagttttgtagttttaggtcttatgtttcagtctttgttccattttgaatttttgtatatggggtaagaatttactgggttttaatgaaagcaaatctcaaatgaagttttgcccaacatgtaaacatttattaaacatacaacattagtttgcacaagagcctatccaagctgacttgagagtcagagcgtggccagcttgccactctggtaggtgcttgacctcaccttgtgtgaaaggtccatgtgatacaaacaccaaggaataggattctgtgaccgactgttggcaacaggcaaagagacatcctcctaaactagaggtgggaggtagcactctccggctgtcacaccttgacatcatcccttgcctgagttttatcctttttaagtgtggggatgttctctgatgttgtactcaatctacttacattgaattccttcaggttctccaatgatagctcattgtctaacattcattatgttaattaaagccactaatttcaccaatgaaaaactatttctgatattcagtatgctaaatagcgcagtttctggtgttggtcgagataggatagctggaagatacatgagtagctcaaatgcttagccaggtctgaaatgtggtcctttctgatccaacgctgaggctaaccccaggaatctgaattctcagttaggaccaatgactgtccctaaatgtaaagcttaaactaactggtctatacattgtatcttcctgttcatgctggagattattttatgaatttcttaatttgttaaatacagaaatagcaacatccatccgataactcatttactttgtagtctcgacccagtgattacagtggttttttgtttttcacttccaccatactgttcttctctttgctttacttgatgtggatcaaaggtattagggaaatacaaccagttaagaaaaatgtcacaaatatagggcatgcatatattgagcatatgcatcctaaaatggttgaacacattgttattctgaaatcctaatgagcagttttccaaggtgtttataggccatggagcaggcttccctgtgagatttgtagtttgtctcctggccctaggtatagtactagctgctttctcattctgtccag

SEQ ID NO: 93399 - DNA, 79579 bp, Homo sapiens
ggtgggtggaacacaaggtcaggagatcgagaccatcctggctaacacggtgaaaccctgtctctactaaaaatacaaaaaaaaaaaaaaaaaaaaagaaaaaattagctgggcatagtggcgggcgcctgtagtcccagctactccggaggctgggccagaagaatggcgtgaacccgggaggcagagcttgcagcgagccgagatcacgccactgcactccagcctgggcgacagagcaagactccgtctcaaaaaaaaaaaaaaaaaaagaaccaccagtggcccctgtaacactctgttctctcaggctcctgagcttgacctgatgacagacacagagtaagctgtcataaatatttgtatggtgaagaagtgcacggacacgttttttaacccctgtggctcctgagatcaggagtagcatcatatacattatgacatatgtgcagaccaagctgccttcagttaattatcaagatgtttcacctacattctctcctttgatcattacgaaagcgtgataggtgaggacgctattcttgatattcagagggtgaagtggaatactgaaagtcacaagcattgggtacagaaggcactgtaggatcagaaaggggagtgatccctttcctccccatcataagagtcacagccgacacttctataacaaaagacaagttaaccagagaaaagcataacaaatttatttaatcatggttttacttgagaggctgaggaccaggtgttaatcttcatagtctgtcgagaaagaaagaagaaatgagggcagtggaggaaaacacgattcacgtttttaggaaaatatactttgagattagtgatcgttggtactatgcaaaccaaatgcaaacgaggagctggccaactcatggtttcttttgggtggagcctttaggaaaattcttccagagaccactgctggaagaaaggtatttagagtagaaaatttaaatataacatattgtatgaaaggttttttttttttacttttttttctcactaccctagttgggttggaggatcctctatctcccctccctacttaggttgactgctgtttcctggatcgcagctcggaagatccacctgggcgaatacaaaaacaaacgagactccccttccagaaagggaggaaggaaggagacagaaagacgaatgacactgagcgtgtaaagcccggagacagcctctctctaccccaacctaaccctcaaggtaggggatcccccgaacatcgctaccgtaattatggtagaaattcctgaaacggataactggacctcagcaccgtcatttctagcagaatgattgagctttcctctgacccaaagccaaggggttccagcaggggaaactaacgaccatccgcaaaaaccctcacccaagtggggagtggaaatcctggctcttgggttgcagagcacaacttgacgccagcgcgtttctcttcccccacgcaatggcaagtggggcgggagtcggaggggagaggaggagaggagaagagaagaggagggggaaggggaggggagaggcgaaaggcggcccgggttccagcagccgccccgccctccggctcgcggcggattcggcgctgcggctggagcggcggccgggtgcctgcctgtccaggcagggtctggccgagcgtcgcgtcgccgtgcagtgcgccgggtgtccgggagatggcttcccctctctcgcccgctgctgccgctattgtctcacccggggtggcctgactctgcgagctcgcgcacgctctcggcggagagcacccctccccacccccacaagctggtccttgcgccctttgctgcctctccctctgccccttggagcctagggtctgtgcggagcctggagaggggagcggcccgggagcaggcggcgtgcggccggccagctcctctcgcgctggtgcaagaggcgcctggagccgcagagcgagcccgggaggcgcggagcgagcagcccacgtcgccaggcacaagacacgtcggatgttgcagcagagccagcagctagcgcaggtaggacacgcatcctgcgggttgcatcggccccagcgtctgtaaagtgcccccagagtggaggcagccgaggtcagggggctctccctccaacatggcaacagcggaggtgcaacaatggaagcagccgagggttcctggcggcgggctgagcggcggacgccgtgggagcctgagctcctgcccgccgggcagagcaggttgcccctcaccccactccactccactccagcagcttcagggcctctggggctccaggcacccgcgtccccacccccttctcgctaaacacacttcctggctcccagctgcagggcgatctgaaccagtcaatggctttggggtttgtttatttaagataagaaataaaaaaagcaaaacctgtcctgtgatggggttagtgccttctgtggactgggtgagaagtcggcatctagcctggggaatgtgtacgtttcttagtcgggcggagggtagaattggattctcccttataaggatactgcagcaaaaggagactgaaagcttgaaagagggagagggaccctcaggcctgagttcgccggtgctgggagaaggcgctgctctcctggcctatacttgtccctcattttcagctcccgacagcggtgactttgatgttggaggagcaatcgcagcaggaagcacaagcaaggctgccaagctggtgtggggtggagtagggtggggagcccaggggcttggcaggcttctggattgtgggaagaggttaccaaatgtatgaggttagtgcacacaccctagttggctgatgttgaagtgtgtgtgtgtgtgtgtgtgtgtgtgtgtgtgtgtgtgtgtgttctgccattgctcttgctccttcaggcctgccttttctccatctccacccgcttctggggtcttcgtagcttccctgccccagcccttccaatcatgcctgggatggaatcgctgtattgtctctggcagctctcttgggctgttttttctcaactctgttggagagttttgtaccctgggctggctggtcccagcatggcaccagattctttagcaggcggctacccgggctccaagaagtgggccaatgctgcccctcctccttgctctaaactacctatttgggatatggccaggcagatgtaagcaatttgtactaaattccaaccctgaatcagtgctgaatgaaaacttactctgttgctgcatcaggctttgggaagatattaggaagagaaatggcccaggaggtggcaatgccgacccccaaatacttccctctccccaactccagctgccgatcccagagcagacaggcagtgagactttggaatcccagctcctccagagtctggctggcccatcttgaggttgtgtccatggaaaaattaagtcgaggcacattttatagctctgcttggcagccagcatctgaagagatggtggctctgagctggagccctagacccaggctgtggctgcttctcctttggcctttgggtgagcctgaggtttgattgccatggctctgagcttactgctgagtgtgtatggctgaatctgatcaagctctcagacccggctgcttgtctatttccttctccactggaagcatgagtgagaaagggccaagggggtgtgctgggtgaggaagggtcagtttatctggggacttgggctgtttctgggggagctcctttggacttccttggtggtctggaatgcctttggtctttgtcatgacctagtatgctctggcagatactctataccctcgtgggcctttggtccccgcttggtggtgtccccactcctcctgtgcctggtgctttgcatctatatcatgtctgtggtgcttcagctgggatagccctggcctggaccagtgggtagaaaaatgaggtctctgttccttttaggggcttgtaactagctataaggttcaggctcctcatgttcccaggatgtgaacttggacatcataatgtgaagtagtagagaaaacagtgtcttggtgtgactttctttttagctatgtgagcacagacaatttgtggacctaagatttagtttgtatatttgtaaaatggaggtgggggagtagccatggctcacaggattaataatgaaatgctgcttaccaagaactaaacagaatcatgtgtgcaaaagtaccctgaaaactacagagtactttacaaatgattattcttactgggtttagcctcccacataagggagggagatctgtgagggatggggatagggtgggatctgagggccacatggagtagggaatgttttgggaccttttctttcttgctaaggaaagagtagtgtgacaataccaaggtaactgctgtattccttgggtatttttctttaaatagtgttggcaggatgggaactgggagagaaggaaaggatgcctcatgatatttgtaggaattgaggagggataaacaccttccaaaggctggctactgcctatagagaggataatgctgagctggcaagtaatgtaatcactaacactcactgatgtcagccagctagtaaatgatagaggtgggatttgaagcaagcagtctcactccttaccctgtgttcatagcctcagtgctactcagagagatattgggtcttgggagaacagaaagggacagcaaaattgtggagttcattctttttgtttgttcttgagacagggtctctccctgttgcctaggctggagtgcagtgggctcaagtgatccttcgacctcagtccccaccctgagtagcttggactataggcatgcaccactacatgtggctaattttttaagtttttgtagagatggggtctcagtatgttgcccaggctggtctcaaactcctggcctcaaaggaacctcctgccttggcctcccaaagggttaggattataggcatgagccactatgtccagcctcagaattcattttttttttttgagacagagtctcaccctgtcacccagactggagtgcagtggtgtcatctcagctccctgcaacctccgtctcccaggttcaagggattcttgtgcttcagcctcccgagtagctgggattataggcgtgtgccaccatgcctggctaattttttgtatttttagtagagacagggtttcaccatgttggccaggctggtctcgaactcctgacctcaggtgatccacctgcctcagcctcccaaagggccaggattacaggtgtgagtcaccatgtccagcctcagaattcattcttaatggattccttgaatgcccatgagacgtcaccagcctgggacatctcatgggcatgtaggcataataaatttttctgggcctcatctgcttttctatgcatttttatttctatgtctaccttccaaggaaggaagagatgtgggataatctgatcaagtcatattgctgccttctgagcaacactaatagaaggtttgggacttggaggatcctggggaaattaaggcagatttcttgttttggtattttcatatctgctttattttgcatctgttttataaaatgaaacttgagggactattcttgccttttttttttttctttttctgttgagacaggatttcactatgttgcctagactgatctcgaacttctggtctcaagtgatcctcccacctcggcctcccaaagtgttgggattacgggcatgagccacctctcccagcttgttcttgcattttgtaagatcacatagagtatcaaaactggaaaggacctgggccatcacttccctgagaaaaagtgactttctcaaggtcatgcagttagtagcaatgctggaactgaacgcctaccccgcagatcacaacatgacccgtgaaaggacctatcctgcaacactttggagtttcgtgccgacccaattagtggctttgtctttgggaaatttacttccccaaaacactggracattgggatggaattcactcaccccaaatcatcaccctggttaaggagactaaagaatcagaagacatttgtgctttggggagcagaggccctcagggtatagagaaggaagaagagagaggttcactgtagtcctgaagcagaaataagacctgtggctgaaggaagccttagcaattcactccttcctcttcctgagaactctctgtaggaagtctcacctagcagaggcttcacagtatttcagagaagccaaagattgtttgcctctttggaaactgttatccttccatcatgactgtgtcactcctgccactgttccaccatagaggtgggtgcctaatattagagagttgtttcacacacgtggctcattcctcaagcctcgctaagccaagcccaccaggaagaagcttgagtggaagcattctctccagccacatctttctctctttctctcatactagatggcgtcctttgcagcaaaccgtaagttataaggatgagggaagaagagtagagggccaaaaggattccattttgaggaaaaactacagtttgccttgccaggtagaagaatcaggtatgagttctttttgtctcaggtaataaactaagcaaagcccagatagtagtaatgatggagcccttcaactattgacgtctccctaagagccctcattttytgaaagcagagtgtttgtcccattcctgactcgccatgctgtgtgtctcccagagagtgaaagaaattgctgtgactgcgagcaccagtagagtggatttaattctcaccaagaaaagggaggtggtttgcaaatgggttgttttgggatcctgggagaggaacattgtagccagagatattagattttcactctagactttaaggaggcagatttttttttttttttaaattaaaagataggggccaggaatagtggcttatgctgtaatctcagcacttgggagactgacatgggatgatcacttgagccaaggagtttgagaccagcctgggcaacatagcaagaccttgtctctactaaaaataaaaataaaaacaattagggtgtgatggcgcacacttgtggtctcagctactcaggaggctgaagtgggaggatcttttgagcccaggagtttgaggctgcagtgagctataattgcaccactctgattgcatccaggtttcactstagcctgggtgacagagtgagaccctgtctctgaaaataataataataataaagagcttgtacaattaacttgagaggagccaaaatttgagtctaggtcaggaaacctctagaacctgtgttccttctgtgctatgctgaaggggactgtgagaaaaaaaatgttcatgaggctcgagtcctgaatgagatggagcttccccaagagccagtaatgacacaagtggttcttaaagtcatttytggaagacaataggatcacaagggtttaagtctatcagatcatgttaaaaaggaactcattcatttattcattaatttgactaacatcttgattgtttactagtgactttaggtacttttaagtcattgagtgggggaaatatgggttgccttgtgaactcatcagtggggcctttttgatggtcagacttcttggaggaaattaagtgtttgcagagatctgaacaatgagtaggaattggggcaggatggggaatggagtgtggtgaatgaggtgaactgaaagcagtttaatctcaccagagccactgaaggagtttgcattttatcttttgggcattcattccaccattgtacattgaatgtgcactgacactcttctacgtgcacagcagtgaagaggacaggtaaaacccttgcctagtgcttggtgttctgagaaaacttagttcactcatagttcttagtccactaagagtagttcactaagaattaaaccaagctttttaatgttactgacaggaattctatactgatagatagggaattacttggagagattctctagttgaatgcaaggaaagtttgagaaggactctcatgataatcctatagattatacagggtagagacaaaaggtgggttaatgattggttgattgttcattcagcaaaaacatcttcagtgcctcttctcattcattcttacatttattcactcatttatcaaatgactggcagtgcaagtttggcagatggttaagagcacggctttggagccagattacttgggttcaaagcctggctccaccacttacaagctgtatgaccttggaaaagttatttaacttatctgtgcatcactttcctcatacgtaagatgagggaaataataataccagacaaaatttgttgtaaaatgaaatgagttaattaatgaactacttagagcagtgcctgatgcatgtaaatggtgactcaacagctcatggttcttgtaattattattcctcaatagcaggtttgtgctaaattctaggaatacaaccttgaattgagtgtggtccctgaccttgagggaaccacattgcacccccctcccmcccaaaatgcaggtaaatggatgagtttcttcatggagtggggtaatcctataagctcaatatgaatcgattgtgataaggtgccccaagagttatatatatacagtcttaggcagcatttcccagcgtcttaatatatagtcttaggcagcatttcctagagattatagaaactagaactgtggtgtttattattttggagatctctaaacttaagaatctgataaatgctgtggggtgtctacttggaaaaatacattacaattttgccttcaaacagcctccaaacctctgatcctatgatgaggagctgttaactcttctcctctgggttggtcagaccacgctgagaacacagtattaacagttctgtactggagcatgtacttcgtgtaaaacattgtgctaagtatcctgggggagacaaagataaatacgaggtaatccatgcggtttaaaggcttagtggaaaagaatgttttgtatgtaatgagatgtttgtagatacatgttgaaatgataaaagtaagaatgttcatcttgagcaatggaacgagatttatctatacaaaaatttaaaaattagccagacatggtggtgtgcacctgtagtcctagctacttgagaggctgaggtgggaggatcacttgacctggggagtttgaggttacagtaagctatgattgcaccactgcactcyagcctgggcaacagagtgaaaccctgtctctttaaaaaacaaacatagaggctgggcgcagtggctcacgcctgtaccagcactttgggaggctgagaagggtgaatcacctgaggtcaggagttcaagaccagcctggctaacataatgaaaccctgtctctactgaaaatacaaagattaactgggcctggtggcatgtgcctgtaatcccagctactctggaggctgaggcaggataattgcttgaatccaggaggtggagattgcagtgagcggagattgtgccactgaactccagcctgggcagcagagcgagactccatctcaaaaacaaacaaaaaaccaaacaaaaaatgaaggatgttacttaaaagttgtgttggtaactgtgttaataaataaataagaggtaatctttttttgagatggaatctccctcagtcgtccaggctggagtgcaatggcgcaatctcgggtcattgcaacctctgtcctccaggatcaggcgattctcccacctctgcctcccaagtagctgggattacaggcacctgccttcatgcccggctactttttgtatttttgtagagatgaggtttcaccatgttggccaggccagtcttgaactccctacctcaggtgatccatctgcctcagcctcccaaaatgctggaattacaggcatgagccaccgtgcccagccatctttattcgttttttttttgttgtgttttgttttctttttttttttttttttgagactgagtctcactctgtcacccaggctggagtgcagtggcactatcccagctcactgcaacctccacctcccgggttcaagtgattctcctgcctcagcctcctgagtagctgggattactggcgcgcatcaccatgcccagctaactttatatatttagtagagacagggtttcaccatgttagccaggctgatctggaattcccgacctctggtgatccgcccgcctcgacctcccaaagtgctgggattacaggcgtgagccaccatggccagcattattcttaagattagtgggctaatgtctataaaagtgctttgtagctataaatacctatacaaataaaagctattatttttattctagtcactagtagggataatccaaagcagaatgcacataaatgcagtagagcacattacaaattataaaaatattcaaaagagcaaagtcacttttattcatggggggatgtgcaggcactgctcttatattacagccatcgcacatcccccatgaataaaagggtgcagtggctcacggctgtaatcctagcactttgggaggccggggcaggcagatcgcttgagtttgcaatcagcctaggcaacgtggtgaaaccccatctctaccaaaaagacaaaaaattagccagttgtggtggcgaccacgtctgtagtcccagcttctcaggaggctaggatgggagaagatcgcttgggcctgggaggtggaagttgcagtgagccaagatcctgccactscactgcagtctgggygacagagcaagaccctgtctcaaaaaaaaaaaaaaaggaagaatgacatgatcagagctgccctgtaggaagattatcctggcagtggagagcagatactttagggggtcagcaaggagacagactagttagtggtctgtttcaatcattcatcattcaggtgagaaaaaggaataataatttttttggtgcccaataaaataatttttcmggtaaaagaataatcattcaggtagaagaaaggaataacaaattttttggtgcccaatatatgctttatataggttatttcacttaaagtcatcagaggtttggaaaggaatggaccaatttaagagagattagaacaggaaggctgggggatttcctttcctgaaggattctaagaacgggagagatagctgggtgcagtggcttacccctgtaattccagccacttgtgaaaccggggtgggaggattgcttgagactgggaggtcaaggctgcagtgatccgtgatcacaccacttcactccaacctggatggcagagtgagaccttgtctcttaaaattaaaaaaaaaaaaaaaaagactggaagactggttatagctcagcctgggaagagcactggagagggagtctaaggacctggactcccacttctggtctcacctctatcactgaccagctatatgacttcacacagtgccccttgctcattggttctcttgtctaccaaactgtggggtgtgtttgtttgctttgcttgtttgtttatttttatgtttatttttttgagtggcctgggagagtgaaatgttctgggatgggggtgtggagagcatggaggtgttctagaataatcaccaacatcagcttaaacacttttttttttttgagacggagtctcgctttgtcgcccaggctggagtgcagtggcacgatcttggcttactgcaacttccacctcccagkttcaagcgattctcctgcctcagcctcccaaatagctgggaccacagacatgcgccaccatgcccagctaatttttagtatttttagtagrgacgggctttcactatgttggccaggatggtctcgatctcatgacctcgtgatccgcccaccttggcctcccaaagtgctggaattgagtgagccaccgcgcccggccatcagcttaaacacttaatcaaatgtgatgtgcctgggtttccacaacaggatgggaaaaagaccaygaagtttgggctcacacacatttcagtttaactcttgattttatcatttacaagttgtgtgacctttgggccaattattgcatccctttcctgttttctactttcctcttccataaaagaaggatgataacatccacatttaaggattgttgtgaggactaaataagacaatacctggcacaaaataccagagggggraaaaaaaggtatatttccttccttctatttctgtgatgctcatatgcatgtagtcttccctcctgtctccccacttctctgccttccttctctttccctttcaccagcacaaagtgtaacaccctcactcccgttgctacagtgggctgtactagtttcacagaccttgaaatggcacatacacgggaaaggtgtttcgacacagttcctatggactgttggtgccggatgcttacacggtcacaccctggtcgctcatccagcttaagcagtcagtgaatccctgctgagaatgacctctgactgttgctaccctgggagacactgggcgagggtcacatgggcaaggggctggtggaatgtgagcatgctatactgtgccagtggttcaccctttgcttagtgtagacttaggttctgtcttaaggacatctgtctctcttgggaccttcctgtgcaaactggggggataagagatcggagaaaggcatcagggcatgtacaaagcaacatcaaaactaattgacatgattctttgctytatacccctccccctcgctaaagtcactttcttttttcaaaatcttcatgacccataaccattccatgcacagagatgcaaaaatggtcagttaatatccaaagcaaaagcgttgctcttgttccccaggcgacagggccaccatttttatcagtgtgaaacacagagtatcagggtattaaggagacactgagaataaaagtgaggagatattggaaggcttaaccagggaaggcttctgaagatcgttttttttttttgagacagggttctctgtcacccaggctggagtgcagtgtctcaatcatggctcagttgagcctcctatttcagcctcccaagtagctgggactacaggtacatgccaccacacccagctaatttttgtgttttttgtaaagatggagtctatgtttcccaggctggcctcaaacttctgggctcaagcgatcgtcctgctttggcctcccaaaatgctgggaytgcagttgtgagccacygtgcctggcctttctgaggatcttgaattcggatggaagcaggagagagagaaagcaggaggaagagaaaggcacccccagtggtagccatggctttggggccctaagagtcaggtgcaaatggaaatagggatggggagtccataccacgctgtacgtgcaggtgagcagggctaaggggaaactgaaacctacggctgcaacatgtctaggggtgaccaggctgacatgggcagtccttctgggatcccctgtggtctggcaccatcaggaccactgccttcttcccattccccccatcgagatattcttcctgtggtttgaggattctgggacaccacaggcatcttggagaatatcttgtttctcagttcttttttttttttgagacagagtgcagtgcagtggcgcgatctcggctcactgcagcctctgcttcctgggttcaagagattcttctgcctcagcctcccaagtagctggtgttacaggcacccaccaccacaccagctaatttttgtatttttggtggagacggggtttcaccatgttgcccaggctggtctcgaactcctgacctcagtctgcccacctcggcctcccaaagtgctgggattacaggcatgagccactgcacccagccttcagttctctcttaaggcgttgcatcctgagtagggtttctcctttgacctggctaaagtagaatccttggtcttccggctgggttcagtgtccttgactgaccctggagcaggatatccttctggcctgctaccaggragaatggaggctcccagcttgggaactgcatggctgtaggcagaggaccgtggccacctggatcaacctgggctaagaatagccaaggccagggtttggaggggtcagtgccttaaaggggcaggctgcccagtgggcagcattgtggggactgtactctagaggggcaagaggttcctacactcaggagcagagaccagggggaggccatggagctatggggcctaacattagagagcaccccccccccccgtcttttcatggctcattcctccctgggaaaatagaagtcttaccatttccagggcctgttgggttgggtgctcccctccttagattctgctttttaatgcaaatggccctgggagggactaacaccttgacctctcacacccctgtgtaartgagtatcagatgtttaggggtgtttcatttttctgtttttctctggattgaaagactggaactgcttgaaaaccggtgtccctttcctttcctaccctggtctgtggggaccccacggcttctttacaccttcctgatttagggaatgaccggccaccctggggggcctgccagaaggcctgggggcatttgggagagggctcttgtgaagctcttctgcctgaggctccttctgtggcattctctttgcctgagtgccctcagcctgctggaacgcagagaacagcctgcttggggaagggccggagctgccccctggtgctgagagggcctgttttcctttttcttctgggtttaaccttttttctcagacttctttgccagtgacactaagaatgtgacctcggcgtggtggctcatgcctgtaatcccagcactttgggaggcccaggcaggtggatcatgaggtcaggagatcgagaccatcctggctaacatgatgaaaccccgtgtctactaaaaatacaaaaaattagctgggcatggtggcgggtgcctgtggttcaggaagctgaggcagagaattgcttcaacctgggaggcggaggttgcagtgaacggagatcacgccactgcactcagcctgggcgacagagcgagactatgtctcaaaaaaaaaaaaaaaaaaagaatgtgaccttatgggtctaggccagcttcctctcttctcttctgggagagctggtgagggagtgagtgagcaggagggtgtgtgtcgggggagagtagggtgtgtatggggagggtgtgaggggtatgggataagcatgggaggtgtgtggtgtgtatgtagcggggagacatagatgtgtgtgtggggtgcagggggaaaagtatgtggaggggttgggggttacacatggtttgtgtgatccctatggcttcaggcccccaagagtgactgtaatctattagggattgccttgatatttgaggagttagcattaactgaagatatcctgctttatcattagactctgagtctagcttgctggttgaggaacaccacgatggcacagggacagtgggctgggctgtgggcacgtggtggagagccttcctatcccaagggargaaagaagcatggcgcgggggctggtcggcgccttagccggttcccatgaatggctggctctgcctttttctgcttgacttcctttggcccttctcagagctgagcaggtggctgtcagctgccggcagcccaccacccacacagcctggccctgcccattggctcctgcacccaggcttacaggcagtcacccccatcctccccacagacagcaccaccacctgggagctgctggccctgcctcctctactcttatgtgtgtgatccttctgggtactggggctctggcatatctgtgctgagtgtatacttgcaggggagagcacagggctggggccaagagtgtttctgagtattcccaccatgccagcctcccttcatcgggtctacaatcttttcccaactctggaacagctccagtaggagagacagtacaaagtcacttagcctgagtggtcctccctctcatctgggacagaaaggaggaccctgtcttcaagaccagagagaaccttttggacatctgagaaaggtgctaccagaaagcaccctaacaatcattataattgaacaaattggagacgcttgctcaaaaagccagtgtcagcccagcaaggatgtcttccttctggaggatggtctcactggcattattcagtgctctctggtcagtccagtgcctctgcagttaccccgacgtacatcctcatccccttggaatggggctgggccctcgtttgaagtacgcctccacactgcctccttgctccttgcagacctggatgggttagccyggccccgccgagcccagtgcagaagacctgcggaggcagctcctctgccgtggcctctcctgtcctctctctgatgagccctccaggcagagcagagccttgttgttatgttgtttcctcactttggtgccctggctggatgggaacagctgggacttgctttatggactctgctgaacaggctggcatcctccagggagttttccccacccacacaggaatgaatcctgcagaactggattcccaagggcatgagctaaggaagctgaactgaggctggaggtgacagtggtgacaatctgggccttgcagaagacctcagtttataggaagcaaatgctgtatcgaggcaaagctgaggaggatggtagatgggggaggccaggcctaaagagagctactgtgtcttcgtctctaactccacccattttctgtgtcctctttcagaggacctttgtttatacttcacagcatctacagtattttcagagcgtttagggtttcctaggtgttgctttttggaaattctgtggttgtttttctgatacaggatgggctggtgtgaaagttgtgtgtaaagaagttccctcggtggtctcctcagctggaggccaaggttggtcaggggaggtcatcctgggaccttccctgtccccctacctttctctggaaggccaagaaagctggaggagtccctcataactaccatgcccttagagggaacctggggtgaactggatgagaaggattggttcttgggtgagggaagaggggaggaggaagcaggaagtaggaaccagacagagatgtggctgctctggctcctgggatgattcctgggttagaaatacacgtactgccaaagcttttcttccttctttgccaaatgttccattcagttgattgccagcttctggttcctgaccctgcaatcaaaattgccagctctagaggaaggaaagtttttagaggagccacaagctgcctcacctcttccatcctggtctcctcataacacagagcccacagtctacagggtatgtagcaggagctatgatctccaaggattctatgtgtgtgcatgagaccaaatggtttctgagctagaatcggggtctctgagttggagtcagcagtgcatgcagacctgactttatgtagctgtgtcccacaggctccaagcttctgtccctctgattgtctaggacccagaaagacttccactaaactcttgtgtgcactttggcttcaaattaatggagagtccagggtatggtatgcccagagagtagaataatggagagtaagtcctggtaggaaatgccagaccatgtgcggctgctttagtttagctatagaggtcactagagaggggatgtataagtgggaagaaaacacaagctgttattttgtcttctcacatttggaactagatgagaggcacccagagggcacgcacactagagaagagaaagaccttatggatgcatgtgattctgtaatagacctgccatcaaaaaagcttatagagctgtatacaacctgtgggttttccataaggaagcagggatcagatgcacatctgttggaggctgggggagccggcttgcttgaccttaatacacctccctgctgtaggagtcggattcctggcagtgtgttgatgttccctgttagagccgggctgtgggaggggcagttggagccagcggcatgtgtgtggagtgagatgcgaggcagggtccctggctgcaaaggaggtgggattgggggtatgggtgagtgtgggtgctgggggatggacagaagtggaggtcctctctgaagagaaaaacctggacaccaaagggtttaagtcctaatggcctctgactccctgaccctgcctgtccttaggggaagtgctgagggtcccttcctggggaagtcctagagctgagtctcttcccttagtaaaatctactgaaaatcaggatgcccaagactgggggcttgaaaccctgcatattcttcaccgccttgcttgagagctttccattttccctgcccactgaagatggtccaagacatgcagtaccttcttgcttcctgctttacaccccaagaggggattgaattctttatgtatgtgtctgccacctttgctagattgtaagctccctggaattgtgccatagtcatctgaatacttgtagtctttagatatgtatgtgcctggcctggcatgtagctggtactcaacaccctttgggatccaatctgtggctcagggtatggggaagagatgacccagacccctctagattctcccagtcccaaggagaacaattctgttagggtgccttccagcaagacagcaggaaccctcaccacccactggctccagtggtggcccctgggctcctccctctctggcacagggactaaacagagccagctccactggagggagtgccctctcctttctttccaycctttgactctgaaccattgtgtcactctgtcctgaccccatttcctccccggctagccctcagccatctgtgggcagctgtgagactgagtttggtgcctggtgcagctcagaccctggcaccgacctgcttggccataggcatgtcctcttgtttcttcagctgactggtgctttttggggtgcctctacccaggtcttcttgtcttcctgagagttctgaaaccctcttctgtggggtcaaacctggctgcacatttgaatcactttaggggctactgaagcatccagcatccagggactcaccctactgagtcagaacttccagaggagaggtcgggaatgtgtatatttttaaagcttcgcagatgacarttgcggtcactcaaatgtggagtgtgcattagataatattattgttgtcaatgttaagttttgtgggtgtgctcatggcattgtgttttacataggagaatgcccttgctcttagagattcaggctgaagtttttagaggcaaagtgtttcttacaaacactttgcaaagggcatcttacttttaaatggtaaagcagagcaagaaagagagcaaatgtggagaaatgttaacaattattgcaggcaggtggtgaaagaaaactggctgtaacagaccttctggacgatttccatctgttttctaagaggtggacattaggagagaacgcagcctgaaccaccaaggtgtataactccaggaggcaccattcacatggttttcatttttgtggtcgggggtatcattcacatagaatacaatgtgtggggtgccccctagagttgtgtgacatagtggcattggccccagccatctctccctggatgggctgcagagtagcagagacgcaggccctgatctacccttcctctttcaagggaccgacatggctatttgtttttatacagaatccctagtagcccttgaagactaagggaatggagcaatcttaatttaaatttwaatttaatttaatttaatttgagacagggtytctgtcactcagactggagtgcaatggcacgatcacggctcactgtagcctcaaactcccaggtccaaacgatccatccacttaacccttcccagtagctgggactataggtccatgccaccacacccagctaattttttttccccccatagggatggtcttgaaccctgggctcaagcaatccccccgcctcggcttcccaaagtccttgggattacagacatgagccaccacgcctggccctagagcaatttctaatgtagagcctgacagagagagaactgaattggggaagtggggaggcaggaaacatgaaaccctgattcctaaaatactttctgcgtgtcctctagtcctggaaaatgaaatctagggcttgaatttttagaggaagccaggtcgctgtgtttcaaggtcgctgggactggttgctcctgtgtttccatctctggagttccctcgtgtctggctgctgctctctgaaccttcgcttcaccttgggggtggccttcttggtcctgtgggggatgctgtttgtcccatttcctcactgccacctctcagcatcatagtgagctgagtgctgagcctttgggaggagcattgccagtgtggccctgggcrtgagatctgtcagaggggtgggcttccttccctgtgtggctgagacagtctagtggtggcctggcccagagccaggaggatggtggttagagaggggtagctcgcctttcctctgtctgaattccagtctgggaagagcttcaggaacagtgcctgcttggatcaccctgggacctttccttctctttcctgtgactttggagtcctctgagagatttgacctaaggaatcagtaggttggaatcaaggaatcccagagctggaagggactgtgtgtggttttcttgccatccttgcccctgccttacagatgccaatccaacctggttagttccaaaacccagtcctgtgtctgaaggatactaaggagcacaccacctacatcctgaccacccatctccatgtctgaaaattccccacctcccagaaggttctgccctgacattccagttcaagctcagtggaaatgatgggaatttggaacttgaggaacatagtaggggtgatggatccataaacatgtcaattttgaataaaatatcttaagcctgtgtttgagatatacactggttgctattgggagccaatagcaaatagcaaattggaacaatttgaaccaagtcacggaggtatcacatacgtggtcatgaatggttggaggtgagagggagagcagggcaggagagagtcttatagagaaatcagagagcctttgaaatatcttaggcaggaagcgaggtgatcagatttacattttaggaagagccctcaggatgttctgtgaaaaagccttgaagaggccaaggttagtagggggaaggactattaggaggccattgtaatagcccaaatgagagaagataagggcttgaattagggcaaccacagttaggatagaaggaaagattagctttgggaagtattaaggaggaaaaggtggcaggccttggcaattagagagaggggtgaaaggaagggggactctaggatgactgcaggatttttagcttgggggactgggtggtgccattcaccacaatggggaaccaggagcaaggagcagattgtggggaggaaagaagatgatagttgagttttggacatttggattttgagatatgagtgggcatgtaaacttgaaggagagatacatatttggaatcatcaacatgtgagtagtatggataggaaacaagaatagatgagattgcccaagcagagggggtagagttaacagtaagctgagaatagaatcctgagccaacaccaacatttcaggggtggacaaaggaagaggaagacaaagaaggaggagatggagaacaagaaaaaaatatcttcatgaaagccagcgggagagggtttaaggaagaagggaatggtttggagagccaaatacagcagcaatgtccaggcaggtggaaatggctacggaaatgggcagcccaggcattgttgctggagcagttttagtgggatgtggggggcagacaccagattacaatgagttaaagagtaaatgggaagggagaatttggaaacatcaggtgtagtccattctctggaagcttggctgagaatggaaggatgaacagagaggacaaaaagtcaaggggagccgggcacggtggctcacgcctgtaatcccagcactttggggggccgaggcgggcggatcacctgaggtcgggagttcgcgactagcctgaccaacatgatgaaactctgtctctactaaaaatacaaaattagctgcgcgtggtggcgcatgcctgcaatcccaactactcgggaggctgaggcaggagaatcgcttgaacccgggaggcggagcttgcggtgagccgagatcgcgccattgcactccagcttgggcagcaagagcgaaactccatctcaaaaaaaaaaaaaaaaaaaaagtcaaggggaggtgtttagggttcggagtttttcctttcttgttaagattaggtgaagcatgtttatgtgctgaagagaaaaaccatgttaaggagaagagattgaagatacaggagagggaagggaaatccatggagcattatcctagagatgaagtggatggggcaagagcagaagaggattgtgcctcagcaggaggcaggaatctgcttcccctgggccaaaaggaagaaagtgaagctgagtgcaagtatgcataagtgggtgttggaagagaggcttgaagttgaaaaagattatttccaatggcctgaattttccttctcacaatagtgcctgctaaggcaaatcttaatactctgcttgtcctagctcagcgctgaaaatacacagtcattctctggattaacatacttaagcccaatccaactttgagcatttatctggtatctcctatctataaggcactaggccctccttttcctgggactagtctcccagctccaggcagctaggttctggatatctccatctgcttatgctactcctttgaatttcaaatagcaagactccctcatacccactgtggataaaaagtgatctgtaaggagctgtggaaaggcagagaaattaagttaacagtgaactgctttagatactctgaggctgggcttgggccggtctgtccttggtgaactaattcctaagtgcaatagttgtcagattcactgagccagaacccttcagaccagggtcctgtgcctatacctgacagatgtaccagggtcctgggagggcaccccagggtaagggatacctttgacctaacttattttgaatctaagcaacttgccacccaagagtctatctgagcctttttcctattgatgttttcaacattctaatcatgaggtgtaatttcatgtttgttacctgttgggtgaagcagtacaatagaatgaacattttctgataatttttatgaaactgtcaacctcttggctgctgatgctaagagtcagaagtgactacttcacactggtctcccccaacctaatcacaaacacacattcatagatccacagttctgaggttgggctacacattagaatctcctggggagtttttaaaaaataccattaccctaccacagagcaattaaatcagaatctcttgagagtattcaggcttcagtactttgttttttttagacagagttttggtcttgttgcccaagctggagtgaaatgatgcactctcagctcactgcaacctccgcctcccgggttcaagtgattctcctgcctcagcctcctgagtagctgggattatagacgtgtgccaccacgcctggctaattttttgtatttttagtagaaacgaggtttcaccatgttagccaggctggtctcgaactcctgacctcaggtgatccgtccacctcagcctcccaaagtgctgggattataggcgtgacgaccgtatccggccgggcttcggtactttttaaaacttcccccagtcgggccgggtgcggtggctcacgcctgtaatcccagaactttgggaggccgagctgggtggatcacgaggtcaggagatcaagaccatcctggctaacacggtgaaaccccatctctactaaaaatacaacaaattagccgggtgtggtggcggctgcctgtagtcccagctactcgggaggctgaggcaggagaatggcatgaacctgggaggtggagcttgcagtgagccgagatcctgccactgcactccagcctgggcgacagagtgagactccgtctcaaaaaaaaaaaaaaaagttcccccagtgttgctaatgttgcagctggggttgagaaccactgggccagactgaccttgtcgttaccaccatttgttgaatgcttctcaactctgttcacgtcatggcttctagagaaaaggataccaccgctgaagtaagtggaagcactggcctggagatccagtgtggcttcctgagggctgggggaaaaaaaaatcaatattttggcacacctgtaagacatcaggtagccgggtctcacctgttggcaagctttgttttattttatatattggtgtattttgggaggatcctagtgcaagctgagtaattacaaggtccgtttcacagggttctcttgtacttttcatttatagttttattgaggtgtaattgacatataataaaatacacagattgaaagtgtgtaatttgataagttttgacatgtgagaataccagtgaagccatcatgtgagaataccagtgaagccatcatgtgagaataccagtgaagccatcatgtgagaataccagtgaagccatcatgtgagaataccagtgaagccatcatgtgagaataccagtgaagccatcatgtgagaataccagtgaagccatcatgtgagaataccagtgaagccatcatgtgagaataccagtgaagccatcatgtgagaataccagtgaagccatcatgtgagaataccagtgaagccatcatgtgagaataccagtgaagccatcatgtgagaataccagtgaagccatcatgtgagaataccagtgaagccatcatgtgagaataccagtgaagccatcatgtgagaataccagtgaagccatcatgtgagaataccagtgaagccatcatgtgagaataccagtgaagccatgaccacaatcaagataatgaacatattcatcacctccaaaggttcccttgtgtcccgttgtaatccacccctctttccactctgtcccccagataccgctgatctgctttctgtcattatagatcagtttgcattttccagaattttatataaatggaatcatatgtactcatactgttttgtctggcatcttttactcagcaaagctattttaagattagccttgttattgcatttgtcaataattcattcctttttattgccaagtagtattcaattgtatagacatcacatttttaaaaatccattcactgttgatggacattttgggatattacaaataaagctgctgtggatattcatgaacaagtctttgtgtagacataygcttttattttccttggataagtaggagtgatagttgaatcctgtgttaggtgtatgttgacctttttaagaacctgcctgttttccaaagtggttgtaccattttacattccccaccagtagtgtatgagagctgtcctcttcaaattgactggagaagctttgcttccatctcttcttcttggctaatagaaggtgcctcttggctgggcgtggtagctcacgcctgtaatcccaacactttgggaggcctaggcgggtggatcacctgaggtcaagagttcgaaaccagcctggccaacatgacaaaaccctgtctctactaaaaatacaaaaattagccgggcgcagtggtgggcgcctgtaatcccagctactagggaggctgaggcaggagaatcacttgaacctgggaggtggaggttgcagtgagccgagatcgcaccattgcattccagcctgggtgacacagcgagactccatctcaaaaaaaaaaaaaaaaaggtgcctctctctctttttggggcacaaatgacagaggtgagtatagggattagggcgcagagatgaggcatgtagagatgaatggatggatagttggrtataataaataggtaaagttgtcttggtatcccttttttcctccatcttcctgtacattccattagttgtacacaacraagaagcaggcactggcccagataatatcacctaaattggattattatggatgattagtaaatctctctttgtgactgattgatatttttacccctcacctgcaggcgcccagacaccatgtcacaaccctccagaactgacgttggcaggaagtagagacttygttgcctgtgtcccccatcctcaccatgtcttcgactcagggcaatggggaacactggaagtccctggagtcagtgggcatcagccgcaaagagctagcgatggccgaagccctgcagatggagtatgatgccctgtcccggctccggcatgacaaggaggagaacagagccaagcagaacgcagacccctctctcatcagctgggatgagcctggggtagacttttacagcaagccagcaggaaggcggaccgacctcaagctgttacgcggtctctctggctctgatcctacccttaactacaactcactmtccccacaggaagggccgcccaaccactctacctcccaagggccacagcctggctcagatccctggcccaaaggctccctgtctggagactatctctacatttttgatggttcagatgggggagtctcttcgtccccaggaccaggggacatagagggctcttgcaagaaactatccccacctcctctgcctccccgagcttctatctgggatacccctcccctgcctcccagaaaggggtccccctcatcctccaagatctcccagcccagtgacatcaacactttctctttggtcgaacaattgccrggcaaactgctagagcatcggatcctagaagaggaagaggtgctgggaggtgggggtcaggggcgcctactggggtctgtggactatgatggtatcaatgatgcaattactaggctcaacttgaaatcgacctatgatgcggagatgttgcgggatgccaccaggggctggaaggaggrccgagggccgctggacttcagcaaagacacctctggaaaacmcgtggccaggagcaagactatgccccctcaggtgcccccccgcacctatgcctcccgctatggcaaccgaaagaatgcgacgcctggcaagaaccgccggatttctgcagccccggtgaggaccttcttgtgtttcttctgccttcctttctccatgtccttcagaaacagggactagtctctgctgttctacatccaactctgccaagtccttacccctttaggcctctcctaccctctttgggaccctggccctggtgrgggaggtccaggggaggcttgattaggggtggacaccagtagagggagggctccttctcagggccaggtttcatgtatcttggccaaaacggsccttctggggcaggcatttgggaatcctggttcctagcgtgtgcctgcttcctgatgtaaggactgaattgggagttatgggattcattattgactggctgaatggccctctggaccggagcaagttgcttccgcttgctctgaggccctgctctgccaaaaacgctgcgtggcgatgaagatcattcacaatagtaaccacttgtttagtgcccactgaatgccagaccctggtccagatctccacaacaacccttcctgatagtccaaagccacacagcaagcaatagcagggccagcattcagccctggcctctctcgttcctaagccttctstctcctcctctccttctccctttctctctctctctctccctgctctgttctttattgtgataaaatatacgtaacgtaaaattcgccaccgtaaccatttggaagtgtgcagtcagtggcactgacgacattcacattgtcgtgcaacccttgcattattcatctctactcattctcttctcacaatgaaaatatttagaaaaaatatgcagtatgacaaatagttttatttttatcagtacatagtgtaaaatagcgaactatctaggtcaaagcccccaggcaggtgccagggcagctctgatcttttttctggtttaggggagcttcagcagcatctcctgggtaggaccagaaggcctatttgtgtttcatccttggtccctggaaaccctggctgcaaggagtcaagagacaagtgacacccccatggctgatgccttcttttttttttttttttttttttttttgagacrgagtctcgctctgtcaccaggctttagtgcagtggcgctatcttggctcactgcagcctctgcctcccgggttcaagagattctcctgcctcagcctcccaagtagctgggattacaggcacctgccaccatgcccagctaatttttgtatttttagtagagacggggtttcaccacattggccaggctggtcttgaactcctgacctcaggtgatctgtccactttggcctcccaaagttctgggattacaggtgtaagccaatgcccctggctgctgatgccttctgtgacagcttagcattctacttcattcygtcctggtttcctccttagccattgtttaaggggcactggggttttcccaccttgtgtctagcctttgggaaccttcccaactctgaagagctacacagttcttccttcctccgcttctsctaagagagtccccccaaaagcagaatcagctcctgggataagccacatccctagagctcagggatttttaaaggccctgctctgagaggtggggctgttcccgctatttatagggactgggagattcctgttcccagctctgagttcctcacacccagctgggcctgctcactgagtcagggcaccctggtaggtggtcacctctgtcactccttctctctcctgcctcccctactccctcacccttccccatcccctgcatgtcatcagagttctgagacagagctcagcccagaatctccttgaagaagcggacacaaagcaaaaagctcttgccagttctgagtggggaaatgcggccttggtcctccccggctcagcttgttgcaggggctcagcctgctgggaggggggaccccttgggccctcggcctataccaccgccccgctttcgtcgggcttccagccagagggaacctccttatcccaggccagcggagccagctctggaactggctggctccaaatgccagcctgatacccctgctgccagcctctgcccggcagactcccccagccagcatcgggtgatgccaccagggcctgccagctgggcaaacgtaagtggcttttgttttcttatggtgccagtgagtggtacagaaaggacatgagagtggccttcagtgaccactctgttctctccctctcttgccttctcttccctccccccactgtctctctctctttctctttttcttcctctctctctcctttctcttgtgggttaattgctgacagtggtgctattgttttgactgggacacaggcacgaacttggcagagccagggcctcacatgccaactgtccccactgctgccctcccctctgtgcacccccaccccccgccgcccatgcacacccaggggagcaagcctaacaagagagggtcaaccagaggaaacagtctggatattcaaatgaggagctcagttgctgtcatctgccccaagaggcagagaggacttgagagtagccaagaggttgggtgagagatgtgaggcgttgctatgtgcacaggccggagctagactcccsccagaaacagctgttggaaccacatgccggccttatctccatctgagctgaagcctcgtccctggtgtggcctcccaggctgccctgagcagacccctcaggcagaaacctgtcatgcaccagctctccctccccctcacttccttctccctagggctgggctacaggccttgctaggggcttctttaggaaccctcctgggtgactgaaagcagctctgggatgggagaccgtttgggaccttgtctgagaatcctaccaccacacacgtattttgagagaggaagtggggccaaggcaggctccctgacattccggccgttcagagccggctgactcggaagccagaggagccaagcttctaccaggtcctcccctgcccagaccactgctttgacgctttcttcctcaaatagcatttacccagaaggcacatgtgtctgagtcatctcctctatctaagggttctgggtctctctctgctttgggtccatggggcttgtggatattgaggctttagaccagggccaagcttccctgggcaccatttgggccgcccacctgctctagcctcagtagaggggctgggaaaaacagctgtctgctctgctccctgtcacgcctctgggagaatcccccggaaagcccgtgttgcaggagaggcccaacagcactggattgccttactggctgcctcacgcttatcagactgtcccctcctgaagtggctttggccacactcttgtccatctcagccagagcttcgcctccttcttcaacttggctcctggtctcctaggacagcagatacatgtattcccggatgtcccatatgttcttgtgcccctttcattggatgtcgagtgactagaaagtcttttcatctagagtttgagtttaggtctggagtacctcatagggaggggacaccacgaggaaaaaggcactgagtcgtctgctcttctcttaaaggtgggctcccggccccacactgttgccaatggccatgagttgtttgaggtctcagaagagagagatgaggaggttgctgcattttgccacatgctggatatgtaagagttaaagaatggggtgggatttgggagggctatgggggatggggaggggggccatccatttccraactttctttaggagggaagaagcaccataataagtaaatctcagttcatagctatgaaaatgcttcctacaacaagtgtctgcagggtttttgaaatcttagaagtctcacatttttagcaaaattcatgaaacctccattgaatggtcaaagtatcctgatcactctagagtctgaccctcagttgcccttaagagcaaatgcaccccagctggcgataagagtgttatctggaactaaaagagaaaggaaatggattcataaaaaattttccattaaacttagcatggaaagctttgtcattttagaactatttgtactgttcaatggtgggaaacattttgcaattataagagaagtgtcaagaagggggtttctcagagctgctaccccactgcccccatcctggcctgcaaatttggagggctgggctgagtggggacagaggggctcttgagcctcagagcatgaggttcccaacagatgtcttcttgactactctcttctaaaggcacagtgagggttttttttcttcctgtacagccttcratctggctctgacatccaagactacttcctcactggctatgtctggagtgctgtcacccctagcccagagcacctcggggatgaggtcaacctgaaggtgactgtgttgtgtgacaggcttcaagaggcactcactttcacctgcaactgtaagttagtgaggggggagaggatgtgagcatcccttgaagtggggtggggatgactgtgttttggactcgatttccacctcatcttgtggcccagatgaagggcagtgaggatgctcctttgggggtgaggggctggctatggggccagcattctagtacagtcactttcctcaactctgaactacttgcctgctttatctggttggtgatggtgctggagaatacttagctggaaagggggatcagggtggggaaactgagacccatctgccttgacatccatcatgattgctccccctaccttacccttcacaggttcctccactgtagacttgcttatctaccagaccctgtgctacacccatgatgacctgaggaatgtggacgtgggtgactttgtgctaaagccctgcgggctggaggagttcctgcagaagtgagtgaatgggtgggaggtagcccctgccttcctggtagtaagaktgtgagggggcttcatgggattggtgctgggaccggcctggcagctccgccccaatcccacagtcaagactcctgctttctgggcacactctyggccacgtagcactttccccaggagctctgtcttccagcagggttggctgacgtcctgagccaagtctgctgtggaaagagcttggagctgggattaggcaaagactaggtcatatctgcttgcagattctgcttatggagagatgtgtgtatttgtggggaggggtgggcttggggagactatatgggtagtgctgtatctcctgctctagattatgtgtggtgtttttatggctggggcaaaatgaggactgggcagaagttcccttgtggagcccaggggagaaattacaattactgtctctccccattctcctgccaacaagtcttttccccagctggcccgtgcagctagttatcctcctcccaaaggcgtgcctccagctcctctccatccagtgccctctctggaaagcagcctccctggaaagtctgatgtggaccagctgaggcaaccccctttccactaccctgggctctggagggctgcagtggaagagaggcaggggcaaggttatcacttctcagatggtacagctgtgtgacagcagacagataagatctgctttcctctcttaggcttcagagcygctcctgcccccagtctctgtccacttggaggaagcacgttttgggaatagagaaaggagagacctgtgtctcacttcttaggagtgccctataagtgccactgcttgctttttctctctcttacattcaggtctagatgcaaggatggttgatctatgtctagagcataagatttggcagtcaggatggaagattcatttctggacttctttctttttttgagacagagtctcactctgtcgtgcaggctggagtgctgtggcgccatctcactcagctcactgcaacctccgtctcccaggctcaagcgattctcatgcctcagcctcctgagtggctgggattacaggcataagcaccaccacgcccggctaatttttgtattttttaatagagactgggtttcaccatgttggccaggctggtctcgaactcctgacctcgggtgatctgcccgccttggcctcccaaagtgctgggattacaggtgtgagccactgtgcccagctatctgggcttatttcaaatttaaggatattgtggggtcctttctggcctctgcctcctcatctcgaagctaagggaaaggaaagaggcagggttctgtatggtacaactccagggtacccttcaaatgtgccccacctttaaactcacttatgtacacacttttcccctagaggaacaggaggggtcctagactcagggttgcctggcagagagagtgccaggtggcctgccactgttagaagggaaaaaggggacatagtggataagttggagctcctgctgacgccattacacaggtttgaattcggacttgccacttactagttgtgaaggctgattgatgctcagggccctctgtaagctgcagtgagggtgaaatgtgagaatgacctgtgagcaatcagtaaataccagcagggaaggagcagcccacggagagaagtcctagggctctgggctgcacagatactgccatttcccttgcagcaccccaaatcctggagcccctgggtccggaggtagtgggagctgtcaagttctaccttcctgctaagactcaggtgaaatattcttagtgaggtgggacagggtcagcggtcctcagatcacacccctcatactctcacttgaatgcacagagaggaaggccttccacagagaagatcaagcaagtccccaggggacctgtgtgcatgactcctggcctaggagccccactcccacccaacagaaaagcacaatgctgtctcctggcccagcccccagacccccaacacatgacaactgcctgggatgggggtggaaaggacgctccgggggttccagaaatctgctagttcccaaggaagccctgagattttctacccctgcctggcaggaggggctgatactgagggggtgagtgggttcaggatgcaggctgctctcagataagaaccttgaggcagtcccgtgggagggttgggtttcctgccacctcccccagccccaccacactcttccttcctcccaggctctcccaccaggcccagccccacagcccagcctcaccacctccaggttttggctgcacttcagtcttagatctgagagggtctagatcggagatttggtcctctcaggatgtggagaacccctcactcgagccctcatgggacctagacgaccctgggccctgcacctccgccagcttttacatatactgccccccttatgctcctgtcctctcctctccatttctggcctagattcccagctctgctgaggaaggaagtccttttccggcttctgttacccagctgctgaggccaggcccaggcctgcagtgctggcctggaggtagttctccctctgcccctcctcttgggtttccttgctgttgaaggtgtgatttgggagagaggaagaggttggatcgccgagggctcctaggccttmtctctgaaagggggagtctcacacatgggtgcttgagcaggtgggactggcatgcatttgggacttttcaagaagtcatagaaatttgtaaggttattcacaagcaggcagggccaacagatggaaggcagaaaaagaagttgggtggggacactgatctggaggcttggtaggcttgccccaagtttttttggcctcagcaccctagttggtagcattggaagaggggtctctcgctgagctcccaccctggagcctgagcacaggyggactccaacatgtctcttcctggttgtcccctatacagaggcccagaagatagggcttcagcaactgctccctgtgatgtgcctctgtttccccgctctctccaacagttcccagccctggagtgaaccagtgattaccacacgggtaataaatatctaagagagtcaatatttataccggccaaggattaagtatattaggtggcttttgtttagatagacctctgttccttctcctaagctctaccgtgtcattttctaggagccaaagtagggtacaacacgggtactacccccttacctaaaccttctttctgtatgtctctccccaaggctaaggtatgtatctcccttsccactgagtccccaggatgctaatggtcttgtccctytaccctaccagcaagcatgccttgggcagtcatgagtacatccartactgccgcaagtttgacattgacattcggctacagctgatggagcagaaggttgtgcgcagtgacctggcccggacggttcgtgtgagggtggtggaggrttgcccagggctggggaggtggaatgggaatacaatatagaacacatcakgtgggaggggggtaggagtgctgagctgagataagggcaccgcccctctctgaataggtcacttcttatacaggtgaatgatgaccagagcccctccaccttgaactacctcgtccatctccaagagaggcctgtcaagcagaccatcagcaggtgagtgtgggcaccatcttggatgtgctccaaacaagaactgtgcagggatcccatcagatgtgcctgcttgcctttctgtcagggctaagggattcttgcaggtgtcaggggttggggcccacacatcttatcagagaagatccccactccaggcatgtttcatytcttccctctggaactttgccatcattctctccaggcgagaagtggcagaatagaaagactctccctccwtmagtcttcacaggacatatagaaagagtgggaastcctttaaatcagagtgtgagctgaggagagggagggagaaaatsggtttcccagggcactgggtctttcatgacctctcctgtggtttttccctgcccccaactcccaggcaggccctgagtcttctgttcgacacttaccacaatgaggtggatgccttcctgctggctgatgtgagtacgaatccaggggctggccctgctgcccgaaagctcctcctctccccttcctcagtcctcctgggatcacccagcactatgaggrgtctgggtggagcctgaaaatctgttggcagagcacttctttttaacccctcgctcatgggcaaactaagactactagatgttgggcaacggcaagtgcgtagtcagggattctgctcctctatagaagaagcaggtcggaaactgcatgctggtcccattctctggaataggatgtctccagagctaaggaacctagagctgtcaccccccagctgctgcacttgatgtacactggagcatgcatcctatgagcaatgtcagaaacctccagtttgagaggttctgttttgctgttatcgcaggtaggaaaccatcaggaggtagaaggtttcacatgtagggagggccagagccctccccacttggattcatgcggagtctcaagcctcaaaaccatgagagtcaacatttgtcttaaatgtcacaacgccaaagaaaatctgacagtgatcttcaaaaayaatcccttgctgagtgtgatggcccacgcctgtaatcctaaccctttgggaaactgaggtgggagaattgcttgaaccccaaagttcaaggccagcctgggcaacacagcaagaccccatctctacaaaaaatacaaaagttagccaggtatggtggcacacacctgtagccccagctactctggaggctgaggtgggaggatcgcttgagcccaggagtttggggctgkagtgagctatgatcacaccattgcactccagcctgcgtgacagagtgagaccctatctcaaaaaacaaaacaaaaaccaatccctgtctcattgatccagttaatagtagtcataaacgcttcctttttgaggggttcagcattatgtctagtcactgccagaatcccttctccagcagcctgtgcttgaacatttccagtgatgcgggggaagctctctgaacacctgtgctgtgctgktctggccctttgctagtggctacgatgggtagagaagtgtaagaatygtcatagccttggccaggtgcggtggctcacgcctgtaatcccagcactttgggaggctgaggtgggcgggtcacctgaggtcaggagttcgagaccagcctggccaacatggtgaagccccatctctactaaaaatacaaaaattaactgggtgtggttgcaggcgcctgtaatcccagctattcaggaggctgaagcaagagaattgcttgaacccgggaggcagaggttgcagtgagccgagatcgcgccattgcactctagcctgggtgacagagcaagactccgtctcaaaaaaaaaaaaaaaaattgtcrtagcctttggggagcttgtgttcttgttagaaaaattgaatagtaacacaaagctattagtagacagaacaggatggtaataaattaattaagggctcctggaggatgctagaggaaggggattggccagggagggctttatgcaggaggtagaattttagctgctctgtgatttaaatgtacataggtaatcagagctggacaggtgagggaattccaggagcataattccagaggggaggttatggctgtggcatgtctgtagaaatgagatgagatctgtctggaaattctacaggtctctgggagagaccctgtatatatgtgtatagtataagtagactaactatagagagaggctagagataggaggagcttcaaggggaacggctgaaagaattggggcatgtgggcatggcccattgaattcagtgggagagattatttgctgatgatgaatatttgaaaataaaatgtrttgsacatttacccctgaggatcatgaatctstctactcttcccaaccctttcctttaaagactggggtggggaggggttggagaccaagagcatgagagcagagcctgccagcctcactgtgccacctcccacagggagacttcccactgaaggctgacagggtggtccagtccgtcaaggccatctgcaacgccctggccgccgtggaaacccctgagatcaccagtgctctcaaccagctgcccccctgcccctcccgcatgcagcctaaaattcagaaggtaaaggggcccagggtgctagcaggggaaaggaagagagggatactgtcaggtaactgagttgcctgttgctagrgtgtgtaggtgttcactcactaaaaaggggcttctctccacctccatcttttatgtttaaggaattcaaccgcaagagctcttcagaaatggatgccaagtgtgtctcctcttcctgaggttgagggagagctacctgggactgcttgttgagagcccaggccagtaaaggctttattcacagtcaccaaggcattgcctgacagtctgcatatccatcagggtgcaaaaacaaaccaggaggaaaatctctctagagccaggggctccaggactccagcaggggctgtgtgctctgcagacagggccagcaccataggcactgtgatctgcagccgagtagcctgagggttgggatatctcagaagggtggacccgatgattgctatcctccgtcagctcactctrtccatcatacagatctggtacaaaccattactctctcctctctggggattctcagctactcacatttcagcccattcyggtccagatgagcgcagctgtgaaaagcccttcttccagctgtgacgaaaaaggctatggccctgaagctcccctccctcttctttttcccaacaggatcccagtgtcttggctgtgagggaaaaccgaggtaagggaactgctctccatcttcatccagtcgggctgccgaaaactgcagtctctgccccgattcctttttctgcctgggccccttgatttatgtgtcggagttcggctggkgtgtgtgtgtgtgtgkgtgtgtgtgtgtgtgtgtgtgtgtgtgttcctatatgaggtgtggatacagctggagagcacatttctttccacaaagtgttttcttattatttttcctagtcattcctcctggtgtccctgggagatgatgatgagggggtagaagtgtgggagtggggtggtggggcagcactagccctgtgatccagatgggaagcctcccacttgggtagattgtgattattctcccaacagctcacacttgctacctttccgatttagagtgggccttgggagaggatgagaaagaattttccctacgatttttctaggattcccctgttgtgcccttcaagctgaactttgccctaagactgacctatatccctgggattcctttgttttggttttgttttttgttttggcatccctgggattcttatggtgattcccagtcttttggatttcatagaccagtaaaatgtcccccaaagtatttgggggaccaagagagaattggcagccttttacttggccaaacttttttgacttttgcttttttgaagcaactgacaataattattaacrctgtttcctaaaagaaaggacattttaatrctaagtagcaatacgtaaaaataaggattatgtttaacattgtataactgtcattttatgaaaagctcatgacatgcttctgcttttttctcattttaccgcagatgggtgaactttgtcacagctattagagactgactagcatttggggaccactgtcttaggccatcccattctagccaatgccatggcaacaaggtagggcttgtggaggcctcatgactttcccttctgaccccttcccttcccagagaaggtcgtggaagccctgaccgctgccatcttggacctggtggagctgtactgcaacacattcaacgcagacttccagacggcagtgcccgggagccgcaagcatgacctggtccaggaggcctgccatttcgccaggtccctggccttyactgtctatgccacccaccgcatccccatcatctgggctaccaggtgagcccagggctgagtagccgctagggagcaagctgagtttgacctccaccagggctttttcctatctgcatgtaataccactgtcctaagtcttaggatgtgtggcattgtgtgacattgtggtgcaatggggctgcgggggtgagccaagtgcctgaggaggacttgggctggggacatcctagaggagagaggaggtcccttaggagatgaagaagatcctgttattccctcttggtgctggctgcctctgcatccctgccccctccagatccaagaccagtggaaggagacatggcaacagatggccgattcccagatagagtgcacgctccctggccagtgggagggggtggggaggtgggattgaccctttgtctggggttctctaggcctgcaggggtgggtggaggaggatgttcttttggtaaaatcctcagcgcctctgttgggtccccagcatccaaggcctgagggaataggcactgggccctaccccgcccctgccggtcccctttccccaacccccttccccttctctctttgttcctyacttaatgtattcctctgggcgattggcagagaacaaaggaggcagcctgggaaaccggggccttctctgacctcttctgtcaggcacctgtcatgagccacagggacccccgtgtgttggcattcatgtcggcatatgtcgtcttcctcccccacccttctcacttgcgcatgcacgtgcacgcgcacacacgcaygcacacacagacgctccatgggctggagctttctataaagaggctgggtggccagttcccattaaaggaagaaaaacaacaaggctcagaatggagcctaaaaccgagcagaggaatctagattgagttgctttggcctgagcacatttccttacatccagtttggctgtcctatccggagatcctgtgttacagccctcagagactgagagttttaccaggggaaatggattttggccttagagggacgcataggtttgggtgattggttttgggagctgggtgtcctgacctgctccctttcttttatagctatgaagatttctacctctcctgctccctcagccatggcggcaaggagctgtgcagccccctgcagacccgaagagctcacttctccaagtacctcttccacctcatcgtctgggaccagcagtaagcccttcccccaggcttcagtgcccaggccactgtagacctgctcagcctctgaaatatccctggggccagataactagtccaggactaatgataaaaccaggctccttgttaaccctaactggacaagtcattcaacctcttgagtctccacttccctgactctttttttttttttttttttgagaggcagcctcgctttgttgcccaagctggagtgcagtggtgcgatctcggctcactgcaagctctgcctcctgggttcacgccattcttctgtctcagcctcccgagtagctgggactacaggcgcccgccaccacgcccagctaattttttgtctttttagcagagatggggtttccatgtgttagctaggatagtctcgatctcctgacctcgtgatctgcccgcctcggcctcccagagtgctgggattacaggcgtgagccaccacgcctggcctccacttccctgactcttaaaggagccaagtataattaccacttctcaagttgtcatgaggatccaatgagaagtatctataaaggctctttgtaaaccataaaaaacatataaattttagttgttgaccaggcgcggtggcttatgcttgtaatcccagcgctttgggaggccgaggcgggcggatcacctgaggcagggagttcaagaccagcctgaccaacatggagaaacctcgtctctactaaaaaaaatacaaaatagccgggcatggtggygcatgcctgtaatcccagctactagggaggctgaggcaggagaatcgcttgaacccgggaggtggaggttgtagtgagctgagatcgtgccattgcactccagcctgggcaacaagagcgaaattctgtctcaaaaaaaaaaaaaattaaatgttagttgttaattttaataatactttattttttgatcttgtctcccttaaagagtttaactagttggagggcttctcatcctctcccttcttccctcagttcctgtagactatggagaggagactgtgcttttccctttatatatagagaagggagggttgtctagagaaagaatattgagcttggattcccaggagtgagcctctatttctagctctgtctcgaatactactttctctctattctttctgtgcctcattttttcaaactgagaaatggggacattggtttcactcagaggcagttatggcgtcgagatgagataggtgggttataaatataaatatgaaaccaaaagcacaaggtartattaatcaccacatgtaaacaataatttggtgtcgggaaggtaggcgtcagccaagcaaagcaggaaggaaacggaggagagggtgccttgcttgaatgggggcaccgcaggggttttcctgccctgtgcttcatctgtgctatgctctaccttccttccagtcagtcagaaaatcccctgtttgctgcccccggctttgcttccccacactgactatattagagtcctcatttgcagagcagcactgcaagctaagtatttgtagcacagattaaagagactgaggagggtcctggggaggccgaggatgcaaaataggtagatgaagaatctggagatgctggaagaggtgggtccttttacagatggacaactgggaaaatggaccctttctcatgcccttcacacttaggtaattcttagagcaataaaggtgtatatggctgggcacgatggctcacacctgtagtctcaccgtactttgggaggacaaggcgggataatcacttgagatcaggaatttgagaccagcctgggcaacacaaagaggccttatctctactaaaaaattattttaaatgagctgagtgtggtggcgtgcatctgtagtcctagctacttaagaggctgaggtgggagagtcacttgagcctgggaggtcgaggctgcagtgagccatgatcacaccactgcactmtagcctgggcaacagagtgagaccctatcttaaaaaaaaaaaaaaaaaaaaaaggacatggggtgtgcattaaaggtcctyaagcaaacaactgccaggacaggagaaactccttgcaggcagaggatagctgcattaaatggcccttgagttccaccattcccttgggattttttggtcacaattactgctgctgtcaagagaaggggtgccagcctgggcaacaagggagacccaatctctacaaaaaatacaaaaaattagccaagtgtggtggcatacacctgtggtyccagctacttaggaggctgaggtgggagaatcacttgagcctgggaggtcaaggctgcagtgagtatccagcctcggcaacagagcgagaccctgtctcaaaaaaaaaaaaaaaaaaaaaaaaaaaagggtgctgcacagtgttctggcccaggaggaactttaaaaaattggccttaaaccctttactcatacagtatcagaggtagagaggcagcccagcctgccccatgagtttcattttgttccctgagatccccaccttgaattttaaaggggcagtcccctgcctagcgccttgtgaagggcactatcttgcactgtccatccagaagccccgaatgagacttcttggcccttcatggtcaagaccaggacatttgggggaaggcgtgccagcgttcagaggacagtctttgggccagtcattctctccttcctactgtagttgcagcctggggcaggtctttcaacctagaatggtagcgataatagggcctaccctacaggattgtttgaggagcagttaggacactgtaaataaagtacttggcacaggcttcttagctggggagccctcttggttttggtttctctgttccaagtgactgacagactggctgatacatggggatacgtgcgcatgaaaatactatctgtataagccagtgccagtgcagtaaccacagcatcacatagcaaaaagtacacagtctgcacacacatcatgcaagtgaagctatgttccccttttccctgatgagaaactgaggcacagagatgggaattaagttgcccaggattgtgagtggcagaaccrggactggagccaaccagcacattccaggaatccttcctggaggaggcagcctgtgtgatatgakgttgttgaatgggctgcaggaaggagaggggyttctcagggaggaaggtaagggctgcagccaacataatggttatcctgaccagccctgggtgaagatctgtgggagaggttgtggaataccagatatacccaaggactgaagggaagagggccttggctggctctggtttcactcataaagtcttctcactccccttttccttaagacacgaagctggaagcttcttccttgggtgaaaagaaagggctcaggaccagctccctctcccctttgctatggggtcagctgattctctgccccactgtagcggtccagggatcagctaactctcaaaataggctcagcagccgtgctttgtcacctccagccaagccctggcctggcatgtctgctggctgctggaggggccctaattatagctgtgggcccccagggtagaggcagctgggacagagcagggctctgccagtctgtggtgggctggagggagtgcctcacttaggtggagattcctctggaggacagcggtggaggcaggctgctttatcatgaaactgccaaccttgggggtggccgccctgcctctgcgcyctctggcatagaagttgctgggccctgggctggccaggagggtgtgacagtatggactttggcccagggacagcttccccgaaaggtaacgtgggtcctccctgcctttccacagctcccctcccctgtgtacttcaccccacccagcagttccttatcctgagcttagagggagtggctaggtgtgattcagactgagggacctggagagaacttatgggcttgaatagtggtggggcttatgtgtctcagttctcttggccctgccattggctttctcaccactggggtacttggagaaacccctcctctttgtccctttggctttgaagctgtttgggggtgggggtgagaaaaacccagtgtgtgtccctggggctaggtgaaggggactcctatgaggacaagtgagagggctgtgggggagggtgaaccgagggcagagaacatggtgcttcttcctggtggctctcagcagcaagaagtgggggagggatggagactgtcaaatggaaaaggaggacaaaaggagtagctttgcggaccctctgcggaaatcctaaaacaaggaaaggagcaaggctgacaacatgggacgtgtcatcacctgaactccgaggtggctctgctaagcaagttctgtccaggcaccacgggtagcttcaaaatcgggatgttcgcctcactctactgcaaagctccaaggacaccacattgtgcttctgggaacatccagtgggggttttgcctagtttgggacctctcctggttctgcaggaggagggcttcctcagggagtatgtctgaaccctgagagggaggctgtatcctcagcctcagcctcagcctgacttcctgggccacctgttgcttgaagccacaggagtggcccctcctaatttgacttcctgtcctccataggatctgcttcccagtgcaggtgaaccggctgcctcgggagacactgctgtgtgccactctctatgctctgcccatccccccaccggggagctcctcagaggccaataagcagcggcgggtgcctgaagccctgggctgggtcactaccccactcttcaacttcaggcagtatgtgagccccagggtacagcttcttggccttggaargggaggagggggacagagaaaggggcctggctgctgcactggccagtgcrccttgggagagttggccatgtggggctcactggtgaagtccagaggatccccaagcacagaactggtgaccaggactattgrtgtaaccaagagccactgagcggttctggtggcacaggaccatgttaaggatacatggaaaagcaatgcttgggtaatagatcatctggtcttgtcattggaagaaccttagaggtcatctagcccagcctccccacctcatgaaggcatccctgccaccargtcatccagaccagggtgtggttagctcacaagtcctcttggagggcgtaagcttttacaggacttgggagaaggaagaggctatggtccacggtgagaatgagaggggagttggatgatggcttcaaacagaaaaggcagayttttggattgggggagcagtagaaatattctctgcttagccactttagcagctcttcccactctccctccttcttagggtcctgacctgtggccggaagcttctgggtttgtggccagcaacacaggaaaatcccagygcccgttggagtgcacctaatttccaccagccagacagtgtcatcctgcaggtgaggctttagcccttccctcccagtcaccagcaagaccattccagtcaactctacatttttctcctggagatttgggctgggacagcaggagagagtgctagaacttcaagcrtgggaggatgatgtgactgaagcaactgagggaatatggttagatgtggattrtgaggtgagctctggggtatccatctcccatctcctggaggttaaattgatttcgtggagcctgaagatggggtctgagaccctctgcattcagggctcagcttctgagtcccttgtattgaatcttcatacgtctaagtctgatcaaacctgacctgkgtcctcttggggcytgaggggacacctttgcccctgccagtgactcagtgctttggcaggatggacctrttctccagggagaagaggaggagctggtcacgcccaaggtgcacttctcagttcccagcttccccttcttgtggttatgagatactttggtatggagtatgaatgttgacatagaatgaaagctccctgaggcaggtttttttttttttttttgagacaggatctctgtcacccaggctggaatgcaatggcacaatcttggctcactgcaacctctgcctcccaggcacaaatcatcctcccacttcagcctcccgagtagatgagactacaggcgcacaccaccacgcccggctaatttttgtctgtcttatttgctgctttatgcccagactctagaaaatgcctggcacatgttaggattcaatagatatttgttgaatgaggctgggtgtggtggctcatgcctgcaatcccagcactttgggaggctgaggcagggggatcacttgaggtcaggagtggccaacatggtgataccctgtctctactagaaatacaaaaattagctgggtgtggtggcgggtgcctgtaaatcccaggtactcaggaagctgaggcatgagaaccacttgaaccggggaggcagaggttgcastgagccgagatcacacccctgcactccagcctgggtgacagagcaagactctgtctcaaaataaataaataaatgaataaataaataagttttttgaatgaaagaaagtagacctcctttggagacttggctcactcagctctgatactttagtaggatgaacatctggtggcatagagtagggaccgagtgtcccagggccttctcccagtgtgtggtcttgcctcccctctggcagcagtgtcctctggcaccccatggaagtcaccccggactcagcctggatgcacccygtgtttcagctgggtgacacctctgttcagagttctggctggggcttgtcccctcacccctcaccaaggtgcatctccaccgaacctcttcctcacatgtccattctttttctctttttgtttccctctcattttttgctgagagttatagctggaaaggactttagagatcaccaagtctaacagggctattttacaaagaacctgagggaaagtgagggagggacaaggccggaatgctggggtgagagaaagaagctgggagtccacacacgctgcctgttttctctcctcacatccctgatctcatcccccagattgacttccccacctcggcctttgacatcaagttcaccagcccccctggagacaagttcagcccccgctatgagtttggcagcctccgggaagaagaccagcgcaagcttaaagacatcatgcagaaagagtccttgtactggtgagacccgggcccccactgaatctgtcatgtttcatctgacctcccagcactgagtctccrtcctcctgctttgggagtggaggtgggaaggggtgggcattgccatctcagcaggaagtggaggcagcccccaggcctttctccatcagctgacactaggaaaagtggagaggtcaaggtcaggaaattagatctgagaatacccaagtccccaccccagggacttggtccagactcagctacccaggaggaccagagctctgccccacatcccagatgtgctatctactaccttctgtccactggggcagctggccccaccaccctgcccccacctcttgctctcacctcctgccccttccacaccaacagcctttgaatttttctggccctgtcactttccaaaaaggatcaggtgtcaaggcaagctggcagctctcaggggtacgcgagtccaggctgatctcatccttggggctgctgctttcacaggattggagaaggaggggtgagaacagaactggaggagctggagggacctggttctgctgtctgctctctgtttacctctctggctcctgcgcagccctgtgcgtgtgttgtgtgtgtgggggcatgagagagatggggctcatctctgtccctgatgtccaccccaagtagctggagtagctgagcgaccgcagacctcccttcccccactctgccgactacacttcattagaccctcagctcccttctcccattagacacctgatctcaggcaaggcccaattagctgcaggtccttgaaagccgacagctggtccctggaggccccaggaggcctctcagcagcacagaccctggtgttgggggaccactgccctctggtggttctattgagcgtggtgccctcagggcatccgcaggaggggtagcagattcggtgcccttggcccatgcattctccatccaagatgtccctgagttgggatcaaagataggatttgggctctggttcccaaactttgattcatattggaatcacctggtgatctgtggcatmgactgatgcctggcttcccsagccatttggacttaactggtatcaggtgtgacccaggcatggcgagggggttcactcagcccctcaagtgggtgtcatatgcagcaaagcttgggaaccgctgaattgcagtgtgtgcagcactcccttgagggtaagggctgcaccccctggctgatgctgttctctctcactgccccctaccctcccaccaccttctcctttccgtgtgcccaccaggctcactgatgctgacaagaagcgcctgtgggagaagcgatattactgccactcggaggtgagctcgctccccctggtgctcgccagcgcccccagctgggagtgggcttgcctgcctgacatctatgttctcctgaagcagtggacccacatgaaccaccaggatgccctggggctcctgcatgccacgtgagttgtaacatctgccttttctgactatgtgttcttgtagaagccagggcacgacactgcccatcagtgatctgagccagccctggggaaaatggtaaagtgggtgtggatattcagggattttccatttctcctttttgctttttctttctcattttcccttcaatgttatattgtcatttttcaaacatacaacaaaattgaaaattgtacagtgaatacccatgtgcctaccacctagattctattgttagcatttgctctgtgtgctggattgtgtacatttcatttatccatcrctgtatccatccatctatccatcttattttttatgctttttttttttttttttgagacagggtcttgctctgtcacccaggctggagtgcagtggcatgcatatggctcactgcagcctcgacctcctgggctcaagcactcctcctgccccagcctccaagtagctggaacaacaagtgcacagtgcacaccaccacacctgactaatttttaaaatttttttgtagagataaagtctcactatgttgcccaggctggtttcaaactcctgggttcaagcaatgctccctccttggcctcccaaaaatgctgggattataggtgtgagctaccatgcccagcctttttatacattttgaagtaaattacagacaccattaaactccctgctttggcatgcacatcattaactagagctcgatgtttgttctgtttttttttttttttcttttggggcaacatttatacataagcaaatacccaaagtttacctgtacattggctgagttttgacaaatgcatacgcctgtgtaactgaaatccttattacttagttttattttaatcattgcccattccctctttctcttgaagggttctcttgggacccaaggcttccagtcttagatctgttagggctgccttttctagatggtacccaggatttcctgcttatttctcgccactctcagtaatcaaaatgtacctatccatgtgacctgccttaaggagtttttgagccaatggttttgttaatctctgctaaactaattctgccaaggtttattggcttatataaaatactgtgattttctgttatttgcgtggtacattttgcattaaaggatgttaacaagacaaaataatgcttttacccacatcagggccctccaatggcaggaatttctggcacagtgggagtcaagggagaaatctytggagtaaggttgaggactttgtcccattttctttaaatcctccaaggagtgagagtggctacctagttgttcccccatggctcaaggcagactctraccgtgargaaggctcattcccaagggttgctatccagggaagttgctaaggattcttctagtgactttagcagaatctagggccattgcattttctttctccatgcctctgaagcccaggtgtgagggtgctgggctcacagctgtgcctcaacttgcagctaggttgtcagggcactgggctctgttttgcagcttcccggaccaggaggtgcgtcgtatggctgtgcagtggattggctcactctcagatgctgagctgctagactacctgccccagctggtacaggtgggtggattggtcctccctccagttttgctggtcccatccccagtatcccaagtgagtctgcattctgccccttagaaaccagagatcccagtgcaataataataagtgtaggttacaggcagttaatgaagcttcatattctctttctccctttctycraaacaggccctgaagtatgaatgctacctggacagcccgttggtgcgcttcctcctgaaacgagctgtgtctgacttgagagtgactcactacttcttctggtaaaactgcatgtagaaaagtgggaggtagacacgtgtctttcacgtaggagtatttcactcttaggcacgcaagggcaaggaactgagttgtccgggcttcagtatgtgctgacttaccctgtggccttggaccagcatcttttcctcaggggtctcagctcaccccatgtaacatagtgaggattatgttatcctgtctctcctctacccacacatggcagaaatagaaaggagaaacaagatgcagaggggctgtgaactctacttaaagacagagtgagggcacagactggggtatgggcacaggtgagcatctccatatgagccgtacatacagaatgtattttccctcycaagttcggggtgggttttgcagtgagttggagctgggcctgactctgtctccccctgtacccttgcctttgatccctggagtgccctgactcctgactccctctgccttgcaggttactgaaggacggcctcaaggactctcagttcagcatccgctaccagtatctgctggcagccttactgtgctgctgtggcaaggggctgagagaagagtttaaccgccagtgctggcttgtcaatgccctggccaaactggcccagcaggtccgggaggcagccccatctgcaaggcaggttagtggggtgaggctgcccctacccatttctcatccagggctttggcagccagtttcttcttaggaatcctgaacaacaagattccacgtgacgatttttgattttggagcggggagcagctgactctggaaactaggccrtaaacaggcagtccacaagctggatacagcccgtggatgtgttttgtttgtcctgtaaaatattgaaatttatttagctgtttgttttaaaggctaagcacagttgtgtaagttgttcattgcacaagagcactcagccagaaggggcaagtgagggctgaaatccagccatattttgttcaccatgctgtgacccatggctcaggcctgatgccacccagagaggacacctttatctgtttgtacgaagacattgtaaccagccagcagtgttcctggttaacgacatttaaaaaytgagagattttgtatcaacgtccagattgttagcttttcttggcagaagcctaaatagctcttcccccttgagagacagcctgccctctctgtgcactgtggcctgcttcatgctgttctgccatctgctcccctctagagctatttggtcttgctgttagcrtacagtcccaggctggggtgtagggggtcctcctccttaaggatcttctggagggtgtccacacttctcagggggtggttttcataccgactactacggagaacccacccctgggagaggtctggttctcagtatggaccctccatttcacccctgctgtactcctccccttctttccagggaatcctccgcacgggcctggaggaggtgaagcagttctttgccctcaatggctcgtgccgcttgccactcagccccagtctgctggttaagggaattgtgcccagggtgagtgactggtaggtttggggctctcagagtgggagggctcagtggaggtgaggtcttcactaaccaggcatgcaaggtcgaggagctgagttgtctgggcgtcagtatgttgctaacttaccatrtggtcttggcctagcatcttttcctcaggggtctcagctcacccycatgcaacatggtgaggattatgttatcctgtctctcctctacccacacatggcagaaatagaaaggagaaacgaggcagaggggctgtgaactctgcttaaagacagaatgagggcacagackggggtatgggcacaggtgagcatctccatataagccataaaataagagagagattaggaagaaaggcatatctgtggcctcttcccattcctaatgtgtatggacttttagaagcctgacagcttgcagggtagaggaattgggttggaggttgggcggctaggcaggtgtctttctctgatgatgttggggatgaagtcggaggtggtggtrgtgatagcagctgtcatctgtcatttattgagcactctctgtgcccggccctgttctgagtgcttaatgttggttatggcrtttcatcttcacaactcttaggatgttggtactattgggagtccccttttacagaggagtaaactgaggtgtagatgggacatgtgacttaccagaggtcacacaactagtaagttgtgcgcagaatgaactaacaggatgggaggttaagtgctggagctgaggtcataacaaactgaattgggatgatgactatttaacragagaaggaaggaaattgggtttctgggaaatccggaagaaacaatgagcaggtcttgggtggacyggcagcagcggggaggcagcatcttggtctgaagtggagaggtcgttttcctttcctggcatgggccactctgaccctcgtcactatcttttcaccatggcaggactgttcctacttcaactccaatgctgtccccctcaaactctccttccaaaatgtggatcccctgggtgagaacatccgtgtcatcttcaaggtgagaatactttactcaagcctggtggaccagggtgggagagagaaggaggcagcctagagtggcattaagtagcccctgggtggttctcttcccactgttccatgctgtcttaatgtaggaaagatgatcaggtgaaaaaggatttagaygaattctgcatggccccagaggcctaacaacagagtgttaggtatagggaggcaactggcagctcagtatcccgaagtgctttctaggaggcagagctccctcaacaatgggttgggtaaggtggtgatccgcttgtcccttgggtattcaggcagaggctgaatgccatgtggcagggctgctgaagaggaaattaatatatcaggtgcaggtccaactagatgaaccctaaggtcccttctaactctgatgtatccacaattctgagaagtaaatgatagtctcagagcatataatctaatgggggagacaaaatacatgcatgtgacttagtaacttatatatttgctatgcgcaagttccaaatccaaagtctaaacgttcaagtttaaaaaaggcctgatggcctgggtgtggtgcctcatgcctataatcccagcactttgggaggctgaggcatgcagatcatttgaggtcaggagtttgagaccagcctggccaagatggtgagaccccatctctactaaaaatatatatatatatatatataaattagctgggcgtggtggcaggcacctgtaattccagctacttgggaggctgaggcatgagaatcacttgaacctgggaggcggaggttgcggtgagctgagatcgtgccactgcactccagcctgggtgacaaagtgagacactgtctcaaaaaaaaaaaaaaaaaaggcctgatggtcagaggggctgcatgcagaagcagaccgtgaatttaattcagatggggccatgggattgcaggacaagctggaacaacacatgggcaaactgggaagcttcctgggccatctttgacctggtgtgagctgagtgagcaggtcaggggtgtgaggctggggaactccctgtcactgttagtttagggccaaggttgagcacttgggagacctgagagctggggaggtagtggagattagatctggtcactttctccctccatccagtgtggggacgaccttcgccaggacatgctaacgctgcagatgattcgcatcatgagcaagatctgggtccaggaggggctggacatgcgcatggtcatcttccgctgcttctccaccggccggggcagaggtcagttgggagtaggggtgagggtggaggaggggaccsctttgcttattgtccttctgcccattgccaacacaaactgtgtcctcctccaggaaagtgaaaagggcaagattatttcatgagaagctgtgggatagccttaaaagggaggcatgggagagagactgttataaagtaaaacagacttggtgccgtgacagccaagcatattgtgtagactttggatcctgattaaaacaaaccaattgtaaggaaatattttttgggccagacatgctagctcatgcctgtaatcccagcactttgtgaagctgagatgggagaattgcttgagctcaggaatgtttgggaccaacctagacacctcatctctaataaaaattataaaaaattagccaggcctaatggcatgtgcctgcagtcccacctcctcgggaggctgaggcagatggatcgcttgagtccaggaatttgaggctgcagtaagccatgatggtgccactgtacttcagaccaggcgacagaatgagaccctgtgtgaaaatatatatagagagagagagagagaaggagagagacagttgggggaagtttgaatatagattgagttagattaaagagtgattgttaattttttggatgtgacaatggcatggtgtctttgttaattacacttgaaatatttatgagtgaaataaagtatctgggatttgctttaaaatactccaaccaaggtggcagggagtggagaaatagggttgtgtgattagcaaacaagattagcaaaatgttgacaatttttgaagctgggtgatagttacatgtgaagtcatgataccattctttttattcttatatatattttcaaattcccatagtaaaagctaaaaacaaagggagcagcagctatgaactggagagaccaaaaagtcacagtatggaataggaaatgtgggaatgaccttcctttctatggttattctcttcctgttattatcagacttagtccaaatgccttacagcttaatttatagggaagcatgagcacagtccttgtagtcctctccctgcagtccccttcattctggtctggaacgtgacccccatttctcccctcacagggatggtggagatgatccctaatgctgagaccctgcgtaagatccaggtggagcatggggtgaccggctcgttcaaggaccggcccctggcagactggctgcagaaacacaaccctggggaggacgagtatgagaaggtagggttgtgggtggggagtgcgtctggtgtgtgtgtgtgcctgatgccggcacacagctctttaaccacaagacctgcacttgctcagagaggacagctcagctttgttggcagaaggacctaccctttcttggttgactggtgcctccaaatatctgggggtgactcactcaaatgcctcttgtaagctggctgagaaaatcccctgatgctggactgagaaactttcactgagttctcctggcagattaagtcttggaggaggcgccagcttttgagagcctatctgtatccctcccagttgtggatcctcttcaggttcccttatgttctcagagggttcagtggtactttctagaaaaagagttggttggaagagactttagagatcattttatgccagccccttcttttcatagctgtgaattaagattcactcattcattcctagttatggagctgatatgtggcaaggctgtaactcaaagctaggattgaggttagatatgagacagagacgagtgaaaacagggctggctggttcctgatgaaagaagattagattagaagtggagctttcctgggtggtagggccctggtagcctgctagggtccgtggcctgttcccagcatcacaactctagtctctgggttaattaggttgaggaaagtagggacactgggaaggaacaaatcacaataaccaaactcacaagagactggctataggccagaatgctaattcgtataattttaacttcargggacccaaatactgatttatattgatcaatgtactttatcctggagggaaaaccagcatgggcagccaaggtataatcagaacattgtttagtgaatgtgtaattagatgatcttaaatggctttcagtgtttgtgttccccggggcttaattcctggcctgctgggccctctttgcactcttcttgtgccagctcatcctcttattacttcaactaccacctgtatcttgatgacctccgaagccattcctctagccctcttcccttcctccaggtggttctatagccaccttcttgctggacttttccacctaygtttcacccacgtctcaaactcggtgtaggcaaractgagcctgctgtctctcctttgcctcttgaaacctgctttttgtgtttgctatcagtcaatggtgtgactctttctgtgcatttacccaagccaaagccacggtcttcctgatgcttccctctatctcacttctgtaccatgctctgtttattcttcttcccagctatctctcaaatctgtcctcttcttcctattttgttaccattgattttgttcagctctttgctgtcggtcccctgaaccactggaatgcctctcctccatctagagccagcctctgcttgatttcagaggtgttttgttgttgttgttgttgttgttttgagacagagttttgctcttgttgcccaggccggagtgcaatggcacgagcttggctcactgcaacctccacctcctggattcaagcgattctcctgcctcagcctcccaagtagctgggattataggcgtgcaccaccatgcccagcgaattttcatatttttagtagagaaggggtttcaccatgttggccaggctggtcgcgaactcctgacctcaggtgatccacccacctcagcctcccatagtgctgggattacaggcatgagccacagtgcccagctgttgtttttttttttaagtgtggataagttcttcaaagcctctgtgtatcctaacagatagcattgcacacagagccttttataatccagccctgctgactcctgtaatcccatccactgcaacctaccatcttatgctaacctatgctccagctaggttactagctagatcatgcggtgggggcagrgggggctactactttcatttctgcagtactgtaggcagtaatatttcctttgcctggaaagtcatttcttcccttctcattcctcaaaactctgccactctatgctatacatttcaagrccctctacccttggagaggagtaatgatttttttcctttctactaccaacctcccatatacttactctttatgctaatatgcatttttcaggtattaaacacccatatgcagaggcactgtactaggtgctggagttgtgattactccctgccaatgtaatagtcatatatgtgtaaatgtatggaaataatactaaataataataaatgtacagatgaatgtataagaatataataaaaataaatgtacagaagaatgtacgagaatacacacagagagaaactaactctgcatgttcatgtttaatctcagtctttcaaagatagcttctctgcccttctagcctttctccaagaataatgctggtagtttctttttttttgaggcagggtctcactctgtcacccaggctggaatacagtggcacaatcactgcaacctccacctcctgggttcatgtgatcctcctgactcagccttccaagtagctgggactacaggcatgtgccaccatgcccagctaatttttctatttttcgtggagatggggttttgccatgttgcccaggctggacttgaacccctgggttcaagagattcacccacctcagcctcccaaagtgctgggattacaggcatgagccaccacccccagcaatgctggtagtttcatttgatgacttccagaagaaagaaactagaggtattttctcttggccacctactcagcaagagagtatcccacaccctacacatgaaacccctgaaatcagaggcagagtgtccctttatagagtgagacttcttgccagtaagtggctaacaccctgcataacttagggaggtgaaaagagtttagtcatttacccacaggcacacagctattttctcagccaaaataggattcatttaaggtagaaagagcatctgtgacwgggagaggatttgatagagatccaggwcacgactgggagttacgcgttatgctccttattaagtgcttttattcatttattttactttctaagaaatagtctttttcttccagaagatgaatgctgtgatttctttataacctttccattcttagtttctggtggatccatcatcaggttgtaattcgacaagtagctgggtgggtgcattctgtgtggagctagttttgcaataggcattgtgaaataggcaagaagctgttaggagaacagatctgtaaaccccatgggactgaaagggcaaagtcagtgctgtatgaatggaggtgacagtgcatctgtaggggttcagaggaggagaagtcagtatgagcttggaaggtctggaaagttatgggactcaaggtcattgaaggatgatgggtggaaatttatggaaggaggcaaggagggcgggcattccatatctagtaagctttccctcattcctaatttcatgcattcctacctggctatgacgatcattgctctctgctgatgtctttcctgagttcttaggaattctataaacctcacgaagaggattttgaaggcaggagtggtctatttcctcattccatgtagtttttctttctggaaagacagataaggggatggatgttgaccagacaaaataagatggagtcaacccctcaccactcctctcctgctttaaactcagaaatatctctaacrtattttaccaactaaagatgtcccattttcaagtgtaaaacactctctagacgtgttaagctgcctcagctcttctttggagtgcagtgactttaattagattagcatttagctgttaccaagaactctggaaatgggaattttatttggggcaggaagaaggatgatagaattctgagcagggtcaggaagagattcttaagttggcttcctcagtggctgtacttaagatcatcacggccagttggggaagttgtaaatgtcagtcttcccatctcttaaggtcccctcagtctgggctgatcaagactgggctcttggatcagtccactgtctttccaaccgatctccctaggagaaagaaaggagaagatggtattcagatgaagtggtgaagatatacatataaatctccatcttttccataagacatgggagatgtttctgtgtgtgtaagtgtgtaagttagtacatgatgaaggatgaacaggcagatgtgagacactattggggttcacagaagagagagaggccagggctggctgagttctgtctggctgtggcccctggagtccttccaagccagctttatgtcctctcctcccatctgccttgacccctcccaggctgtggagaactttatctactcctgcgctggctgctgcgtggccacgtacgtcttgggcatctgtgaccgacataaygacaacatcatgctgaagaccactggtcacatgttccacattgattttggccgcttcctgggccatgcccagatgtttggcaacatcaagcggtaagtgatctcctgaagccagattgtgagtgaagggcaaggaggtgagcaacagtggttcagagctgggacacaagcccatgatggaagcagctgggcctcagatcatggtcccagggctgagcagcattggaggagagaagacggataaagaggtcaagtccttgcagggccttgcagaagaatgcggggaccagctgttcttccctaccaaggactgaacaaagggaaatgaaccaaactgtagcaaaaaggratgcaatcagatatccagaaaaaaatattgccagctcacagataaggaaccaatgaaggatatagagatcttttaagattaaggtaggaaaggaacaaagaaaaaagttagagccccttctatccagtgtgtccacgtgatgagggatgagggaaactgayccctgatgcagcccatatggtgggcttcctcctccatgttgaccttctacctgtatgttccccttggctcagggaccgtgccccctttgtcttcacctcggacatggcgtatgtcatcaacgggggtgacaagccttccagccgcttccatgattttgttgacctttgctgccaagcctacaacctcattcgcaagcacacccacctcttcctcaaccttctgggcctggtgaggagctccatccctttccraataccttcttcttattatctggcatcatctttaagacttccctgtcttgccgcagaggatttctagagatttacctctctgagccccaactgaatacctgcctgccctagataaaggcagggacccagactacctgaggacaatgatgtctgtgtaggtgcctgactccctgctccagcccttcagttcctgtggccctccagccactgcccacagcatctgtctaccaccctctagaagggttagggagcctagctgtagaaaaccttgcctaagggtagagaagcagcaagaattctctgttgttacaggcaccctctcttcttctttctgctccttctagatgttgtcctgtgggatccctgaactctcagacctggaggacctcaagtatgtrtacgatgccctgaggcctcaggatacagaggccaatgccactacctacttcactaggtaaaatgattccctgagcgaatcagcactgcccaccctgagtaattcccagcctgccggattggcaggaggaggactggggaaaggtgaaaagcttagctcagatgctagagcctagagctgaccacgtggatacattgtcccaactttgcccgtgatttaggtaaatcattttgcttctctcagccttggtttcccatctgtgttttggtgctaacctttgcacacaagggtattgccatcactcttatctacattctcactaggtcccatcaaatactttgtctatggggcaatgtataatgtggcttttgtaataacttttaactttcttggtcagacgcttcccccttgccagaacatggagttccatgattcagtctcctcatatttgacaatgtttttaggtacactgtgtgtgaaagcaaggatgtgtttatctatgaatgcctgcaaaatgtggtccctgtagataatgttctccactctttttggaattcagagaattaaactttctctgttaggtctcctaacacaggacctctcccgctgaattgaaatctgagattgaacagtgcttggtgaggttctattgtaatgaaccttgaaattttttgatatttagacatttacacagagagagtgagttcctagttcctttctaccttggtttgatggtttttggctcaggtgggcagccaggggaggagataagaccctggggttcacatgagcaaattgcrtgagattattgtgtgccagtcatttgctttatgaggatatgacacaggaaaatggtttgatctgagctgattgttagtctcaggagtcaggaatattccttggaacacccctgtcgaggcagcaggaatttgggttcatggttatatcctcttttcttatcctcctgccaggttgattgagtccagcctgggcagtgtagccacaaagctcaattttttcatccataatctggctcagatgaagttcacgggctcagatgaccggctgaccctctcctttgcctcccgaacacacactctcaagagctctggccgaatcagtgatgttttcctctgccgccatgagaagatcttccaccccaacaaaggctatgtaagtgttttctccaatctgaccccctttcctgctctctgctgaccctggcttgctgggatcctgactttttccacacttgcacagtgggcacaggagttgaccgagcgtcctgtgctgggagcagtcctggaccacttccctctcctttgctcacgtgatctgcctagaattgggtagctgaattggatggttattccctctgagtcaaggatcctggcaacatatgtgggaagtctgcttttagattcctgtgtatgtgctatcayctgtctccactcttgctctcttccttctggaatgtgcccctcccctcagcacatacatacacttccggacctttcctacacccttcactgggtgcagagggctcggcaggtacaccctaagatctggacctttgcagatatatgtggtaaaggtgatgcgagagaacactcaygaggccacctacatccagcggacctttgaggagttccaggaattacacaataagttgcggctgctcttcccttcttcccacttgcccaggtagctgccccctytactatctgcacagagggatgtcggggagggggaaaggatacgggatgggaggtggtcagggctgcaggggcagaaaatacccttttggactaaacatctgcctgctttgcttggcctggtatggagtttgakgacaagtgctccccctgctggccaagctctccttgcacgcaagagctctcactccaggcccactggccagaaaggaaggcatggttgaatctgatgtttcaaaatttctaattttttaaagagttacaccatttttcaaatggataagcaaaatgtcatatgtacatacagtgggatattattcagcatttaaaatggagggagatttcgacacgggtaacaacgtggatggaccttgaggacattctgctaagtgaaataagccagtcacaaaaaaacaaaaacggcacgattccacttatctgagttacctggagtagtcagactcctagaggcagaaagtagaaagctagttgcccaggtctgaggggaggtaggtgtggttgtttaatgggtacagagcttcagttttgcaagatgaaaagagctatgaagttggatagtggcgatggttgcatgacagtgtgaatatggttaattccacagaactgtacacttaaaaatggttaagatggcaaattttatgttacacatattttactgcaatttttttaaaaactacttttcaggccgggcgcagtggytcacgcctgtaatcccagcactttgggaggcctaggtgggcagattgcctgaggtcaggagttcgagagcagcctggccaacatggtgaaaccccatctctactaaaaatacaaaaattagtgtggtggcatgcttttataatcccagctactcaggaggctgaggcaggagaatcgcttgaacccgggaggcagaggttgcagtgagctgagatcacgtgactgcgctccagcctgggcggcaaagcgagactcagtctcaaaacaaacaaacaactttttaaatgaattttttggccgggtgcggtggctcatgcctgtaatcccagcactttggcaggctgaggcaggcagatcatgagctaaggagtttgagaccagcctggccaacatggtgaaacccccctctactaaaaatacaaaaattagctgggtgcggtggtgtgtgcctgtaatcccagctactggggaggctgaggcaggagaatcgcttgaacccgggtggtggaggttgcagtgagccgagattgcgccactgtactcccgcctgggtgacagagcgagactccatctcaaaaaaaaaaaaaggatttttacatcgatgggagaaactgagggctcccgagccatttctggggagccacaggactctggcctgctgtttggttttcttgtctggggcccttggaaatgtagtcatgagatgctgagcaggtgtcagacctgggcacagatgtgcagcacaggaggaattgtgagggtccctagaaatggaggctgctgggaaatgggtgctaggggactggaaacgcaaatgaaatgtgaaaaaagcccattgtgtccattttctttccccatcttcacctcctgcatccccgctgcctacgctgccacgccagcttccctagtcgcttcgtgatcggccgctcccggggagaggcggtggccgagcggcggagggaggagctaaacggttacatctggcacttgatccacgcaccyccygaggtggccgaggtgggtgggcttgcctctcctcctggctgtccaggctggtggggatggttggggaggcagaggtggaagcatccggaggcactaggagtcaggaacaggacttggcacttyggggtctgtgggctgaatgaccaatgctccagtctgcagaagacaggaggagggtgggtccagcctcacagggttatacacagaaatgcaattaaacagaaaggtgaatgcatcgaggcacatgggctgagaatgatgagaatgagcggagcctcagaaaggaaggctcctctttgaggaaaaagttttttgagcaggttgagtatgtattatcaacctagatttttttttaaacaaatagtagtataatggccctaacaaagtcatgaggaatcctattattaaatactttaacaaatcatctgcccctattgtccatgttcccttcctatttgtccatatgcaagcatgatttttacagttttatagtggttatagcttaagtataactctggattctgagcttttttcccttagcatttatagtatacatatgctataactttaaatatctgttccttcagacaccaacttgcagtaccataatcttaaccattttatttttgaaagatatttagagtatgtgttttttttccccattaatgttcaagtgagtattttcacacagtttgtttgttttttgagacaggatcttgccctgtcattcagtctggagtgcagtggcacaatcacagctcactgcagcctccacttcccaggctcaagcgatcctcccacctcagtctcctgagtagctgggactgtaggcatgggccaccacacccggctaatttttgtatttttttttttgtaaagacagggttttactatgtcaccaggctggtctcagactcctgagctcaagcgatcctctggcctcagcctcccaaagtgctggaattataggcatgaaccactgcgctcggcctgttttttctttttaaactttttagggttaaaactttcaagcatgcagaaaagtagagaaacaatataattagcacctatatatccatcacctaaacacttaacattttgctatatttgcttcttctattttttatgaagtattttaaaataaataacatgccaggtgcagtggctcatgcctgtaatcttagcactttgggaggccgaggcaggtggatcacctgaggttaggaatttgagaccagcctggccaacatgtctctaccaaaaatacaaaaattagctgggcgtggtggcgcaggcctgtaatctcatctacttgggagcctgaggttgcagtgagctgagatcgccccactgcactccagcctaggtgtcagagcgagactccatctcaaacaaacaaacaaagtaaattacagacatcataatactgtaccccctaaatactcactatgcatctctaaacaataaagtcttgtttttaaagtaactacagtattattatattatccagtccatagtccatattcaaaatttccctatcatcccccaaattccttttactgttggcttgttagagctataatccacataagaactgcatgttgttggttgttatatttcctaagtctttttamatctggaacagtccccttcctttttgtattgggccattgtcttattgaagaatggccctgtttctgattctgttccagtgtgatttggtgtacaccttcttccacccactgccccgggatgagaaggctatgggcaccagcccagctcctaagtcctcaggtacagtatcttctctgagaccttactgccaactcctctgaactaccccargggtaactgcttctgccccaacctcttctcagttctctctccttgacttgcctcctgttccttttcttactctctgggaaatctagtttcccactcaggccgtggggtccatagttccttacctgggttccccacagggtggatattcagtcgattatatccttagacccatcccaacccaattaactctaatcacattcagactacacttatgtagatgcctcatgagtatcagaaatctgacatggagaggctggggcaagggggttcaggaagaaaacagaaacacctgcctggcctcttgacccttcatggtttcatttgtccctacagatggcacatgggcccggcccgtcggaaaggtgggaggggaggtgaagctgtcyatctcctacaaaaacaataaactcttcatcatggtgatgcatattcggggcttggtaagtgcctgcacagccgtgattttttttcttttttaatgtttctttagctacttttttgggcagaccttctctgccgcgtgtcatatgggtaaccaccacagtctactgagcatccaccatggacctataaccatagcaagcctatggtatgactaggcaatacatgagacagctttttgtagctgtggtctttgacaagtaacctaatcattctgagcctcattagaatgaggaaaatgttagcacctacctcatagagtcattatggggattaaatgagataatgcttgtggaatacttaacaccatgcctggttttattagaataatgatttttatagtaattataagggagaggcccaaggggctcattacctggctataatgattgagcagccacgtgacatcctttgaatatgatcaaggcagtagtagataattactaaatttttggtacgagttctaagaacattgtgactagaagaggaagggaacttttttttttttttgaaatggagttttgctctgtcacccaggctggagtgcagtggcgcaatcttggcttactgcaacctccgcctcctgggttcaagcgattttcctgcctcagcctgagtagctgggactacaggcacatgccaccacacctggctaatttttgtattttttaaaattagagaccgggtttcactatgttggctagactggtcttgaatgcctgacttcaggtgatccgtctgtctcagcctcccaaagtgctgggattataggtgtgagccaccacgcccagccaggaagggaacttgaatacttgcattgtgctgcatcctatgttaggcattttatgtaggttggggcagtgggatatggcaggaggaacataaacattcatccatttactcttcattcaataaatgtttgagtgcctgctatatactgatacattagctctgggtatgggggaaaacaaaacaaaatccctgccctcagggggcttacattctagttgggaacggcacacaggcagataagtaaaatatatggcatagaagatggtagtaagagctatggcaagaaataaagcagagaaggaatgctaggatggaatgaagggagtggactttgcaaagagtgctcagggaaggcctcattgttgaggaggtgtcttagcaagatggagaaggtgagggagggagccatgtttatgcatctgagggcagactttcccaggcaaagggagcagttagatctgacagcccagagccaggagcctgccaggggtgcgtcagaaacagcaaggggccagcggctgaagccgatggagcaaagtcgagaggagtggatgatgaggttggagagggtatgatggaccagcacctcaccctgatagtaagaaccgtggctttttccctgaatgagatgggttttaagcagaggcatgacatgatctgacttaggttttaaaaggatcaggctgggtgaatcactagttggctgcccttgagcaagcagctcaatctctgtgactcatgtctctacctcttaggggttaagtggaccaaatgacaaaatagataaggatagtagatatggcaggaagatacctgggaacatgatggttcactcaaaacagagcacattatgggatgtcctgaggatttggataaaagtatagacttgatatcataggcaaaccaattgatgttttaataggacacaatgttatcatggtagatatttttatcagaatagagtgagcttggaagcagacaaataaattagttgtgcattgcaagatgccagatggcagatgagagtctggatcagagtgtgatcacaggaatggtggtgaagagacagatgttaaaaatcttaacatttttttggttctcattctattgtagcaactgctccaggatggaaatgaccctgacccctatgtgaaaatttacctccttcctgaccctcagaaaaccactaagaggaaaaccaaagtggcccggaaaacctgcaatcctacctacaatgagatggtgggtggggaaaatggtggggtagggcaggggttggcaacctgcgcctgttctcctagataaagtcgtattgaagaacgtattaagatgttgtattaagaacatggctgtacttgctgatttaggtgttacctgtagctgctttcatgttgcaatggcaggatcgagtagttgtaacatagaccatatggcttatcaagcctaaaaatatttactatctgtccctttacataaaaagtttgccagcccttttgggctgggatttcatggctggggtctggccctatcctgtgggaaggagaagcctgctggtcctgtgctgaaaatgagcagtggccccaatacaaagccctcacctgcttgaactctgagcaaagaacagagttcattaatgcttcccttggagtctgtgtaccttgtgtgccttctgtattacctgggactctgcagggtgagtgctagcctcagctggatcagcccccaacagactttaccatctccctctcgggttccctctggattcttcttgttccttctctcaccacttccctcacccatctctatgtttgcagttggtatatgatgggatccccaagggtgacctgcagcagcgggagctccagctgagcgtgctgagtgagcagggattctgggagaacgtcctcctcggtgaggtgaacatccgcctgcgagagctggacctggctcaggagaagaccggctggttcgccctgggatctcgaagtcatggcaccttgtgagcccagcagagccaccacccagcatcccaggctggtggcaggagctgggggagaggactctcccctgtgagactcctccttgkgaagggccagggccctgggcaggcctccagctcggtccaggtgattctggcctctgtggtaggaggcagggagagtaagacatgctctgctgtctcttcctctggagactgaacttgggttggttgtgatgagcagccccttggaggctgtgaggttgcagcaaagttttaagtttaccttgtgtcaagggagcaatgcttggtttggggagtgtgtggggtgggctgtatgaagtagcattttgggggtgggtgggtggatatcttaatttttatttttaaaaaatgaaatagtgatgttgtcctaactgggacaggaagccttgcgagaagggacgtacctatgccccagaaggcaagagaggaagactatttggactttttgtatgattaaggttcttattggacttttccctaggttttttttttttgttattgttgttgttgtttcgttttctagctataggaactatctggggaggggcccagtgggtcctcggccagagccctctctaaggacaggttggggagggttggggagggctgcctgtgctggactgaggcttgtgccactgggcctttctgattttgcctccaaaggagagcgctgtgatacctacatgtgtaaggaagggccttccgtattggggttctgccaaggacccgtattcagggacccatgctcttttggggggacttttcctcttgtcttccctactttattaggacttgccctgaataccattttctaccccttgcccctccattctcctggcccttctgggggtcagctggtctctatgaatatgctgggggtgcttccccataggtctctcccttcatttgtctctggtgggacaaaatactgactcagtccttagatgtagtttcacccaagagcatcttggccctgggaagaggtccctaggctgcagatgctactgactgcttgctaggtagcctctggaaagcattccccatccatcactccccacttctttctgctgtgctgcttccctcccaaactccatttctgtcaccctttttataagacttttcctcattctgtggggccataaacctatttagtctggagccaaagggatgccctatctgaaggaaaggggcatggggtgggggattccatcaaaactgttgttttttgccccatgatttttctttggtcagtaggaggctggattggagtggtgattattcccctggagctaagctcaggagcccgaagggagagactgagactgactcccttatctcttcatattctttattccctaccagatggatttttttttttttttttggagacggagtctcgccctgtcrccaggctggagtgtagtggcatgatctcgactcactgcaaaatctgcctcccgggttcaagcgattctcctacctcagcctcccgagtagctgggattacaggcatgtgccaccacgccaagctaatttttgtatttttagtagagacggggtttcaccatgttggccaggatggtctcgatctcttgacctcgtgatctgcctgccttggcctcccaaagtgctgggattacaggcgtgagccaccatgccccgccccagatggattttacatttgctcttttgtgtttcgctccaaagggttgtcttcctcgccaaaaggagggagggactttgaatttgatatgaatctttaaaaccagaattggctggatatttcccatgattgggaaaagagtgaaatgaggacattctgtaaactgtccctccctaattccaaggatcagaaactccccgttttgctgactcattccataactggagaaagaagctccattgaccgaagccacagggcagcatggaagtttaaattttctctaaaattaaaatgccaaggataaagctggctgcttccaggagggggaagaggagtggggagtgggcggtgaaacttttccagatgaacggaccataaatgtgttactggctttgtgcctgtagctcattttattatgacctatatgctcctgatttaaagagatctgtgtactgtttacttcccacttcccagaatcccttgtatctcctttctcgggaattgtattttctaataaatgacatttgagaaaaaaatgaaactataattttatttatttttttgacacagggtctctctcagtcgcccaggcttggagtgcagtggtgagatctaggctcactgcaacctccacctcccggactccatccatcctcccacctcagccttcccagtagctgggaccacaggtgcacaccaccatgtctggctaatttttttttattctttgtagagacagggttttgctatgtttcccaggctggtcttgaactcctgggctcaagtgatctacccgcctcagcctcccataatttttaaaagtaatttttagtagagccaaggtcttgctacattgcgcaggctggtcttgaattcctgagtccaagcaaccctctcaccttgtcctcccaaagtgttgggattacaggtgtgagccactgcacccagctgaaactatcattttaaagattggttgatgtttggctgggcagagtggctcatccctgtaatctcagcactttgggaggccaaggtgggtgaatcacccgaggtcaggagttcgagactaacctgaccaacatagtgaaaccccgtctctactaaaaatacaaaaattagccaggcatggtggcatgcgcctgtaacctcagctactcaggaggctgaggcaggagaatcacttgaaccagggaggtggaggttgcagtgagtcgagatcgtgccattgcactccaacctgggcaacaagagtgaaactccgtctcaaaaaaaaaaaaaaaaaaaaaaaaaaaattggttgatgttcacatgtttacattgaaacatctgatgtatgagatgaaaataataatagtggttttttataccaccacatggtaacttttatatgcactagtgcactgcactgaccatttttacatttgtcagctaaatctatcctcacaacaacttgatcaggtgtgtaccattacccattttacagatgaagaaactgaagctcagagggatgaagtaacttgcctaagggcacacagccaataagtcttggagtttgaacccaggtttgttgcactccaaaccttgtgcaacccctcctaggcaatgtttaatacaatcccttaagttggtctaattggtatttcgggtgctttttatacatgatatatatcatcttccattaccactgccctggacagtaagtatggctcattcatgaattctgcaacaaacatttacagttcttaccagtgctacctagtggcatgcctccattcataaaaaaatacattgtattgaatgcatcctgggccctgtactctaggtactggattggggcttaccaaggtaaattaagacagttctctgcatttaagaagttcactaccagggccaggcacggtggctcacgcctgtaatcccagcactttgggaggccgaggcaggcagatcacgaagtcaggagatcgagaccatcctggctaacacagtgaaaccccatctctactaaaaatacaaaaaattagctgggtgtggtggcgggcacctgtaatcccacctacttgggaggctgaggcaggagaatcgcttgaacccgggaggcggaggttgcagtgagctgagattgcgccattgcactccatcctgggcaaaaagagcgaaactgtcttaaaaaaaaaaaaaaaagaagtttactacctagaaatatttgaccaactccattttataggagaaaaaactgaaacttgagatgcctcaaaactatcaagccactacagcataaccatagcccagaagggaatcccccaagtgcaggatggaagtgaagtgacccttgttcaagcattgtacccagaagtcttcagaactctccagtggggagtcatgtttcatactggggaattctgtgggggcttccagggatttttcagtagtaaacagtaggaagtgttactgctttatttctaagtggtcttgaggtgtcactgcagttctgggcaagtccctatggactttttaaaggttagtacttgaatctgccaagagtcttagtgaaggaaatttcgtggccaaatgaggtagaaatctgaaccctcctgagggaatgggaatgagagaggtggggaatgagagagagaggttgcccaaggagaaaagaaacaaaggcagcccagggggcccagatttctgagttcaaagagaggtgacaaaaatgaagcagcccagcttgccgagatttggggagcaaagattagactggatttgaaaggtgaaaaaatgaggcagcattttaaattgggagagaattttctggtggctgggacttgtctaaagtgtcaacaaacaacactaatggcttactctgggtgaggcgaggtgtccggtactgtggctactcagataacaaaggtgtggatcctgtcttcaaggaactcagtctttcaagggaggcaggcatggaaataaatacagtgcagtgtgatacggacaaggtggcataagaaggggtggggcaggcagagtgggcttcagagaggatatctgatctgagtgttaaaatcaatcagagcttcaggctttattcttagggtgatggggttttcagaaagggaactgcaggggccgggcacggtggcccatggctctaatctcagcactttgggaggccaaggcgggtggatcatctgaggtcaggagttcgagaccagcctggccaacatagtgaaaccccaactctactaaaaatacaaaaattagccaggtgtggtggtgaacgcctgtaatcccagctactcaggaagctcaggcaggaggatcacttgaacccaggaagtggaggttgcagtaagttaagacggcaccactgcactctagcctgggcaacagagagagactcttatctaaaaaaaaaaaaaaaaaaaacctgaaaaacggtaatgtctaatttatgttttaagggatcattcttctggctgctgttcgaagcaagaatggaagcagaagaggaggctattgtagtctaggagggaaatgatggtggcttggggatggtaaaagtggtcaaattctggatatattttgaaggtagagctgacaggacttgctgatggactgcatatggaatcgagggaaaggggagttgaggttgactcctcagtgtggagcctcagaatgtaggcaaagagtcctctggaggaattactgggagtggggaggtaggttcagtagagctgaatcaagactactgattgtgataagtttgagacgtgtgatagaaatctaagtggagaaataatagaatggaatctgaagcccaagggaagtcagtctggaagtttagatatggaagtcatcagcattcagatggcatttaattccatggaatgagatgagatcacccaggttagagaggcatgtgggtggattgaggccaacatttagaggaggaggaggagcagatcaatggtgtcctggcaacctaaagaaaagtatgatcagtgtcctggggctgccataacaaagtatcacaaactgagaggcttaaacagcaatgtatttctggaggttggaagtccaaaatcaaggtgtctgcaaggttgattccttgtgagggctgtgcgagagtctgttccatgtttctctcctggcttctggaggtttgctggcaatctggcattccttggcttatatatgcatcaacccagtctctgccttcacattgccgtggcattctctccctgtgcatgcacatgtctgtgtccaaatctcctctttttataaggacgctgtcatcttggattagagcccaccataatgacctcatcttaacttgatcatctgcaaagaacctatttccaaataagatcacattcacaggtactaaggggactttagtactttatctttaggactttatcttttgggggacacagttcaacccctaacagtcaagaggagtgaacatagcaaagtggtcttggtgaccttgataagagctgcctgaatgagtggtgggggtgaaagccacattggtgtaggctggggagagtataggtgaagaggaagtggagaccataagcactaacaactctcgagaggtttcgctctggtggtgcagaagcttggaggggtgtgtatctagggaaggcttttttttattatttacttttttttgagacagagtcttgctctgtcacccaggctgcagggtggtggtgtgttcttggctcactgcagccctaacctcgttggctcaagcagtcctcccacctcaacctcctgagtagctgggactacaggtgtgagccaccacgcccagcgaattttttaaatttttgtagagacaaggtcttgctatgtcgtccaggctggtcttgaacacttgggctcaagccttggctcaagccccctgccttggccctgcaaagtgtagggattacaggcgtaagccaccatgctgggtggtctttttatttttaatatagctgatattaagttatgtaaatgtgaatgatctattagtgagagaaacgtgtatgttactagggagaagggataagagaggtcagaattccttaagtgaaaatggagggatggcatccaggaggtttcttgggttgtggcaggattgaaggcagattatgtgggtccagatgccggtggatttgttcagggaaagatgaggtgatttatgtccagttgtatctgttttttcttgaagtatgagtgtgatcataaactgagaatgtgtgtttatgggaaatgctggaaatttgaagaaagaagtattgtgagacagtctcagagtgtaggagaagcaaagcttctagggaactgtggtgggagtgcctggtgtcgatgagattgtgatcacaagtatgaagtgagtcactcagcatgtctgagcgatcttcttaagcaatgattagctgcaagggtgcaggcgcagaatgcgtgagtagttgggtttaactagggttggagttttgccagggagtagaagggcaagggggtagttttaatactggatcatggaaattcatgctgagtaaggagggaaatgaagagtgtgatggatcacaaaaagtggtaagagcaatggtttgtggtctctgaggagttaaccagcagctgaatagggttatcagggcagtgtggattggtaggaggcggcagccagagtgggagatactgcgatatcagattttggagctggtggtgactccgaaaaaatcaagagccatataccctttacctcagtctggcaaagtcttttaaaataaacagaattaactgaggttttaattttctccggccaaagtgccagtcagcttgccaatggaaggactttttgtcttcaccagcttgcacacggccttggcaacatgttatctctgtgtacagatctggcctccctctgccctctagcaggcttgggaaggctgagtcacacttttccagctgagacgaacaaggcaaagtcacatattctcagaggcagctctcaaatattttaattttttaaactttttttttccataaacttttgtagactgttgctcaggttctttctttcttttccctcccttccttccttctctctcccctccctctcccctccccccacactcctgtccccctcctctccccttccctctcctcccccccttcttccattcttccttttcttctttctttcctttcttccttccttccttttccctccctccctccctttcttcttccttcttccttcttccctttttttctttctttccctctctccctccctctcctttcctttccttcttccttttctttccttctttctttccctccctccctcccttctttccttccttccttcctttccctcccttccttccattccctcccttcctcccattcttcctttctcttcttttcctttcctttccttccttttctttccttttttctctttgtttccttccttccttccctccctccctccctctttcttcttttctttccttccatccctttttctttcaagacaggg

SEQ ID NO: 93400 - DNA, 13504 bp, Homo sapiens
aacagccaaaatggcctcacctaaacttttgtaagtgctttgatttttttttttcctttcttttaactttgggtcctcctatgggatagggatagtgtaatgacagtaactaaaaaattagaaattaaaaaaataaaatacctctagttggatcattagcctctaagtgtttataaaccttccagttttgtgttcttgggtacattttccccagaaagattccaaaatcgtttgtaaagaagctttttccaaaactgcctggaaatgtctatttttcaacagagagaactgtctctcctggggatttgaggtcaagataatcccacttggaacaagtcagcaggaaaatcatcctgtgtgctttcccccgcagtcaaaaatctgatagataggtgacaggtgggtgggtaggtaggtaggtaggtaggtagatagatagatagatagatagatagatagatagatagatagatagataattatggagaaaggataaaatgagtttcattgtgaagcttgaaggtacaaatcataaaggacactatgcagctccagggggaagtggcaatgggattgtgcttaggaagatggaatgaatacaagattctcctactggcaccttccctgagtcaccatagagctaatggtggagaggtggttccctcagagaagatcctaagctatttccctcaacagtgccctcaatttgtaccttcaggaaatccttggctgtatattatcacaacaatttcactacagctgtcctcataataaacaagaaaaacatttgttccactgccctccccaaccaaaacggtgtttgagtgtgtgtttgtgtgaaaggatactatactcagcaaatttttcatgccttttcaagtatcagtgcaaaatatggtaaaaggtgcaatccaattatcccttcgcgtttccaaaggaaagagttttctggtgtgaacctgacccttgtgacaaatcagaatgaaatggtgcactttaaagggaacgttcttggttgggaacatataagcaaggctgcaagtgcttgaaggggctgatgaaggctacagcatggactctgctcccatgtctgttgtcatcacttcttaaaggcgtatttcaacattgtgaacgtcattcctattatgtgacaagatgacaaatactatccaatgaaccacaacacataaaagggaaaaataacattttcttaccttaggagggcttgaaaggtccatctagccgaagacaccggctgataatactttgccaagatggtttcaacctggagagatgggttcaaagagcagaattttaacaaagaaggagggtgagataaaataaggatttagcaagaagccagcctgggaaacacaagatgaactttgaccaaatattctaaatctgaattcctaaaggaggcttttctcattgccctttttaacatccatattgaaataggtgaataggtgaaaatggtttccgatagtcaaagcagaatctctcaaaatataaaaaagtgaagaaattttctaacaaacataggcctccaaacattgtgttttcagttctgaccctgcctgggtatcacttacagacagacagattttttaattgtttctttgggttgcagctcatatgtctatatgagctataatcattctgtgaactggctccacttgcggattcaggctcacacagcagatctgctgccagtcagtcatgcagtcctgactgaatagtttttcacagcctgatcaatcagatatcatcctgaatggttgttttctcctactcggggttgtttgtttaagttcaacaagtgtcaggggaatttaatggaccatgtggtggcaacatcagctaagtgagtgattctttgatgttccctgttcttacaagaacaggggataagattgaatgtttacagacttcagaataaattttggggcatggggtggtgaaattgtattctggtaaaaactgggcatgattaaggagtttttttttttgttttatttgttttgttttgttttttttctgagaaggagtcttgctttgttacccaggctggagtgcagaggcatgatcttggctcgctgcaacctctcgctcccaggttcaagcaattctcctccctcagcctcccaagtagctgtgatgacacatgcacaccaccacatatgggtaatttttgtatttttagtagagacggggtttcgccatgttggccaggctggtatcaaactcttgcctcagttgttctgcctgcctcggcctcccaaagtgctgggattataggcgtgagccactgcgcctggtcgggagtttttatttaatttaaaatgtactaccttagttcctaggcatccctcacctctgaagatcatttacagcaggacaatattcatatgtatagaattattagatcttgggtgcttggagggacaagggattaacaccaagctctggaagcccgattttgtgattccatggatgaagtttacataaggggtgagaacaatggttcacatttcagagcatcaggttttgcctatacaactgtagaaaaattcatgtgtcttcagagcttcctctatatataggtctcacattgttggctctgtattacctctttgtgatgttattaaaccccataaagtggtttgggatttcaaagctaaaaataaaaggctcagagaagtactaattaagtgcacaggctcatgttcatgctgtcaggttcatatcctgtatccacccatcatctattaatgatttagaccttggacaagttacttaacctctctgaagctcagtgtttgcagcagtaaaaaggggataataacaggtatgtctcagaggagtggtgtgaggattaattggactgatgcctgtataggtcctagcacagtgcctgccacatagtgttcactgaataaacaataaccactcttttaggatgtgacacaagtaatctttgggaaacagagcctgcagaggagatgctatgtccatatgaactgactaaaaccaacttgattacaggcctgattacccaatttccacatttccttttgcgtgcctttcctttaattttctatccattcatttctatccatatcattgcataattctcaacacaacctagtgcaggataattctgctagagaaaaggcaaacagagtgagatgggctccacgcgaagcttagtagagtgaacagataaaaggaaacccatcatctggtttactgtagaatggttagtagggggattggtggaagcagaccactgaaatatatttttatatgatgtgagatattatcttgattttcttggccataataagcatggaccatcaaggggtgaagttaatcttctgggcatcttttcacacaggcatgggtgtgctcatgcctagcccccccaagcacacacacatatgtatttgtgtgcatatcaacacagctgcacatgcacatatgcagaacatccttctgatattagtgccctttcatttgcaataaattctgccttcaatcctgtatgacatagctgacaaaaggacacagttactacataagtgtttgaggcacggacggcagcccttggactcaaacattgatttgcaggtgttctgccatcytctataaagaaaagaccrtgtccttggcatcagtgatagagaaatcttcaaaggagaggttggttaaaaataagcattttagaaaaaaaaaaaaacacttgctattccactgtcactgcccgagagaggaagatgtggagtcaatttagtgagcttcaattgtagctgactttggaagaaataatatactcatgtctctttggatgcatactgaagagggagctatgtgaagggctgcrattttgcagattgcaacctgatcagacttccaaacacagactattacctaaaaacacagagagagaaatccctgtatcttagaggaccagtgatttaagggtttcccaattcatttctaaaatgtatgtgggaggttctctattttcataattttcttgtcaagcttgacaccaggaagaggtgtgaaaagggccaagctttattggcaggcaaggtcagacacttcctttacagggagagttcagaggcatcagaagggcctcttattccctagatcccataaacactacttgatacctaaaatgcaaccacagaatctacatttaaagtcatttgcttggaagtcacaagttaggaagggaggaagtccagtctccaaggtgaagagtggctggggagggaagagtgtatacaaatatcttcctcaggcatagaattggccaaaagacagattaaaaaaaatgctccacatgacttatcaccagagagatgcaaatcaaaaccacactgagataccatctcaaaatggttattattaaaaagtcagaaagtaacagatgatgatgaagatgcagagagaagggaatgcttatacactgttggtgggaatataaattagttcaactcctgtgggaaacagtatggagatttctcaaagaactaaaaacagatctaatattcagagcagtttcactgctgggtatctactcaaagaaaaagaaatcattttatcaaaaagacacctacactcatatgtttattgcagcactattcacaaagacatagaatcaaaacctaagtgttcatcaatagttgattggataaagaaaatgcggcacatatacatatggaatactatgcagccataaaaataatgaaatcctgtcctttgcagcaacatggatggagctggaagcaattatcctaaataaaatgactcagaaacagaaaatcaaatgccacatgttctcacttaaaagtgggagcaaaacaatgggtacatatgaacataaagatggaaataacagacactaatgactccaaaagagggaaaggtgggaaggggataatgggtgaaaattatctattgagtacaatgttcactatttgggtgctgggttcactacaagccttaacctcatcatcacacagtatttccatataacgaacctgcacgtgtactccctgaatctaaaataaaataagttgagcaaaaaaagtcttccttatcacagttctgcaaagagctggcctgcagaggtatcaacagtgagcaatcttcagagaatgaaagtggaaggccacagagtgggtgcattgacaatgagcattaaactgcaaaagagaaatgcaactgaaggtaaagttggttggctctatattaggggagaactttgaagagacatcccacatgcaacctgactccctgacactaccatataataattttccctcctggaggaagtggatacaataaacagattgtgagtatctcaagaagagtatcccaagggctccgctatgaaaggttttatctggttgcaataaaagagaacgtgtagcatcattaaacacccaataaaagccccccttcttgaaatcacacaattttgccttttatatttatataaaagaatagactgacacttattcaaccatgtttcaagtgaggcataagaacgctgtatatggctgtcaccatggcctttatttctacctcgagtggaacaaaaagagagatgagaaaattgtttcctagattatctagtggtgacagcagggacttggctataggtcttgagcaaaatcctctgggactcagcaacatggtccagtgtcctacatgagctttgatgcctgtgactctccatacagctgaaaaatcccacttcctggcagaggacagggaaaggtttcaggaacacctggctttgcaactgataagggatgaagagagaattaaattttcgaactggtttcagcttctttgcctcattatatctgtcagaagggaatattttctgtgaagttttactacgtggcatggctaactgagcctagaaaccctgtttactagatgagcctggaaagccaccatcttgggaggcttggccatggtatcagagaatagttggcaggtaaaaaaaattgcatatagccctgctctgtcgcctgccgcctctgcccgggcccgagtggttcactgcaccctgaagacagattccagacgccgggaactcgtgcctctaatcccagacgttatgtccagcaaaggctcagtggttctggcctacagtggcggtctggacacctcgtgyatcctcktgtggctgaaggaacaaggctatgacgtcactrcctacctggccaacattggccagaaggaagacttcgaggaagcaaggaagaaggcaccaaagcttgggaccaaaaaggtgttcactgagggtgtcagcagggagtttgtggaggagttcatctggccagccatccagtccagctcactgtatgaggacggctacctcctgggcacctctcacaccaggccctgcaccgcccgcaaacaagtggaaatcccccagcgggagggggccaagttatgtgtgtcatggctcaggtctggtttgagctcacctgctactcactggccccccagataaaggtcattgctccctggagcatgcccgaattctacaaccacttcaagggctgcagtgacctgacggaatacacaaagcaacacgggattcccatcccagtcactcccaagaacccgtggaacatggacgagaacctcatgcacatcagctacgaagctggaatcctagaggacccccaagaaccaagcgcctccaggtctctacmcgaagacccaggactggccaaagcccccaacacccctgacattctcgagatcgagttcaaaaaaggggtcttyttgaaggttaccaacgtcaaggatggcaccacccaccagacctccttggcgctcttcatgtacctgaatgaartcacgggaaagcactgcgtgggccgtattgacatcgtggagaactgcttcattggaatgaagtccyrasgtatctacgagaccccagcaggcaccatcctttaccaygctcatttagacatcgagaccttcaccatggactgggaagtgcgcaaaatcaaacaaggcctgggcttgaaatgtgctgagctggtgtatactggtttctggcacagccctgagtgtgaatttgtccgccactccatcgccaagtcccaggagcgagtggaaaggaaagtacaggtgtccctcttcaaggaccaggtgtacatcctcggctgggagtccccacggtctctctacaacgaggagctggtgagcatgaacgtgcatggtgattatgagccaattgatgccaccggtttcatcamcatcaattccctcaggctgaaggaatatcatcatctccagagcaaggtcactgccaattagaaccctgtacagggagaagctggggcttcctcaatttgcagatcccccaagtacaggcrctaattgttgtgataatttgcagttgtgacttgttctcccctgcaggcagcgtagtggggctgccaggcccccgctttgttccctggaccccctgaagccggcaaacctggtcatcaaagggaagggtggggggcagctgcggtggggagctgtaaaatgacgattaaaagaaaaaattgcatataaacttagggatcggtcactctccttctaaccatgaatatactccccacttgtaactctattgaataatacaaatgtaagttaccatgcacatataaagaaaaaaaatggtggaaaaattccttaagagtatgagcaataacagccagtagtacacctaaaaaaaagctagtgttactatggttaagcattggtttgggggtggtcactgaactctattgctttccaagttcttccagcttggtctaagtgagtgcatagttgcatgtctattggacttgaagaagtttctccagaaccgagaaatttgaagaatttttaaagtttgtatttctaattcattcatccatatgtttatccaataaatatttatttagagcctactatgtgccaggcactctccaagtaaaggggattcagtggtggggaaaagcaatccaaataaatcagctttatctctgctctcataaaacttatattctggatatggcaataggcattaacaaaaaaaaacccaattatactaacaaatgtaaaattccctcctgacttggtgctagggaggagaggaatattgtgagagcataagaagtgagtggttgatatagcctgaagggtaaaggatggttacttcaaggaaacaaagactcagctggaatctaaagtgtaagttggaattatttagttaaggagatggaaaggaagagagtccaggaagaggagacagtayatgcaaatgccttatggcaggaaggatcatagcacattcgggggcctgagcgaagcctggtgcgtggagcgagcatggtggggatgtggctggcaaaggaggtctgggcatacaggactttgtaggtcctttcaactatatcatttgccccaacattaatgggaaacctagaaatactattggcttttaaaactaactggtaatgccataatacaagacatttttttcttttttttttttctttttttttttttttttttgttcttttgagatggagtctcactctgtcccccaggctggagttcagtggcgcgatcttggctcactgcaagccccgcctcccaggttcacgccattctcctgcctcagcctcccgagtagctgggactatggtagctggtggcccgccaccatgcccggctaatatttttgtagttttagtagagacggggtttcactgtgttagtgaggatgatctcgatctcctgacctcatgatctgcctgcctcggcctcccaaagtgctgggattacaggcgtgagccaccgcgcccggcctatttttaaatttttttttaatgctgcagactccttacaaccgtgagtgtttctagaaagtagggtaaagttcagccctgccacatgtggctccttgggttgttcactgcatattcacatcacactccattgtgaccaaatgggctttcaggaggtgtatggcgaggcagtcctggttagacatcctctcttcagcagacagggttgttttctctaaatggaaaatcaaaggacacacttgaaattgaaagttgtgtgaaaggaatctaaattggttaaatgtcagatacatccatgatttatgtctcctttacatctcattgctgataaagctaacattcctctatttgttggatttgtatgtgtgtttgtgtgtaggcacatgcctagggaaaaaattccaaggcaaggagcccgtggaggtctgttgccttatttttactggtaccatggtaaggtaagggaaacatctggcctaggaaaaatgcaaatttcatgccatgtactaggcaactccctactagtttttcttttttaaaaatattacataagcaatttatattcagcgtaacaaagttacactgtaacaaagttagggaatttgtacgaccaaaaagaagaaaattgggaactcttaattcgattaacattttggtatacatactgtcaggtgttttttttttttcttcctccatgtgtgtacctttaagatttctaatacacttatgttattgaatgattgacatgctcatttttaatagaaaaattctcatttacgatggaaattattctggaggcaactggagacggaaaagtcacagcctccatcatgagatgagtgtttttctgcaaaacccaagttccacaacgagcaattcctgcttcccattttcaacataattattttctttcaagctgtaactttagatgacaatgaggataaataaaaagcatatcatgaggaaaggtaagtcaacatacttagacttttggtaatcaaaaagaattctccagagtggaagtttctcacctatgtctctagaggcttgggaagtcctggctaacattggcccttatgcagaaagcaatttgaggtgtggttattttacaaatctacatatactgcatgtattagtttcctagggctgtcataataaatgaccacaaactgggtgggtttcaacagaaaattcattctttcatggttcaggaggccagaagtccaaaagcaagatgtcttcaggatggattccttttggacactgtgaggcgagaactggtcccatgtctttctctgagtttctggtggttggtagcaatccttggtttatagcctcttggtttatagttccctggtttatagctgcatcactcccttcgttgcctccattgtcacatggccatctttcctgtgtgtggtgtcctctatgtctctgcgtctaatctccttccatttttctcataaagacaccagtcatcaggcttagggcctgccctaatccactatgacctcatcttcacttgtttacatctgtaaagaccttatttataaataaagccacattcacaggtactgtgaattaggacttgaatcttttttagaaacacaattcaacctgctaaactgcatatcttatgatcccatatataataatttatatcattcataactagcatcatcatagaaaaacaaaattgcaaagcagttttattttcatttatattgcatggatcctagctacaattccccaatccacaccagaaatattgaataatatccagaatgaaacaaacaaaacaagacaaattgtttcttttagcacactgtggaaagaccctagaccaacatcaaattaaatctaggcaatagaagggacagataacagattcatgagttctaagaatgttgtcttcatgtattaaggatgtattaatgtattgatttaaggaagaaaaacacagataagagtatcctgtagtggatgagcttttcatttttagcataggaaatactgctgtgtacaaaacaacaaagcaaaacaaatatgttattctgtaattttaatgtaattggaatggagcttatttacagagtgggatatgataaggttcagtttcactttaggtaggatgctttaagagaaagtttggttttctgagactttgggatatagtataatggtgagcacaaatccaataaattacagtaaaatttgttattaatctgtacttaattttccatatataattattttttctataaaattaaatttttctgtaaaataaaattctgtgcattgaattacatttgcccacagatttacattttttagatgaactgctgtattatgataattgtcattatgaagggatatgatgcaagtaaagggagggagggtctatgttctctgagtggatctgctacttaatagctttgcttctccagcctccatctgaaatcctgacacccagcctaaaccctatggctgttgcaatagacttaattctctttgttgtactatttctacaaaacacctaatcagcagtttgaatctagactcctgctgtagaaaagtgggaagaaaaattgcatgtatgaatgggtgacccaacaagttcctggtgtccacctgggacttccctgttgacctgggatggctgagagtcgcctgagccagtgtcctccccagtgtactgcatcttctggaggcattcattctctgcaacgcagactttcagaaggattcactgcagcttacaagatcccttctctaattgatttaaaaatggtcaaaaaaggcttagaatctatatccagtgattttaacaattataaaatactccatttactgggagtgcagtcacacctgcactcctggctactagggagactgaggtgggaggatcacttgggcctaggaattagaggctgtagtgcactatgctggtcaggggtcggcactaagttcaccattatggtgacctccctagaacaggggaccaccaggttgcctgaagaggggtgaactggtccagtttggaaatgaagcaggtcaaagctgctatgctgataagtagaggggtgacacctgtgaatagccactgcactccagcctgggcaacacagtgagtccctatccctttaggaaagggaaagggaaagggaaagggaaagggaaagggaaagggaaagggaaagggaaagggaaagggaaaggaaaggaaaggaaaggaaaggaaaataatttaaaaaagaaaaaaaaagaaagaaaaaatactccaatgggagggaagtgctagtaacagcaaaggaaaatagctggcagattcgaccactagtataatacagtagaataacaagtttctctatgttctactgtcatgaattgcatattaaaatgaataaaagtacccagctgtagcttaagagtatatgttgactgatgtttaagggtggtctgtggtgtagacttgaagtctatttgggggcctttctgcgccttgtcttaaactgctttgtgaaagggtagatgcaatgttcaaacgcaaacactctgggttcctttcctttcactaaggggaaatggagaactattacattctattgctggcagttgaggtttcctggttgtcctcccccaaccccataaaccattaataattttttgttagattgtataatttatagtatcagttttgaatgcataatgtaatactgtatactgaagggtagttagtctttcttcaaataggttaccraaaatgaaataaatacctagattaaatttccatactagggagaggaaaatgaaataatttgctgacytgcaaaaatatgtaatagacattgtggagataatctacattctaaaaaattacctcattgttttagtcatctcagatggtttcactgtaaaggcaattctttagaaaaaaatttgctgcaattgttgatcaaaaataattctttttaaataaaatgagatgaaaaatgttatttaaaaatatgttattatagaataataatctctaaatagtaataaaatgaggcaaaattagtttgggaacttataatgtgatataaaaaggtgaccaatttattttaatgtctttgattttgtgaatgaatgcgttacggaagctttaaaatatgatattttaagcaagagctgaaaaaattttgttttatctttatatttggtcctatgctttgttctaagaaaaaaattactagatacttaacagttctaaaaacttgtttgtatttctagttttgtacctgtagtttttctgtggttgtagaaaatataattcatgtttcatactgtgagacatctactgaaattactacctttttccatgccaccagctgctcctcgctggtgtctactataaattaataatattatttagtccctttccttttgctattattattatatttttcatggattcaaaccccttattttcctaagcttttgtcttcatgataaactatcaaacttcatctgtgggattggtattagatcctatggtaatcccaaatagaatttgaattttctctgggcattggttaccatttgttgtttattcctctgaaatggta

SEQ ID NO: 93401 - DNA, 12865 bp, Homo sapiens
caagttctgttggactagtgagcctcccccaacacctcctgaagtagaaccaaaggcctgtgcacacaccgtgcatgtgtgagtctgcatagagatgtcagcttcctgcagggtgttctgaagggatgtcctgttgtgactggactgtgacatagccacaggcccagaggcaggagtggctcagaagggagtggctggtcccaattttgatcatctaggaacaggaaggtccttagaaaaccatgccccagaaggcaggattgctggagagtggacagctgctagccagctcgctatctggatatcactctgcattgggagggaagatggcctctgccatggtgtaagagtccaggaaccaggcagtgaggacttcccagcggtcagtgcttctcacacttgcgggccaaagcacctttagatgaggccaaagactttacgttcctcattagctgactttttcccacttaagtggaaaaagaacccagaacctttgtaaaagttttaggggagaagggctttccctcttgtatcttggtgataaggttatgcatgactcatactttaattgcaatgtgtacacagctaaagtcttaattattagaatataagagccccaaactactgttattatagataagcgaaactatgcagtatatggttaaacaatccacaactaattaacattgaaagttggccgggcgcagtggctcatgcttgtaatcccggcactttgggaggccgaggcagggggatcacttaaggtcaggagttcaagactagcctggcgaacatgatgaaaccccgtctctactaaaaatacaaaaaattagctaagcgtggtggtagccacctgtaatcccagctacttgtgaggctgaggcaggagaattgcttgaacctgggaggcggaggttgcagtgagctgagattgtgccactgcactccagcctgggcgacagagcaagactccgtctctcaaaaaaaaaaaaaaaaaaaaaaaagaaaagaaaaaaaattaactacatttttgggaggtggacagagcaatgctctgtcacccaggctggagtgcaatggcacaatctctgcttgctggaacctccgattgccgggttcaagcaattcttatgcctctgcctcccaagaagctgggattacagacgtgtgccactatgccgagctaatttttgtatttttagtacagacagggtttcaccatgttggccaggctggtcttgaacacctggcctcaagtgatccgactgcctcagcctcccagagtgctgggattacaggtgtgaaccaccgtgcctggccctctatctgttaatttaaaagattagcagccatttagaaaaaacaacaaatgagacttttgcaagacaatctaaatgatacactaataacaatcctttgggaaagtgacatttcaaccatgtgagtttctgctttaggttatgaactccaaaatggactaaatggactaacccccaataatttatagtagctagtttttttttttttcacagtaggtaattctaaaccataaataaaatagaatctgaattttggctttgttcacctgtgggaacttaattaagaaagcactggcctttgggtcggttcaaatatagtggatgaggccaggcgcagtggctcacacctgtaatctcagcactttgggaggccgaggcgggcggatcatgaggtcaagagatcgagaccatcctggccaacatggtgaaaccccgtctctactaaaaatacaaaaattagccaggcatggtggtgcacgcctgtagtcccagccactcgggaggctgaggcgggagaatcacttgaacccgggagccagaggttacagtgagctgagatcatgccactgcactccagcctggcgacagagcgagactcttgtctcaaaaaacaaaaaacaaaaccaaaaagaaagaaaaccaaatatagtggataatcgtggatctcataattgtagaaatgaaggaattaagctaaaaaaatacataaaccagaatacctagtgctaaagttgaatgtccccaccaaaactcgtgttgacatttaattgctatcctaatggtattaagatgcaagacttttttttttctttttttgagatggagtttcgctcttgttgcccaggctggagtgcaatggcacaatctcagctcactgcaacctccgcctcccatgttcaagtgattctcctgtctcagcctcctgagtagctggaattacaggcacatgccaccacgcccagctaatttttgtatttttagtagagacggggtttcatcatattggtcaggctggtcttgaactcctgacctcaggtgatccacctgccttggcctcccaaagtgctgggattacaggcatgagccaccgtgcccagccgatgtgggacctttcagggttgattagattgaatagattaatgccattgtatggcatgatagaaatcagttcagcctctttgcccttccacctctcactatgggatgatactgcagccaggccctcataagatgccagtgtcatgctcttggacttctcagcctccagctctgtgggaaaaacatttattttctttataaattacccagtctgtgctgggtgtggtggctcaagcctgtaatcccagcactttgggaggccaaggtgggtggaaggcttgagcccaggagtttgagaccagcctgggcaacatggcaaaacccatctctacaaaaaaacacaaaaattagctggtgtggtcgtgcgggtctgtggtcccagttatttaggaggctgaggtgggaggatcacttgagtctgggaggtggaggttgcagtgagtcgagatcatgccactgcactccagtctgagcgacagagagagaccctgtctgaaaaaacaacaaaataaattacccagtctgtattattctgttatagcggcaggaaacggactaagacacatagattatgttactgtgtttatttatttattgttgtttttgttattcctgactcttaatatagagtcttaatcagatgagcattctggcctggcctccgcagaaggggcctgtctttagccacggacaagaggagattaaggccagcatcatccacaaggtcaaggggctgcagagccccctaaggccagtgtgctgatgggcccctcaatattgtatcctacccagtggattggcaggactgggtgactgacaggaatcattgttgcctctatgggaaagtcttatggagatgggggctgagggatgttgaagtttagccattacattacagtgagagagattacattactaagtgtcagagacccttctgggcactttctgttactgtcacaggtggctttcacagtaaccttttaagagagctcttttcatttttcttgtacatggctgtccagttgttccagcagcatttgctgaaaagactatctttattgtattgtctttgctccttgtatttatgtgggactatttcttggctctctattctgctcaagtggatcaatttgtctattctttgccaatgccactctgtctttctaaaattaatttttcgattgactaattttatacatttgtggtgtacatcatgtttatatatatatgcacatacatacacacacattgtggaatggataaaccaaacaatttaataatatgtatattacctcacatacatattttgtgtgtatgtgatgagaatgcttaaagctattctcatactattttgaaatacacaatatgttgttattaagtttagtcaccataaggtacaatagatctcttgaacttattcttcctaactgaaatcttgtgttctttgactaacatctccccaattccccgacctcccagcctctgataaccaccagtttactctctatttatgagtctggctttttctatactccacatataagtgagattgtatttgtctttctgtgcctggcttatttcacttaacataatgtcttccaggttcatccatgttgtcacaaatgacaggattttgttttttaaggctgaatagtattccattttttatatataccacattttctttatccattcatccattgatggacacttaggtggattctatatcttggctattgagaataatgctgcagccaggtgcagtgtctcgtgcttataatcccagataattgggaagctgagacagcaggatcgcttgaggccaggagttgccctgggcaacatagactctatctctaaaggaaaaaaaaaaaaaaaaaagaataatgatgcaatgaatatgggagtgcaaatatctcaacgtactgatttcatatcctttggatatatacccattagtgggattgctggatcatgtggtatttctatttttaaaatttttgcagaacctccataccgtttcccacaatggctatgctaatcaccactctgtcttgattactatggctttatagaaagtctaagtcaggtagtggtggtctttgactttatttttctcctatattgtgctggctaggtcttttgcctcaccatataaagtttgaatcagtttgttaatatccacaaaataacttactgaggttttttattgagattgcattcattccacagatcaagttggaaagaacagatatattaacagtattgagccttcctgactatgaacatggaatatctctccatttgtttagttctttgatttcttttgtcagttttgtagttttgttcatatagatcttgtacatattttcttagatttgtacctaagtgtttcatttttgggggtgctaatgtaagtggtattgtgttttaaatggcaaattctggaccaggcacggtggctcacgcctgtaatcccagcactttgggaggctgaggcaggcagaacatgaggtcagaagttcgagatcagcctggccaacatggtaaaaccccgtctctactaaaaatacaaaaattagctgggcatggtggggcacacctgtaatcccagctactcaggaggctgaggcaggagaattgcttgaacctgggaggaggaggttgcagtgagttgagatcgcgccactgcactctagcctgggcgacagaacaagactccgtcttgaaaaaaaaaaaattaaatggcgaattctacatgctcattgctgatacatagaaaagtgattggcttttacatattaactttatatcctgcaaccttgctataattgcttgttagttccaggagttttttatgtgtggattctttttgattttctacatagacaatcatatcrtctgtaaacaaagacagttttatttcttgttccaaatttgtataccttttagttccttttcttgtcttactactttagctaggacttccagtacaacgttgaaaagctgtgttgagagggtcattcctgccttgttctgatcttagcaggcaagcttttagtttctcaccattaagtgtgatgttagctgtggaagttttgtggatgttgtttatcaagttgagtaaggtcttctctattcctagcttgctaagagatttttttttttttaatcatcatgaatgggtgttggatgttgtcaattgctttttctgcctctattgatatgatcatgtgattttcttctttagccagttgatttaatggattacattaactgattttccaatgttgaagtaactttgcatacctgggataaatcttacttaggcatggtgtattgttcttctcatacattgtggatttgatttgctagcattttgctgaggatttttgcacctatgttcatgagagatattggtctgtggttttctttttttgtgaagtcttcatctgattttggtatttggctaacgctggcctcatggaattagttagaaagtattccctcatggaatcccggcctcatgaaatgagatagaaagtgtctgtcttggctttgcagacgccaccatcaggagccccatactatcagccatggtcaaccccaccgtgtccttcaacatcrctgtcaatggtgagcccttgggctgtgtctccttcaagctgtttgcagacaagtttccaaagacagcagaaaactttcgtgctstgagcactggagagaaaggatttgattataaatgttcctcctttcacagaattattccagggtttatgtgtcagggtggtgacttcacacgccataatggcactggtggcaagtccatctacggggagaaatttgatgatgagaacttcatcctaaagcatacaggtcctggcatcttgtccatggcaaatgctggacccaacacaaatgattcccggtttttcttttttctcttttttttgagatggagtcttaactctgtcgcccaggctggagtgcagtggcgcgatcttggctcactgcaacttccgcctcccaggttcaagcaattctcctgcctcagcctcctgagtagctgggattacaggcatgcgccaccatgcctggctaatatttgtatttttattagagacrgggtttcaccatgttggtcaggctggtcttgaactcctgacctcaggtgatctgcccatctcggcctcccaaagtgctgggattayggcatgagccacctagcccgggcaattcccagtttttcatctgcactgccaagactgagtggttggatggcaagcccatggtctttggcaaggtgaaagatggcatgaatattgtggaggccatggagcacttygggtctgggaatggcaagaccatcaagaagatcaccatcgctgactgtacacaacttgactaagtttgacttgtgttttttttttgagactgagtttcrctcttgttgccaggctggagtgcaatggcgccatctcggctcactgcaacctctgcttcctgagttcaggcgattctcctgcctcagcctcccgagtagctgggattacaggcatgcgccaccacacctggctaattctgtatttttagtagagacggggtttctccgtgttggtcaggctggtcttgaactcctgacctcaggtgatcccacctgcgtcagcctcccaaagtgctggaattacaggtgtgagccaccgtgcccggcctgacttgtgttttatcttaaccactagaccattgcttctgtagctcaggagagcaccctccatccatctgctcgcagtatctagaatctttgtgctctcactgcagttccctttgggtttcatgttttccttgttcccttccatgcctagctggattgcagcattaagtttatgattatgaaattaacactgaataacaacaacaacaaaagaaagtatgtcttctggaagagattatagaaaattggtataattttttccttaaatgtttgatagaatttatcagtaaacccatttggggctgatgttttctgtttctgaatgttattaattatcgatttaatttatttaatatatgtctattcatttcattttttaaattaattttttttataagacaaggtctcactatgttgcccaggcttctctcaaactcctgggcttaaattggcctcccaaagggctgggattacaggcatgagctactgtacctagcttcatttcacttttagttaaatttgttttgaataataatagatttaactttgggaggccgaggcggacagatcacctgaggtcgggagttcgagaccaccctggccaacatggcgaaaccccatctctactaaaaatacaaaaactagccgagcgtggtgacgggtgcctggaatcccagctactggggaggctgaggcagggcaattgcttgaacccaggaggtggaggttgcagtgagctgagatcgcgccattgcactccagcctgggcgacagagcgagactccatctcaaaaaaaaacaaaaacaaaacaaacaaaaaaacccaataacaataacaataatagatttaaagagttgcaaagctagaacacagagtttccataaaccccagctttccttaatgttaacatctaacaaaattctgtcaagactaagaaactaagaaattaacattgctataatactattcgctaaactgtagactttatttggacttcaccagtttttccagggcccattaatgcatttagcttttgggtctccctagtctttctgatcatgagtttctcagtctttacctgttttcatgaccttgaaagttttgaagaatactggatagataatttgtaggatgtccctcactttgggtttgcctgatgcttccttatgattagattggggttatgggtttaagggaagaataccatagaggggagtgtcctcatcacatcatttctggggggcaagatgttaacatgactctgattgcttggtagtgtctgctacatttctccactgtaaagttattatttttcctttttcatactctagtctttggaagcaagtcagcaagtccagcccatattcaaggtgagagaaataaaattccaatctcctgggaaagagattctcgtaatatatgttttgaaattcttctgtaaggaagatttgccccttcttccctatttatttatttaattatttttgattaaataaatcagtgtggaatgaatatttatttatattttgggtcataatccaatactattgtaactttgttgctcggattattccggctttgtccatagggagctctttcaggttgactcctgtgtccctctgacatgcccttattttttggtggtgagggttgggagatgggtggcggttactttctggcattacaagatgttccaggctcaccttatatttttcctatgccagccctagaatcagctgtttttctatggagccctgaatccttttatcagagaatgacttatcacaaccaaggtctaggcactgggtgctcacttcactcttctaaggaggacacagaggtctcaagacctgtgggaactcacacaggcacataaatggctctcacttcagcaccactttagagctgattcagctgggcatggtggctcatgcctgtaatcccagaactttggcaggctgaggcaggcggatcacctgaggtcaggagtttgagaccagcctggccaacatggcgaaacctcgtctctgctgaaaaatacaaaaattagctgggcatggtggcgcatgcctgtaatcccagctacttgggagcctgagacaggagaattgcttgagtcggggaggcagaggttgcagtgagctgagatcatgccactgcactccagcctgggcgacagagcaagactccgtctcaaaaaaagaaaaaaaaaaaaaaaaagagaaagaaaaaaagagctgattcagctcagactttgacttccccgagttgatgagcaattttccatgcaggtctttatttcttaaagcttctgtttttcagtatgcagggcttaggcactagtaattttattccctaatatttggagactttcctaaaataaacattttacattttggtaacatgattcacttagagaattgaccagaatagacaagaggaagaagccggtggagggaggaggcacattgttctttcctgtggagtatttcccaattcctgctgctctttccacatccctgggcctgggagaaggatggcacccttggaccatgacagaaaaatggtgatttggaaatacctgcctcttctgtctccctacccttccatttcagtgcccattctccctcccaacccatggcccatgagcttttccttctcctagcctctcacctagtgctggctcctcagagggaagtgaaccatcaccccctggagggtggaactggggagagagaggccagagcctggggctggggcagaagctgcagcaggaaggaaggaggttagagagacagatgaggggtgagatgtgagtgctcagagggagaatgaggacatccccagcatctccatagaggagggaggaaggggccttgggtgctggggcagagaggggggcaggatctggatgggacgccccaccctcagcctctggtcctctgacaacacctcacctagtcacactgaggggcttctccaggcccaggagcacctgcaggcaggtgtatctcaggccttctctgggagggccccccacagctgcccagccctgatatgtctcatcttcctgggtctggtccccttgagtcttgagtccagagttggctcctccccttcctgcagccaggtcagagtgatgttggcaagtgagaagccaggtgctctacatggcaaggtgtggttgccctcagggtcytccttgtcagggaccacaactttggggaagtcggggaggcaccggatgcaggagatagagaacagagaggtggagtgagagtgggacacacttcagcctcccctcctctcctagtcttcctccacatgccagtgcctttccctccccaactccagcacttctaacagccacagcaggaaggggagacccaaatccccatcactctctgccacagtctctgtgagtgtggccacctccatttccactgcagctttagggtctgccccagagcagagtcctgggtatgcttagagcgggatactggaaggttcttccttcaaatatctgcatggctgtttctctccttctcaagtctgctcacatggctcctccaagaggcctaccctgaccacctgcctcggcctcccaaagtgctgggattacaggcgtgagccaccacgcccggccattgtcctggctcaatctgatcaggaattcttttttacttttttctttttgattttttaggttcaagggatacatattcaggtttgttacatgggtaaattgtgtatcacgggtgtttggtgtgcagataattttgttactcaggtaatcagcacaatacccaataggtagttttttaatcctccccctcctcccaccctccaccctcaaggaggccccagtgtctattgttcccttctttgtgtccatgtgtactcaatgtttagctgccacttataggtgagaatatgtggtatttggctttctgttcctacattaatttgcttagaataatggtctccacctccatccatgttgctgtgaaggacatgatttcgttcttgtttttttggctgggtagcgtaccatggtgtataagtgctgcagttttcttttcttttcttttcttttttttttgagacggagtctcattctgtcacccaggctggagtgcagtggcgtgatctcggctcactgcaaactccacctcctgggttcatgccattctcctgcctcagcctcccgagtagctgggactacaggcgcccgccaccacrcccggctaattttttgtatttttagtagagacggggtttcactgtgttagccaggatggtctcgaactcctgacttcgtgatctgcccgcctcaccctcccaaagtgctgggattacaggcgtgagccaccgcgcctggccctgtgccgcagttttctttatccattccactgttgatgggcatctgggttgattccttacctttgctattgtgaatagtgctgcactgatcacaaattcttaaaagtggagataactgaagaaatgtaggtcaggtgtagtgttagatttcatctacagtgatttctacatctagtgaaatatgattgtctctttttaaattattgaattaagtgttaaaatgcattaaaagatttaaagtttaaatattcttttattcttgggattcataacttggtcaagatatttaatttgtttatagcacactgatggacacagtctactatttttctcatctattttacatctaattactaatagtgattttcctatcttgtttctttattatttgttccctaactggctttagaattaacactattcatagctgataaagtgagttgcctagctttctgtattttgctccattctcttgaatattttaaataagtccaataaccttctttgaaggtttagtaggacttccctgtgaaacaatctgtatatagttgggcagagatagaatttttacaactgttttaacttcttacttgcagtaagtcttttccatcgacattttttttttataatttcaagattgtttacatctctactatagctgcagtggcatatttatctgtcataacactgtcttgctcttaattaacattgtctgttttttttctctgttcaaagaaacagctgcttttggcaggctgggtcctcagcagtggcagctgccaggtcagccttggtgagtggtgactcaattgctctgtccatgcagtgtccatcccagccaccacggccactttgtgcagggactcatgagcaagccttgtgcggctgagtggcatcatccatcaagccatctcgctcacctggttacagggagccccagccccttggagaccctctggcaggcatccatatgcaacctctatcttcacatgctcttcccatggaaagtggtcagtgcacacttctctcttccatcccccaattttacaactttattttccccaagttccagactggccaggcaacccatgagtcactgcccttgattcattcattcatgcactactggggcataatttctaccctctacctcctgtggtcttgtttgggttttgattcctagttcctggctcgacagccctttccaaagctgttctggtgtcagctcccaagcctactgctcttgtagattctcctttttatatctgagtcatgggcatttatttcctggaattaaaaaaaaattcactggtattttcaatgcagcatttctaaggacttggagtaggagaa

SEQ ID NO: 93402 - DNA, 14885 bp, Homo sapiens
cttctgggttcaactgatcctcctgcttctgcttcagatcaccaaatagctgggactacagtcaccgtgcctggctaacttttttttttttaatctttagtagagacagggtcttgcaatgttgcctaggctggtcttgaactcctgacctaaagcgatcctcccacctcatccccccaaagcactgggattacaggcatgagccaccacacctggccacaaagcagtattaccacatttttacagatgagcaaactgaggctcagagaggtgaagtgagttgcccaagatcacacagaaacaggcagagctggtatctaaattcagactctgaggctacagacactgcacttctttttcttcttcttcctcttcttttttttttttcctttttttagagacaagctctcactctgtctctcaggctgggatgcaatggcataatcacatctcactgcagtttcagcctcccaggctcaagcgatcctcccaccttagcctcctgagtagctgggactacagggtgcaccacaaccacacctggctaatttacttttatttttattttttgagacagagtcttgctctgtcacccaggctggagtgcagtggctcgatctcagctcactgcaacctccacctcctgggttcaagcaattttcgtgcctcagcctcccgagcagctgggattacaggcgcccgctaccacacccagctaattttttttttttttttttttttagtagagacagggtttcaccatgttggccaggctggtcttgaactcttggcctcaggtgatctgcctacctcagcttcccaaagtgctgggattacaggcataagccactgcactcagccactaatttttttatttttattttttgtagaggcagtctcactatattgcccaggctggtctcgaactcctgacctcaagtgatcctccagcctcagcctcccaaagttctggacaacctgtgcacactaccatgccctactcagacactgcacttctaactactaccttttaattcacaagtcagagaccaagaaagaggcagacacccttaaatacagagaaaagcagagaaataccgacactaagaaatgggaggcaggggaattgagagagaaaatggaaagaaacagagaaatgaccagagaaagacagatgagcaatgacaatgggagttctgaggactgaggctctctccctcaatcccgagcccctcttttctttttctttctttttttttctttttttttttggagggttggggggacagagtctcactctgttgcccaggctggagtgcagtggcatgatctcagctcactgcaacctccaccttcagcgctcaagtgattctcgtgcctcagcctccctagagtagctgggattacaggcatgcaccaccatgcccggctaatttttgtatttttagtagagatggggtttcaccatgttggccaggcttgtcttgaactactggcctcaagtgatctgcccacctcagcctcccaaagtgctgggattacaggcatgaaccactgcactcggccctcccaccctctcactgaaattctctgaaattctcccctttgggatgaggatggcaaccccaggcatgtaccctcccaacctgggacccgacctaataccctaacatcctgctgacagtggctgttctcgctgggcaggcgtcccaaagcacatcgagccagattcaggcagagtggaactggcccctcagccatcagtggaggtggcctgggaggctctaccctgaacggggtctccccaaagtgatgcagaaactgggacatgctctgctgagcatggggctgactggagtgaggcttataggcagtgcccacatggggattaagatgtcagctctttaatccccacactgttcccatcacaggctgaccagagtctgccccaggacccagccagggacacagaggtcgggggagagagggagaagagagggagagacagagagactcagaggtcctgagaaagacaggcagagagagatgatggagaaaaacacgtgaagacactgagaagagatggagaggaaaaggaagagacagatacgcagggatggcaaagagatcctggaaaacagagaccgggaggagaaagagagccactgagaaaagggaaagacagtgatgtccagagagaggaaagacaaagagaccctaaagcaaagataaataaagagaacagaaatgaagagagatagagagacctgagagaaaaagaaaaagggaggaaaagaaagagagaaacagagaaatccagtctaattacaaagagatagaaacaccaaggcgggaggatcacttgagcccaggagttcgagaccagcctgggcaacatagtgagacctggtctctataaatatttttaaaattagctaggcatggtggcacgcacctctagtcccagctacttgggaggctcaggtgggaggatcacttgagcccaggcagtcatggctgcagtgagctgtgatggtgccactgcactccagcctgggcgacagaacaagacagacagaagggaagggaagagaagaagaaagggaaaagaggggaggggagggaagaaagaggctgggcatggtggcttatgcctgtgatcctagcactttaggaggctgaggcaggaggactgcttgagaccaagagttgaagaccaacctggccaacctaacaagaccctgtctctataaaaaaaaaaaaaaaaaacaaagagaagtagcgaggaagaaaaattgggcattcattcaacaaacatttactaagtgcctactgctgtgctgggcactactttaagtgctgggatacagaagcgaacaagacaaaatccctgctctagaagagctgacattccagaggacagcccacccgagcaaaacggaggaagagtcaggagctggggagaaaccagaagccataataaacaggatccattaaagcctgtcacagagggtggggtagggctgggggaggatgcagcttactgtgccccaccacactcccgctgtcagtggagtcagcagctctgagcaggggtcctgccccacaacccctgtcagtcaccaggttccagaaaggctgacaggtaggaagacccaggataggggaggacagaatatggaggtacaagggggtaaacatgcggaaaggcacgctgaagaaataaggagaggcacagaagtgccaggctgagacaaagggaagcacagactaggggagatacagggaggggaagacacagacatactgaaaagagagacagaaaacagacacaaacagaggcagagactgagagaaaagagagagagatgggaagagacagaaagaggagagagagagatgaacacagaaacacagagactgagagtgagggaggctgggcgcgctggttcacaactatactcccagcagtttgggagaccaaggcagaaagattgcttgagcccaggagttggagaccagcctgggcaacacagtgacatcctgtctccttaaaaaatacaaaaattggccggacgtggtggtgtgtacctatggtcccagctacttgggaggccaaggtgggaggcttgtttgatcccaggaggttgaggctgcagtgagccatgatcgtaccactgcactccagcctgggggacagaagccaggctctgtctcaaaaaaaaaaaagaaaaaaggaagggagggagggagggagggagggagggagggagggagggagggacggacagagggagggagggagggagcaagcaagactgagagatgaaacaaagatacacagagaccctcccagagacaatgccagtcctaggctctgcacagtccaccccccgcccaccatctccccaggtctgggccctgtgccaggcacttggaggaaggctggatttggccaagcagggacaggcaggagggtggaccacattcctgaacagtctgttccaaatacagccccaacctcactgctcccaccaccgcagccctggcccatccaggccagagtctgccccctctagcccatgccctaggatgggggttgggggggatagatgagagaatgagggataagtttgtctgtcgtcatggcctggcctcagacagggacttgggggactggataccagggggttcagcagcatgggcacagaacatttgggggcatctgggagccagtgccttggggatagagatggtagattcagggcaggacataatatggaggtacaaggggatcaacatgcagaaaggcaccctgaagaactaaggagaggcacagaagtgccagactgatggacacccagaagccagggaaattgaaggcagatctggggaacaagcatagtacacagggtcctaagagtaatggaagtgacaagggctcaggtgtgagctcctaggaatcacaggcacagagsacaggaatgccaggggtgtctttagaagtgtatttgagccaggcgcagtggcctgtagtctcaacacctcgggaggccgaggcaggcggatcacctgaggtcagtagcttgagatctgcctggccaacacggtgaaactccgtctctactaaaaatacaaaaattagccaggcctagtggtgcatgcctgtaatcccagctactcaggaggctgaaacaggagaatcttgaacctgggaggtggaggttgcagtgagccgagatcccactgctgcactccagcctgggcaacaagagtgaaactctaagaagggaaaaaaaaaaaacagaagtggtgtatttgagagtcggtgtgtatttaggaatcagaggtacagggtacagcgttcaggggacccagaggtggcccggagattgaggaatacacacttacaggccaagtaaattggactcaaaggtgctaggggctcaggagggtgcacctgttgtccaggtgtgttgccatgaaaatgctggtgcacgaaagttgctaagtaagacaggctgaggcagacacacaaaaaaagccagggggagccagggcacagctccactagggctgggggcggggtggagacgtcgggttggggaatccacggaatgagcagcccggagacgcccactcctcccacatcgggtctccgccccgctccacccctaagaccccttggaaatcaaatagaggtgaaggggtgcaggcgtggagaattgcaggcatgtcgcgggtatcgctgcgctgctgttgtggcttctggtgctggcgccggcgtggtgggggtagggtgggtgccgcgctcagatgcgggggtccctacctccccggcccaggccgctcccattgctggggaacttgcagctgcagtccggaggcctggaccgcgcactccattcccgacaggaatgggggaacggaattctggattcgtgaaggtggggctggggactagaactcctcctgaatgaagacagctgagggtttgtactctatgatcctgaggaaggacaggaaggatgagtgctccggactgctgagtactaggaaaggagaatagggagtggagagcctggggccgggacactgggtcgtaacgaaggagcccagagcaggaaatcaggttgtgggaagaggggagcagggggtctgttctggttcagggtgggcaggctgagtactgagggcccaggagacgactctgagggtgcaggaggctgggaagctggacttccaggtcctaagggaagaaggaagtgggggcctggactcctggatctcagggaggaaggagctggggatttgaattcctgggcctgaggaatgagggtctgagacgaggactcctgggtctgaaggaagagggagctgggggcaatggctccgatgaggaaccctatgggcacccgctgagcaccggctacccgtagctctccggccgctggggccgggtgttcacagtgcggctgggcccgcgccctgcggtggggctgtgcggctacgcagcgctgcgggacgcgttagtgctacaggcggatgcggtctctggccgcgggtccatggcagtcttcgaacgcttcacacgcggaaacagtgaggccccggcgctggacttgccggyccggacgctccaggctgggcgggtaaatggtagaggcgggcaaatgggggcggggcctaatagagactccagctaatgaggtgcaaacggccgagagagggcggggcggcgctaaagcgtaaggttagaatggaggttcatcctgcagccaacaggagaaaagagcctaagagtcaaagcccgagagccagcctaggtcagggatgragcccagcaaaggcggggccaatgtgtggatagggcacttggaggtctggtaaagaagcaaagggaacgaagccggccgcaggagtcggaggcccctaaagggatgtagccagtgacccggcgcttcctggatagggcgtggccggctcccsggcccgcctcctttcccgtccccaccacaggaatcttgttttctaaccggccgtgctggtggacactgcgcaattttgcacttggagcgcttaagaagttcgggttggrtacgcggaccgtcgaggcgcgcgtcctggaggaggcggcttgtctgctagacgaatttcaagccaccattgcttcggcctggccgggagagcggaagggcctggtgtgggagagtcccttgcactgccaagacggggccactggaaggtatttgggtggaagaaagccagtaagcccatggggctggctgrgggcaggaccamgcgttatgaccaccgtcctgttcctacccccaggrgccccrtttgaccccgtgcggctactggrtaatgctgtatccartgttayctgttcttgtcttcgggaaccgctatcgctatggggacccggagttcctgaggctcctgaacctcttcagtgacaacttctgcatcattagttccagatggggcgaggtgagagggccggccacaatctttccttggtgcgtccagccttatgccaaatcccgagtacacagacctacctacaatggatcattagaatgggacagattcctggaagagttctagaacatccagtatcaaagtcctagtccaatctccctgtagggaaactaaggcctagtggccttgtgcagggcccatgttgagacagaccctgtctctccagatgtacatttgcctgtccctcatggactggctcccgggcccgcaycaccgaatcttccgaaacttttcggagctgcgggtcatctctgagcaaattcaacgacactggcagatgcggcagccagcggagccccgcgatttcattgattgcttgaccagatgggtaaggcatgggtcccagctctctaaactctatccatgccgcccaccaacaggtgcctggcacgcggcagcmcatctcctctgcccacagtaacagcaggacccggasagccatttccaggagtagacgtcggtaatgacgacgcattttttttttggcgtcaccgaaaccacgagcaccaccctgtgctaygggctcctcattctgcttaagtacctagaggtggcaggtgtgcaacccggagagacccagaatgggaggctgcagtctggggatggctggagggtcctggaagtgcgcagctcacagcctcccccggcctgagccaaggtgcaggagctggaccctgtggtagggtggaggcccgccccaagcctggactatcgcgtgtgcctgccctacgccaacgcagtgctgctcgagatccagtgcttcatcagcgtggtgcccctggggctgccgcgcaccctcaccctcgacacccacctgcacagccactgtctgcccaaaggtacccactgagtctggggatcccgtgcgggacscgggtgcatgagatcagccagaatcagcaggtktgcgctgtgcagaccaaaacacaatcagttacccctggagcaggaaggcasctctgccttcccttaggctttttgttgttgttgtttgagacggagtctggctctgtcattcaggctagaatgcagtggcatgatcttggctcactgcaacctccacttcctgggttcaagcgattgtcctgcctcagcctcctgagtacctggtattacaggcacccaccaccacgcctggctaatttttgtatttttagtagagacaggtttcgccatgttggccaggctggtctcgaacttctgacctcaagtgatctgtcctcagcctcccagagtgctgggattacaggcgtgagctacttgcccggcctattcccttgggcttttaaaaagcgtcttggatggaggtggtgcaggtgctcaccaagcccgcaggtaacccaagttgcatgtatccccagggcacttttgtgattcccctgcttgtgactgcacaccgggaccccactcaattcaaagacccagactgcttcaaccctaccaacttcctggacaagggcaagttccagggcaatgatgctttcatgccctttgcctcaggtgcaggcagaggaggaaggggaccagcctggactggctctggggtacctggtgctcactgtgcacctgtgtacccggcaaagcagatgtgcctgggcacaggcctggcccactcgggtatcttcctattccttayggccaccttacagaggttctgcctgctccctgtggtacgccctggcaccatcaacctcacctgcagtgcactggcctgggcagtgtccccccagacttccagctccagccagtggcctgctgaggtcaggctccactatggtgggctcactggccctcaaacctccataccctcctcggtcaataaaggccctaaattgcagatggagtcagatgtgtgcagctctgaggtaaacttttatttcttggctgacaggacttccacacccatgctcctcctggcaccttttactctgcccaagcagtggcagcccagtccaaaaggtgcctgccatggccaaaggggttggggagtcacttcacattccakgctggaggagtgagaggacttgggggtactcctcccaccccattgccagcaagaggccatgactcacctcaaccccaagtcctgcatcctggtgggaagtgacaatgcctcctcccagctctccatacctaatggggtcatgaccagacagggtaggacccaggcccccagcttcagttggtaacggtggcctccacggctgccccctgtccaggtgacaaccccagcccccatgatggggcagcaaaggtctcttctcctccttggtcctcagcaacagacagagccctccacaccaggcaggacagaggcaaagtcagaagcagcagcggtggcagggaaggagcagccagcacaggcccagggctctcctgaagtcatttaagctgtctgccatgcggctctgggactggccactaggtgggcgtaggcggctgtgatacaggtacttggacacctttctgtcctgatgctgggggtgagaggggacaggagacagtgagtcatcagaaggacaaagaagccaagggaaacctggggagatggggagaggaccaggaagaaatggggctcctgttggggtaccaggagagtgggctaaggaaggtgggcagagatgaagaaaaatgagtggtgggatttaacaagaggctgatgagggggatggggtggcatcaggcccaagagggcccacagaataggaaggactgaagggagggaagcaggtacctagctgatacttgtctttrgctgctgcccgctccttggcatcaaaataccagacagtgatggcrtacctggagaccagggtggttggacattagttttctgcaattccagctaccatatccacacacactaggcggccatccttttgagccacccggttctgctcccacctaggccccctctcaatacttcgtcgctccctagtcactctgaggctctgacaggacattgtcacagggggagcacctgggtgcktctccagaagtacaggtcatacctggtggcataggctggcttcacctcgtgggggttccgccggtcagaccagaaaatgagcaaccggtcaaagagtggctcgatgttggctaccacgggccggccctcagggaagatctgcagcaggccgccatgcacctgggggcaggccaaaggatgaggctagctggtacggccaggagccgctgcctcccacggtgccccgggagcccactaggaggcgcagcgtctgcctgcatcactccctcccacccctcgggctctcaaagtgaatgacaacccagagactgcatcaccatggagatgggcaggaagctactaaagacaggaaaagggggaaagtgttcattacaaggccgggtggggctgggcagacagcaccattcccggaaagaggggagttcccaccacacagtccgctagagaggaggaggtgccatttcccaggaagagccggcagatcgcactgcccgctgtgtgttgagaagagaaacaggagaatgccagaatctgggctgagagtggaaaatggagtggacgcacgccacccccgccccagccctagccccagcgccaccctcaccctcaccctcacccctaccttaacgtcccagttctgattcaggtaatagatacaggtgatgcagcgcccatcgccgtggggattgtcaacgtgccttacgtacccragcccgttgcctgggtaacacgccaccatggcctggcagggatggagggaggtaggtttactggggctaggcaggcacatcttagagaagcagccatgaattacctattttcccacccctccttgccccatcttccccatgactccttgggtcaagggttccaagctcctgccccaaaagactttctttttcagccaaaatcccatccccaagtctatcagaaacctcagctcctgggcctcaagagcccactccctcccaacacacatacctggggcctggcacccagctagggctcaattagtaacagagtttgatttgtttcaagataccccaaaccccacctcagccatttcagtagaataataccaatttaaacattttcaggtgtgcaaggaggtggcctcacagccctagaccaggaattcttacccttggctgtggagtggagccccctggggagctctgaggttctgaagtacctggcctaaggaagggcctgaaattggtaaagcttcccaggtaattctaccatgcagcaatgttaagaactgctgccctggactacaaagaatccccactaaattatctgtcccatagacctccgaacaggagccaaaagctacagtctgaatagaaagacctaattccaactccaaggataatttgctgggtaaccctagccagttccaacacctgaatgggcctcaactgcctgatgtgtacagcaggggtaataaacactgctgtttacagcggtagcaattaatctctctgagaacataacttgggaggttctggagccccaactcctggagatctaacaggactcattgcagggcttggtttctctgtctacagggttctttcctctgcctgacagttgccactcccctgacccagccctacaatgctgtggccagggccccgggatgtttgtcatcagggagctggcagaaaggtggctgagaggtaaaggaaatggcccagccacttctgcagacacaattccctggttcaagtctcagtgctgccacatgagctgtggcatcaggcaggtgacttcctggtctcaggttcctcatccatggatccaatggagctcacagctatttcacaggttgttgtggaacaagtgaacaagataacaagtgtctgggaagacagccagcacagtgcctgccacatggagaactggagcacaggctgaaatgccatttaaaaattttaaaaggtccctgtcccaccctctgcccaaagtcactgcagtggcaagatgaggtagcacacaaaaaggggaggactggcacaaggacccttcaacttctccccagcccggaccatctgtcttgacctctctgccctgacctctctgccctggtacaactctgctggcgtccattccccacgaatgctcagctacacctatgggcccggcccagcaagacagtcccaagataaacattcacgatcaaacatcagtggccactgccacaacaggatgcttgccaagcacgcacgccacagcagactgggctgcttcaatcctcaccctccccaggacgcctcccaacacattatcccagggctcaccctctgtggtggatgttaagctgctctgcattaaccatgtgcacctcatccaccagaccttgccctggaaagagagggctgccaccatctactgccacctagcagtgggaagctgacaaccttctctctggcagcaccagagtacaattagtgagaaggccccccagggaaaaccctaatggctacacttcaaggttcaggagggggcaccttctttgcactgctcactccctatggaagggtcggcactctgagcaaccacctcactgggagaagaattgggccatggtccaggaggcttagaaacagtgagttactgactagagaygggcaagacctccccaattaggaatccaatcagagattacactgatgatgcacgtggatgggtggcagggaaggggtccagtgctgcaccctcttcccacaattcatccccacacagcagccagagcccctcctctccaggtcttcactccatcctgagaaaatacaaattcccaaccacagcctcaaaggcccccaacctcatgtgcctctcccatcactctgctccatgcctcaacaggctgagctcatcgccaccacaaggcctcagcactggcctgggacactcttccttctgaccctctttgttattcaggattcagagaccaagggtcaccttgagtactccggctgattgtccgttccactcctagcaacatggcatcagcacaggcacctgtttacctagtactgccctggaaggcagccacagggaagcccctggggccaggttggtctccccagtgcccagtgcagtacctgcagactggagtgcactgctctgggcctcctctgcaccccagccctgctatgtttcctcctgccctgtacattctcacacagcgcctcccaccaagcacatgggactcacacagaaacaggaacctgctctttagggccccacccttcccccacatatacacaccttgggggtgaaagcatcctctggccccaaggaaagtatctacttcctgccctcacaggggaaggcctcaggaaacttgctctccacccctcccacctaggggagggacaggtgggaccagggccaggagaccaaagacttaaaggctattggtgacaatctgcctgccaagagccccacccccactacacacacaccccagtcagaagcctgtgactgtcccacctccaagctgctcttcaaggagcaaaccaagcaagctggactctccctggggtcccctctggtagcccttgctgccagtgggagtcaactctctcccacctacaggtcaacggagcacctgtccccaaccagggagttgggggaaggaaggatgacacaggagctccactcagaacgactaagaagcacgtttctactggctctagccacactggtgatccatgtccccacggcaactgctgcagcccacctgagcaccccacagccttactctggagtacaggagagagtccagatggggcccatctaaaagcgggaaagcctggagttgctgtctcactggggaggggagggctcctcccctatgttctcagtccagcctggcctgtccttacttccctaggacaatcaaggtcacctagggctaaaaaagtccaaacacgccccttccccaatcctcgctggggccctgtccccaaccacatagaaggtgggcaccagaggcaccaaaacacaagagatcttctcctactctcccctccccaaactgccagactcactggggatgtaacctggttttcgtattccgtggatcagcaaattgaggctcagagcagtgtcccatctgggccactcagcccttctggtctccccctgacgaggacgacagccaacctggggtgaagatgctgagccagggaggccactgatcccgcccgcacaggagccaagcccagggaggggccggctctggctcagctatcaagtaacgggagggagagggaagtagaacaagttccagctggggtggggaggaaacaggccttggccccgggggagccctggtccctgagccagctccagcctgagaggaaagccacacagaagcagaacccaagatgggatctgcaggaggaggcagaggacatcaggagctcagcctcacgcctgcagggcacaacactgcccrtgccatcagccagccaggcatcactgtgttgagcagtgggcactccccacagggccttgtccaaaggacaccaagccttggactcaaggccaggcccccacaccacccatgaagacaatgatcctgtcagcagcccggaaaggccctatggaccactgtcctgtgctgggctcctgaccccaggttcctgaacaggcagctggaggccatgaggccttgacaactgcccggaaactccaagcaaatgagcatttgtcttaagagaggatctgtggcctctgacagattctcaaaaagacccaggctccaaaataccattaagaactattgttctaaagcaaaaagaaaaagggactaagaacaaacacataaaggcagagg

SEQ ID NO: 93403 - DNA, 13939 bp, Homo sapiens
agaaagagacgtctgcggcgaggccgggagaggcagggagctgcagcaagctgtgatgtgccaggcagccacacagaggccaccaccagggtccccaggaggaggcatggtggcagcargggcctcgcacgacaggcaggccaacgtgctgagagacagcagctcagccacacaggacaagggccagggaggctgcaggcaccgcccctcaagcccaggtccctgcacggacacctctgatgaccccgaagaggctcgaggggcccaactcacagagcctgagactctccaggcctaagtccagctgcgtgtgaaccatgacgcttccatcaaaccttggccaagccaccagcacagcgctcccaccaccaaggagaggaccaaaggcttcatttcaccccaacacagaggctggggaagccacagctgagaggccctagggcagtgccagacgggtcctggctcaggagaaaggtgccggttgccctcgggcgcttgcttggcaaaaagaagtaagtctctctagctttgaagagcctcaaaaatttctaaaagccaaacaayggccttgagcaggcaatgccagccctagaacccagacagggcattttattcatccattttcaaggatttttaaaaacccaacctctccagatatggctgcttgtctttgttttttttgagacggagtctcgctctgtcacccaggctggagtgcaatgccacgatcttggctcacggcaacctccgcctcccgggttcaagtgattctcctgcttcagcctcccgagtagctgagattacaggcgcccaccaccacgcccagttaatttttgtattttcggtagagactgggtttcaccgtgttggccaggctggtcctgacctcaagtgacccaactacctcagcctcccaaagtgctgggattataggcatgagccaccgtgcccggctggctgcttgtttttttttttttttgtttgttttttttttttaaaaaccactcacctgtagactcatttcctccccaacattgaggccaacgtgccagggcacaarcccgcatggcccaggagagagccggggggtggggcctgagggtaaggctgtaaccttctcccctcaccctcggggcctcagagtcactgagcaccagacttgccccttgggggctacggtgagtcccgagtctttctcagaagtctgctgggggcytgtcctcacaaagcagacagagccgtggggggagacaggccttgatgtccctaaacccaccggggcgagaagtgagccaggtcccacacccccaggtgagacgcggcacttaccagtggtggtgggtggtgagcactgtggtcagtttcaccccgtgctttctcgccgcgtccacgacctgcagtggccccggggaaggacaaaggcctgtcacactcctaggcctggcttgctggcctatatggtagggtgcccagcagaacccaggacacgccatgaggggccgctgacrtggcccgtcctgaccctgccagcttgccctgctccaggagagccagtgaaagcaccttctccttcctgctcagcctgacactcttgcaaccacctacgaccgctccaagcccctccagctctgagggcaccacccccagaggcagcatgcaggggcagaaagcccccaagaagactcaagtgcccaggattgtactgcacagcgctttctgtgtcactgcctctcgcctccacccttcttggggccctgttaacagagtggccggagactaatttccatttagcttaggcaaagttgcaaggacactgcggttaggaaacccatcgggggtgaggactccgagctgggtgaccagggcagggagagccaggcacagccatgcgcaccttctggggctgcaccggatccacaatggcagcctccttggtctcatcatcaatgaccaggtacatgtagttgtcggtcagggcaggcagcacctctaccttcatggtgccctcgtccacggtcaggttcttccgcaaatctgtgtggcagaaaactcccagcagggctggacctgcagacacagagcacaactcagcgggcagccgcgccaggccctccaagacaggacgcgcaagctgcagtgcttcccagcctttctaggttcctttgaaaaggaatattctggccaggtatggtggttcttgccgggaatcccagcgctttaagagactgagatgggaggactgcttgagggcaggagtttgagaccagcctgggcaacatagcaagaccttgtctttttttttttcttttttttttttgagacggagtctcgctctgtcgcccaggctggagtgcagtggcgcgatctcggctcactgcaagctccacctcccaggttcacgccgttctcctgtctcagcctcctgagtagctgggactacagacgcccgccaccatacccggctaattttttgtattttttagtagagacgggtttcatggtgttagccaggatggtctcgatctcctgaccttgtgatccgcccacctcggcctcccaaagtgctgggatgacaggtgtgagccaccgcgaccagccaagaccttgtctttgcaaatttaaaaattagccaggcatggtggtgcatgcctgtggtcccagctactccggaggctgaggcaggaggatcacttgagcccaggagtttgaggctgcagtgagctatgactgtgccactgcactccagcctgggtgacaagacaataacctgttccttaaaaaaaaaaaaaaaaaaaaaaaaaaaagggaatatcttcatatatccctgaggagaacacaggaactaactcatgctcacattcatggaaatcaattgtttcagacttacgatctctattttcttttttgagaactctaaaaggacaggaaggccagcttgtgattgtgaggcgaaccactgccagtgctggattattcacaccccggactcagggacagaatgtgaagaagggaacacagactaggggtgcccccgcctggccatctgccctccagcaagctgtgctgccaccactgactaagcgagcctgcgttccatgcagttacagcccttctcagcctctagccagaaagaaccaatacttgacggcaggctgaggcaggagaattgcttgaatccgggaggtgaaagtttcagtgagccaagatcgccctactgcactccagcctgggcaacagagtgagacagtctcaaaaaaaaaaamaaacaaacaaacaatacttgctcttgaacagcacgaatctgagatatgcacaaaaatcagcagttcctttgagacggaaagttggccacaactgcccccagattcaagtgtggaggacacaaaaccaccatccaactgacccaaaggactctgccacaggggcccagaaggcccaagagctgggaggagtgggtgaccaagggacaaaagtgtctgccacccagtcgaccaatgcaaaaatattttcagcaatgaaactcctactaaatctaaaaatacctgggggccccgacaataccttcagttccgctctacacggggaagaaaccacagaaggtggcagaggacagtgcagtcctggggtaggtgccacggcaggggcttctcccaaaagggatccagaaatgggcagcagccaccaactgacagacacacgcgtctccagggcccaccgaaatgcggaatccgaccttatttccacagccggggaaactgcccaaactatagtttcaatcactgcacaaagatatcctattacccgcctgacaaccagctgggcattttccagatcattctcctcaggaacaataataccaagatttctatatgagcagcttcctgtgttattccccttccccttagcctcagcaccaccccagcccaaggagcacaccaagcagagtgtgggtgctgggggctgcaggtggggtgcagaagggttgtgacaggattccgagtgccgggcgtcctcctggaaaggagctccattacaaacaaggagcagaacattacaaacaaaaatactgcccacrtgcggtggctcatgcctgtcatcccagcactttgggaggccgaggcgggcggatcgcggggtcaggagttcgagaccagcctgaccaatatggtgaaacctgtctctaataaaaaatacaaaaattagctgggcgtggtggcgagcrcctgtagtcccagctactcaggaggctgaggcaggagactcgcttgagcccgggaggcagaggttgcagtgagccgagattggccactgcactgcccaggcgaagaaaatgtcatttacaactggtgctcagcctcccctggagaccatcacagcctcctgaagaagctgacaacccagggaggtgcctttatttctgaggaaagacgcagctggtgccaacaccagcagaaaccgtattccctttccatatcactcagcccagcactgcctggcaaatgttcccggcttgctgttttgtaactgtaatactttgtacaaacaggtcaaggacctgcagcctggggcctggaccaagtccagaaacatgttcggtttggccccaaaaacaaaaaaaaattgagatatggtctcactctgtcccctaggctacagtgcagtggtgcgatcaagggtcactgcagcctcgacctcctggactcaagcgatcctcccacctcagcctccaaagtgactgagactacagttgtgtgccaccacgcccggctgattttgtttagtttttgtagcgatgaggtctcaacatgttgccaggctggtctggaactcctggactcaagcgatcctcccgcctcggcctcccaaagtgctgggatgacaggcgtgcgtcactgcacttcttttttaaatcaggaagtttcacagcatcttgcttcccttgaactgggcggcaccaaatacgggggctggggcctcccttagaatggggtacgcacgccctgccgatgcacacagtcccgctggaactctctgcctggacccttatgaatgtccctaaaactgtaattctgaggacctcaaaatccatgtcctttccttagcaatggcgacattctaccccctgcagagccttgacagctttcggcgagatctggaaaccgccagggacgcctccctgtctgcgcctccgcccgcccagtgccctgcgctgcgcacccgcccggggcgctggcctggcccggccgcgcgaccacctcgggcgaatgacacgccgggtccccagacgggggctccggcgccgggcgggcagctccaccaccgcaggcggcgccgcgagaccgcggtccttgcagcggggcagcaggtgcggggtgggccaggcgtcccggggccctgcccgctgcgcctcagagccgcgccccaggctctcctcggcgccggcccgggcaggacgcgatgccctggaggcgtcaggggcgcggccggcccagcccgagcgtggaggccgcggcggacgcaggcctggccctgcttacctagcgctttccgcacccgcggccccgcgcccgctccgcgccagcctcagcgcctgcgccgcctccgctcgagcccggcagcgcggccttaggcacctgcgcaacagacaccgcgtcagcggtcgccaaacgacggcccggcgccgcccgctgcccgccccgacaggcccgcgtcccccggcccgcaccgccccgccgcacccaccgaggcctcggcgggcgcaggcggctcccagcgcggcgaggctgcggcggccgagcagccctcggcccaccaccatgacccgggccgggctggactgccgagctgcccaggactgcaaaacaccggcgtcggcgcgtcgcagccaatcagcgcccgcctcgcgctgccctcagccaatcagcgtccacctcgcaccgtccgccaaccaatcaacgcgctcgcgctcaacttgttttgtccgcgagccccgactgccacgggccgggagacgggcctgggagcggcggcggcggcccgagagctgcgccgggagagctgtgccgcgagcctccgcctcttttttggcaccgcacagtggatccctggaggccgagcgccacgccgcccgggtacccggcagatcgcgaggtggaacgggccgtcgctgcgggggacagcgttccgaggcagttggtcctctccgggatgccgtakgcatcagctgaccggcccagcccacgtgactacaggggcacttgatgggaatcatggcagcatccaggccattgtcccgcttctgggagtggggaaagaacatcgtctgcgtggggaggaactacgcggaccacgtcagggagatgcgcagcgcggtgttgagcgagcccgtgctgttcctgaagccgtccacggcctacgcgcccgagggctcgcccatcctcatgcccgcgtacactcgcaacctgcaccacgagctggagctgggcgtggtgatgggcaagcgctgccgcgcagtccccgaggcygcggccatggactacgtgggcggctatgccctgtgcctggatatgaccgcccgggacgtgcagracgagtgcaagaagaaggggctgccctggactctggcgaagagcttcacggcgtcctgcccggtcagcgcgttcgtgcccaaggagaagatccctgaccctcacaagctgaagctctggctcaaggtcaacggcgaactsagacaggagggtgagacatcctccatgattttttccatcccctacatcatcagctatgtttctaagatcataaccttggaagaaggagatattatcttgactgggacgccaaagggagttggaccggttaaagaaaacgatgagatcgaggctggcatacacgggctggtcagtatgacatttaaagtggaaaagccagaatattgagttatttsttaacaagtttcgagagagaagggagcaagacaagagcaagcaacggctattaaatgtcacaatcctttaattagaaaccatttattggccggacgcggtggctcacgcctgtaatcgcagcactttgggaggccgaggcgggcggctcacgacgtcaggagatccagaccatcttggctaacagggtgaaaccccgtctctactaaaaatacaaaaaattagccgggcgtggtggcgggcgcctgtagtcccagctactctggaggctgaggcaggagaatcaattgaacccgggaggcggagcttacagtgagctgagattgcgccactgtactcctgggcaacagcgagactccgtctcaaaaaaaaaaaaaaaaaaaagaaaccatttattttaaaaatgattagattgctatgcctcaactcatagaagatgaacccttcaagaaaacgtgaagtagaacgggtgggccagaaatgaaaacaggcaagtaaagtatttcttcggaaaacattttatcaaaccaaatgttaaaaagactttccttttgtaaaactggattagagaagacttttcartgggttatctctaggatgatcagtagttsagcacttaaaaactgcagagaaaactgaaagttatgttccagataactttccgttgtttaccaaattttcttagayttggtcatcatcaggaagcatttgtaaaaataaaaatctccacmaattactggcccatctcggacttgctgaatcaatttgataggattaatctccagtgaagctgtgtttacagggcattccaagtgattcttatcaggaartgtgaaaaacactcctgtacataatcggttaatttaaaattttacttaataagtgaacaaktaatgaagatttcacctgtttacttagggtatctacccagacccatcgatyctgagttcgggagatgattttgaaattactgttttccaaataaaggtgctcccttctaagtggcttacaagggtaatttttttccccccagtaatgacgaggagggatatttcctccttgtggggcttcagaccttagtctttgacctttggccttctgagcactgtgctgtgttaacacagttaatcagcaactgtacttcccaaccggagttaaggaggctttgtggaagttgaatagcctgagactgctgcttttgctcttgcctgcaccctcctctgaaaaaacatccaggcaagatgcacagcatagctgtcaatgcctggaggagtcctttgggcttcggcaggggttcctgttcgcgttcacatcatctgctggcccctgaagaaagcctaggacatctgattgagtagtaacggtccccatgtattgaacacagtactgttaggcaccatgccaagcagtttattctgtatttccacgtgttatgtaaccagcaaccaagccataagcttagtatgatcactaccatccccattactcagatgaagacagatctagaggctgcgaaggctggctaaagtcactcagcttagtggcagagccgagatgtaacccagctcccccaagaccagaacgtgaagttttgaccacaatgcaggctgcatcttgtaagtagatacataagaagaatcagacacttaggtatgctgcaaccccatgcttaaattataatatagtatgaggaagtgccataattggatttctttattaagtatcatgctatcttaactacttttagtattattttttcattgcttggcaatgcatgtaattacagaagagtcagaaaatagagattagcaattagaacaaaacaccaaaaatttcatctacccagagacagccaaagttaagcatttaytgcaagttcttccaagtctgtggatataattgtaattttttaaatagagtttgctcataccatacaattttcttttttttctttctttcttttttctttttgagatggcgtttaactctttttgcccaggctggagtgcagtggcacaatctcggctcactgcaacctctgcctcccaggttcaagtgattctcctgcctcagcctcccaagtagctcagattacaggcatacgccaccacacccggctaattttgtatttttagtagagacagggtttcaccatgttggtcaagctggtctcgaactcctgacctcaagtgatccacccgcctgggcgtcccaaagtgctgggattacaggcatgagccaccgcgcccagctataccatacaattatttaacttgcttatttcactgtatattgtgaccatctttttccttgttagctgacacatttctgcagtacaactttcatggattgcataagattctgaagtcaagcctccatttttggaccttgagattgtctctaatgatttgctagtatcagcacatgtgctgttttttcctttggctaggttcccataagtggaagagttggatcaaagggcgtgctcatgctggaagtgtattattagtctgctaccaggtacacggttcagctgagatatagctaccaagttgacagactattaaagtcaaagttataaagtagaagcagtgctcacatgcagccctagtaggtggcacaagccagcaccgagtacagtgcccctggggtcagtgttcaccacagtggtagaacaagctttgtcacaaacattgacatcagcattgcaggtgtaggcacacaaagtccttagatgcaagaatcaaaaacagagacaccaagtccgacaattcctgatattgctaaaatcatagtaatcctagcattcagaagataacgtttttccacgttttgaatacatttaaacctatgaaaaagtttaaaaaccaatacaatgaactccatatgccctttaatagtttcaacaattaccagcattcactatgtttgtcctctggtcctacgtctctcccttcctccccgccatatatgtgtatatatgcagacatgcacctctctctctctatacacacacacacacacacacacacacacacacccccatattttggaaatgcgtcgggatggtgactgcagaaagactcttccctttcagcatacatctcccaagaatcaggatattctcctacatggaaatgagaccattatcacgcttaagaaaataattccacagtgtattagtctgtacagaatatatggtttgacatctgttcttctgttgtgtttttaaaacatgttgattggccttttataaaaaaatgagtattacacatccacttaatatatcacgaacatatttccaggtcagtgaatataagtacaggtacccctttttaatggctgtatctcagatcatgtaccccagaagcacagcctaagatggggattcttgttcccgtgatttgctgaaggagtgctctcaggagaagagaagcgtaatgaagcagaaagggcagggagcaaactccaaggaagaaagtggtctctgggctggatatcagcttcagtcagctggtgaacccaaggggaagctctggagcgaggagtctgttggcaccagaatctgctctccccgccctttccatagcttcctcaggtaattttctgaccctcatagaagctgagggacttcagcaagtgaagattttctgggtggagcatccccgacagattgcacacttttcagatgctctgctattagaaacaatgatgcaaggggcatcctccatatactctacagcaagggtcccccaacctccaggccactgactgctaccagcccgtggcctgttacaaacggagccacacagtaggaggcaagtgagcattcccgcccgagttctgcttcccgtcagatcagtggtggcatgagattctcacaggagcgtgaacccttttgtaaactgcacatgcgagggatctaggttgcgcactccttatgagtatctaatgcctggatctgaggtggaactgtttcatcctgaaaccatccccgccccccgacccggcaatccgtggaaaaactgtcttccaccaaaccattcccaggtgccaaaaagtttgggccgctgctctacatcattggcacttgtttgtttccttagggaagtcttagaagtgaaatcaatgaaatggtttgcactttgaaattttgacactttttgccaaattgcagaggaaaaaaaactaccatgttgcacttgacaagactgtttaagaatacctttacaccgacaccccagctaaggctgggcatcatggctatggtcattcttttttttttttttttttttttgagacaaagtcttgctctgttgcccacgctggagtgcagtggcatgatctcggctcactgcaagctccgcctcccgggttcacgccattctcctgcctcagcctcccgagtagctgggactacaggcgccctccaccacacccggctaatttttttgtatttttagtagagacagggcttcaccgtgttagccaggatggtctacatctccggacctcgtgatccacccacctcagcctcccaaagtgctgggattacaggcgtgagccaccgcgcctggcctattttcctctttttcttaaaaatataagtgtcagctgggcacggtggctcacgcctgtaatcccagcactttgggaggccgaggtgggtggatcacttgagcccaggaattcaagaccagcctgggcaaaatgccaagatcactgtctctacaaaatgttttaaaattaaccgagtaaggtggcttctcctgagctcctggacacggggctcagtggagggggcaccatacccactcttgctgaaccaacagtgggagccaagccagcaccaaccacgacaccctcacttctctcctctccttccttccctgtccaccctccccattcacctggcttcacaaaccccccagttctccccaagggaggatggaaggcctgttctgcacaactaggtcaagtcgttcattaccttatcaccacaatttggacacttaggggtgaacctgcatccctcctctgtggctgcacatggtaaaagccagataaaacatgactgacgatggtttatctcccaacaccagccttaggaaacagtttcatatactcactttttccttttttttcaatcctgtggtggagggcatgtagccttctaaagtaccaggtcaaacctcccaggccgtgggtcaacactgaccttagcggtgggtcttcacagctggagtctgcgccctgaagcaagtgactctcaatggtgtgcagttgagccgtttactttgtggctgctgcaaagcaaacagataaagtggcagctgtcgtcctcatgtcctgagtaggtccccctcagagttctgagacccaggcatgctcatgaaccttttgaagttggtctcctcccagttgattcagactcagtcatgtcagccctgagccagcaagcctccacaagcactgggcactccagtgtgtcaccagagaagaccagggactagaagagccccaggtgctcaaagcagtcgcacaggattgcccacgactttggctattcccacccagcaccaagagccccttgccctcatcctgtcagatctgtcagatgacgagtcaccacccagctctcagaaagtagtctttagaggtactttttttttttttttttttttttttaagacagagtctcgctctgtcgcccaggctggagtgcagtggctggatctcagctcactacaacctcctcatcccaggttcaagagattctcctgcctcagcctcccgagtagctgggacaacaggcacgtgccaccacacccagctaattttttgtatttttagtagagatggggtttcactgtgttagccaggatggtctcgatctcctgactgccttggcatcccaaagtgctgggattacaggcatgagccaccgtgcccagcccttgaggtcctactctttttccagggaaccaagacaaataataaactggcttaagaaaataaatcattcactcaggattaagaaactcactcaaagccgttcaactacatggaaaagaaaataaatcattcaaatctgtagaagattaaatctgtttattaattcatgtaaacattttccaacttgggaggagacaaggcaaagacagtaggaggccttctaagaagggaggtcagatgagagaggccttcagactcacccagaccacctccaccataacaatttctagaaacatgttcaccacatgtaaacaaaatgcaattttccccataattttcaaattaatattccattttaaagggagttaaaactcttatacttttccagagttcaaaatgatagaccgttttaaacatgtttttgtccagacaagtttctgcttgcctcagtaggatctgcaagcttgcacgagagtacactaattttcaatccactccttgctctgtgtgatagaacgaactgcgaggagaaacagaaaaagagacaaaaggttaatttttaaaatccccttgtatatcaagttgaaaaatcaatgatcacgaatagagaactgcaatgaaagttttgtttacagatactaatataaacttccattagagctgtaagatgatgggaagagttccagtctcggagtacagttaatttacaggcccagcttctgactgattttgtaaaaattttgtcacttttcatgctatttctctcaggtaggaaagttgggattaaaagtctaatgtggccgggtgctggtgcagtggctcacgcctgtaatcccagcactttgggaggccaaggcgggtggatcacctgaggtcaggagttcgagaccagcctggctaacatggtgaaactcccatttctactaaaaatacaaaaaattagccgggcatggtggcacacacctgttatcccagctactcagaaggctgaggcaggagaatcccttgaacccgggaggcagaggttgcagtgagcagagatt

SEQ ID NO: 93404 - DNA, 13821 bp, Homo sapiens
ctttttcaaacacaagaaatatgcaacatgttcttaacttgccacagttttcattgtcttctattggtctccctccacaccctaaggttctataacatgcttgttctgaaaactccaagcaatatggctagatgcttttctggtcacttaatcatctatacaacaaatatttattgagctcttattacatgcctgcactattttagctgttacaagaaaggggtcccgatccagatccccagagagggttctggatctcacccaagaaagaattcagggtgagtttgtaaagtgaaagcaagtttattaagaaagtaaaagaataaaagaatggctactccatagacagagcacccacaagggttgctggttgcccatttttaatggttatttcttgattatatgctaaacaaggggtggattacgcacgcctctcctttttagaccatatacggtaatttcctgacgctgccatggcatttgtaatggatacatttttactattttcttagagcttaaatcctgagagcatttttgggagattagtggtatggagttgaggggctgtaacaggaacagtttaaagaatgcatcaatgtgtggggtggctgagagcatgtctgctgaagctgtcatatttgtgtgatgaatgagtttcacaaactgtttggagaattcattgggctccattgctatttttgttaaaactttttaattagtagccttgagaaaaaaaaagagagaaatacaaagtgacatgtccatttttgtatcttgtgttttttcgtaaatgtgatggctcagtgtctgtggatggctgggtaaattggaggcagtatatggcaggcaacttgatcaaaaacccagagaagcataaggatgaaagcaccatgagggttgtgagagctgtatggggctgggtgtggcagtccatgtagaacgtacccttgctgggctcagaggggttctagagctgcaagagaacctcctgataccatgggatgagttttctctcatttggatgctcttgtagccgggtataaataggcaatgctgttcaagaaattgaatcaacaaggatcctgaaggctatcgtggggattttgaaatgggagagaggattcagaaatcctggtgaaaaggcatgaatagctgcaattagatttgcttttagtctcttagcttttcctatcaggtcctttgggaccttcacttctgaccagctgttcttcgagaagaatcttggccaatatttaaatgggagagggtgtggagctgggaagctgccgtgctgttacacgtgactcttgttccgttcatgcgcctgtgaagacacaccacataagagtagaaagagggatgcccgagactttggttttggaagatgattcattaaacatattttaatctgcaatagagagtcgtgctgtaagagtcactgggtgaaatcccacccacattatgggcatgaagagccctaaataattatcaggaaattaacatgccttctttcttgtcaaaacatgagctcttaataaatgttttgcttgtgcatggtgcttaagtaaattacactgagattgagctactcctcaaagattaattatgaaaattgtatataggaagaaatataaataattgcaaaatttcttttctttttttgagacagagtcttgcactgtcgccaggctggagtgcagcggcgtgatcccagctcactgcaacctctgcctcccgggttcaagtgattctcctgcctcagcctcccaactagctaggattacaggtgcacgccaccgtgcccagctaattttttgtatcctcatttttcctcaagaggggcatggctataattcatctattgaataagcaaacacaggattaattacttttttttttttgccagaaatatgcccctactggtcatatagtccatctgtgaccagtctaaggaacattaatcagataaaagaaaaaattcataggtaactcaaatgaagcatatcttctcaaaagcaaagccatttgtgtaatcaagtacccagaacgtggctaaatgtagcagaaaatcactaactgcgttcatactcggtggtcattccagcagaaaagttttcttaaaaaaatcaagaggcatatacaattagtaggtgtatactatgtcacctgcaataactgcggcataaaaaggatttattttaggtaaacgtgtgattcagtaaacaacttatggtaatattggctcaaagaagacagagaattaaatataagaccaaggtcagtgttgatgttcactcctctcttctaaaagtttaccttcatgaggttagttaccttcataatgttggtcatcataaccagtgcacgaagtgaacagtgaggggtgagtcatttccaaattgcctaaaacgtgctttattaaaacaaatagaatttatctttccggcaatgcaattttgtggcaatttttcatcattctttcccaggaaaaaaaattaaagcctaatattgcattgaaatgcacacatatcttagtaaatttagtactatcatcctaattagacagataagcatacatatgatgacaaaaatcagtaacttctttcaacatgcgctataatttctgaaatcaaaacatttccaattgaagatgagaaaggtcacattaagcaagaactaaagaatttaatatgacaacaaaatatatttttcttatgtaaggttgaaatacaagcagaaaatttcagtagcataaaaggttaaatagattcatttttatattttaccttaagttctgggatacacgtgctgaacgtgcaggtttgttacatgggtatacacctgccatggtggtttgctgtacctatcaacctgtcatgtaggttttaagccctgcatgcattaggtatttgttctaatgctctcctcctcttttgcctcaccccctggcaggccccagtggtgttcccctccctgtgtctgtgttgttcaactcctgcttatgagtgagaacatggggtgtttggttttctgtccctgtgttaattttatgagaatgatggtttccagcttcatccatgtccctgcaaaggacatgaactcattcttttttatgtctgcatagtattccatggtgtatatgtgccacattttctttatccagtctatcatcgatgggcatttgggttgcttccaagtctttgctattgtaattaatgctgcaataaacatacgtgtgcatgtgtctttatagtagaatgatttataatcctttgggtatatattcagtaacgggattgctgggtcaaatggtatttctggttctagatccttcaggaatcaccagactatcttccacaacggttgaactaatttatactcccaccaacagtgtaaaagtgttcctatttctccacatcctctccagcatctgttgtttcctgactttttaatgatcaccattctaactggtgtgagatggttaaatagatttttaaaaagtttacactctttactctgtttatagtttgttttgctgtgcagaagctctttaattatgtcctacttgtcaatttttgttttatttacaattgcttttgagaactgagtcataaattatttcttaaggctgatgtcctgactggtgttttttaggttttcttctaggattttcatagtttgaggtcttacatttacatttttcattcatcttgaggtaagttttgtatgtggtgagaggttgcggttattcttctgcatatggctagccagctattccaacaccatttattgaatagggagtactttcctcacagcttatttttgctgattctgtcaaagataagatggctataggtgcacacctttattactgagttctttattctgttccattggtctatgtgtctgcttttgtaccagtaccatgtggttttgattattatcacctcagagtatactttgaagttgggtattgtgatgcctcctccaactttgctctttttgcttaggattgttttggctatgttgattctcctttggttctatgtgaattttgaastagttttttttcttctaattctgtgaagaatgaaattggtagtttgataggaatggcactgaatttgtagattgctttgggcagtatggccattttaacaatattgattcttccagtccatgagcatggaatttttttatttgtttgtgtcatctgtattttctttcgacagtgttttgtagttgttcttgcagaaatctttcacttcctcggttagatgtattcctaggtattttatttttgtgtgtgtggcaactgtaaatgagaacgtgttcctgatttggttctgggcttgaacgttattggtgtatggaaatgctactgattttcgtacaaagattttgtatctgaaactttactgaagttgtttatcaggatccaggagtctttcggtggagtctttagggttttctaggtatataatcattaagtctgcaaagagagataatttgacttctcctttcctatttgggtgccttgaatttctttatcttgcctgattactctggcaaagacttccagtactatgttgaataaaagtggttgagagtgggcatctttgtcttgctgtagatcttagggaaatgcattcagcttttgcctgtttagtatgatgttggctctgggtttgtcatagatggatcttattattttgatgtatgttcctttgatgcctagtttgttgatggtttattatgaaaggatgttggattttattaagagccttttctatgcctattgagatgatcacgtgatttttgttttcagttctgtttatgtgacgaatttactgatttgcatatgttgaaccaattttgcatcccaggagtgaagcctacttgatcatggtaaattaactttctgatgtgctactggattcagtttgctaggatttttacatctattttcatcatagatattggcctgtggttttccttttttgttgtgtcctgtgaggtttttgtttcagggtgaagctggcttgatagaatgagttagggaggagtccctcctcctagatttttttggaatagtttcagtagaattagtaccacctggtactacctagaggatcaaggtatgtttgaattatggtttgaaatcatgtttacttaagtgtcaaatttacaaaaacaaaaaatcagttatgagccagaagttgtactgctgaagttctctggtgtgatcattcttacccatgtcatatccccttccttaaagttgaggacggatgttaaaaggttcaacaaagctgagctgtactcagctttggaggtgaaggtaaactccatggctagatgagcagttttagcacatagcatcagttgatgtggagtcactgtcatcatttttataaagattccgtcttttataaatggcttcaataacattttgcttgtttgccaattcacctccaggtggcagtctggggatgttctcattggctaatgtgtacaccacatggactaagtcagggacaccttccccctgcttctttatgatttcttctactctgcattccaggtacttgcccaactctgcctccttcttcgctgcttctggtgatactttgggtgcatttggaaaccagagaaaaaatcacacacatgttgtcttgacttcccttatgcaaacaggtgtcgactatttcattgtaaactttctcagggtcatcagtgacttcaagcctggatcttacaaaatcacagagctcttcatttcccataacatcccagatactatcacatgcaaggataatgaagtgatcatcttcttcagatctttcagtgtcatggacttcaggctctggtgagacaagctgcccagtaggacctttcccatggatacatttgtaatcaaaatccccaagggctttggatacagccagagaggctttcacatgctaaagcattacagagccacctgcattctgaattcattctttttctagcggatttgcaatttgtgaagaaatgaactttcctgttyctacaaagtaaacgtctagagtcttcatagttaatgaaataattatgttggggagaaagtaagacgcttacatctgttgacccacttmtatctgcaccatgtttcttctctgacataactctcgtgttcatcaatctccaggaaacctgttctgattccattctttacattttccaaagaaggtgctcctgcagaccctgtaaatcctggttatcggcgatgtgatctaacaaatgctcacagcagtatttggcaacctgagaaccaggatgcccgttatacacagcaaagaatgaccacctttcaagtccacttggcaaagcaatcacagccgtatgtgcatcctccatttcaatacgycaaccttgcatgctgcgtagctcgtatcgcaactaattaccccacccccaggcattatgctcttccatctttgcttgtctaaagatggtcccattatgtcataatcctgtaggtctctattaaaagtcaaaaatcatcaacaaaaccaaaacaagtcaacaaccacaacaacaacaacaaaacaaggctgtggagagaaggcaatgcttatacactgttggtgggaatgtaaatggattcagccactgtggaaagcaaagaaattaaagcttttaatgtctcaaagaatgtaaaacagaactaccgttcgacccagaaatcccactactgagtatatatccaaaggaaaataaatcgttctcccaaaaagacatatacttttatgttcataacagtgctgtttactatagcacagtaattaacctgggtgcccatccgtggtggattggataaagaaaatgtggtacatatgcatgttggactactaaacaccatacaaaagaacaaaagcatgtcctttgcagcaatgtggatgcagctggaggccattatcccaaacaaattaacacaggaacagaaaaacaaatactgcatgttctcatttataagtgggagctaaacaytgagaactcatgaacataaatatggcaacaatagacactggggactcacagaatgcggatgaaggaaggaaagcaagagttgcaaacctaacttttgggtactacattctatatctgggggacagagcatttgcatccccaaccttagcatcgtgtgatataaccatgtcacatacctgtatatgtacctattgaatctaaaatgaaagttgaaattatttttaaaaactttatgctagtataattttaaagcatcctacatatactagcttttgaacatattattacartactcatatcattttattgtagagattagggaagctttgttttctgaccagtattagaaaagatttgagtaacaattacctgcaatctttaagcaaacttctttcacctggtataatgtgttccttaagaaacttaagaatttttcaaagactttttgtttcaaatattggttattattttaatactaaatgttattttaatatattaaacataaaaagaatataattgtttaaaaaatgctctctccagagcactaggagataaaatgatacatttacttatgtaacactttcttaatattcctttgcattttattactatcagtgagagtttttgatattggacaaagaaagcttaaggggttagaaaagttctctcaatatatatctcttgttggccaattctgcttccagccttttaatgagactgtccagaattattctcttaccgaacatcttttcctactctcagacctgccatcgttacatcttccacgaaggtaagaacatggaagacagaagcagcccaagcataagtcttttatagttcccaggagtaagagtgccagacatgtagcaggcaatttgcccagtggcttctccatttttgacaatttctaagctcagctgtcagtcagtgttagctttggcctgctgccaccctagaaattctgcctcattctgagctcttggtcacctggattgctaattgtgcttccagggattctgaagctcctcaacctacacaggttgtctttttttaaaaaaagataacatgtatttatagagtacaaacaaattatacacacacacatataattaagatatatataaaattatagctattttgtataatatgtacagtagtacccctgtaactaaacccaagtttggctcctcactgcttgaaaggccaaactcaagagacaagggttggtgggaggaaaagcacgtttattcagaaagccagcaaacccagatgatggcacactatcatgctaaagtaccatcttaagtcattccaaatttttggctctttttatgtcaacggcaggaggaagatggagggctcagggcaagaggtaactgatgactgcagatatctgggcaccagygagggtgtgaggatgttgggaacttcttttccctggtcaggtcacagtatttccataaatctttaacaaaacatagttacttgtcctttaaactcagagttctttctgaaaaactacatgattgctgtttttgtgtatgatctcactgctctataattatccttgcctatctgtgggaataggtaaaggtcccttaaacaaaaatgaagttagttatgttagttttttgctgctttggtgttacacctatttgaggtggatacattccaagaccccccctgtagatgcctgaaattgtagattgtatctagtcctatatatgttgtttttcctatacatatatacttaaaagaaagtctagtttatcaattaggcacagtaagagatcagcagcaacaataataaaacagaataattataacaatatgctgtaataaaagttttatgaatgtagtttctctctctgtctcaaaatatctgattgtactgtattcacctattttcagtgaccaagggtaaccaaaactgtagcaagtgcaaccacggataaaagaacgactgtaattatattacttaacagttctcaacatttggctttctttacacttggcaatgccagacttctccttgccttaaggaaaacattcagtcctacatccctcctattttttaaaatcctaatgcttttcaaactctaatatgcatacaaattacctggagaatgcaccttgttaaacctcctagttaaaatgcaagttccagttaaatagttctgagacagacagagattctgaatttcttacatgctgttggataatgtctgtgctgctggttcagggatcacgcttttggtagcaagccgtaaacaatggttctcatagtgtgtccttggaccagcagcagaagtatcacctgcagacttgggggaaacgtaaattctcaggtcccactccagaacaactgaatcagaaatttgggggtggggctcagaaatccatgatttaataggtcgttcaggtgattctgctgccctttgtagctaaagaacccctggcttagagtactgcatgttaaaatatttcctccttgccaattcactgtatatgagatgttgaatactctggggaagaaaatcaaggccaggaatggtggcgtatgtctataatctctgcactttgggaagctaaggtgggaggatcacttgagcccaggagtttgagagcagcctgggcaacatagggagatgtactctctacaaataattaaaaacttagctgggtgtggtggcacacgcctgtggtcccagctacttgggaggctgaggtgggaggatcacttgagcccaggaggtcaaggctgcaatgagccatgatggcactactgcactctaggctgggtaacagagcaagatcctatcttgtggccaaggagggggggcgggaaagaaaatcaaaatattttatccccaaatatatttctttgacaaattttgagacggctgccacatggccagcagattgaagtcgccctgcaaagttgtcttttgtaggggagatttgcatctgtagagaatctccgttaaggtcttccattgtccaaatacaggaaagaagagctgagagtctgacgtaaagatccgcaacatttaccagtatatacacctacagagtcatcttagacaggaccgctgacaccagggaagcagggcccatccaggcagatgctgggtgagtaaggagacatgatcgtgtggmgcttatagacattctccttagattacttccagtttctgagttaaataagaagcaagctcatcagcagagagtgaggaaaggaaagaaaagggggaagcgtatgagaaaatcatttaggagacaaggagtgtgaacatgcttgggaaatgtcgcatggttgtcttgtagcattgaaggacccattcttggtgttaattctattgattagggtaagcaaatgaagctaacaagcagctcccaaatctcagagacataacaaagtgaaggcttttgttttcctctctgttgtcacattccaaagaggtttaggggtagcagtcgctcttcacatcgtcaattgtccacatcgagtgtctataactacatcccctccacaccctactcctaacctcgaagtccaccaaaattccttcacgatcataagagaaagacccagacagtttcacagatgtttaggggtcaagcccgggggtagttgccaccttttctgccgacatttcactgaccagaaatcagtcccagggcttcagccagctgtcaaggagactgggaaaagtagtcaagctgtatttgcagagagctggatccaaccagaactgggggtttgcagaacaggcacaaagaagcaagtgaaaggcaaagaattagtgaatgtgagcgaacaggtgaatatcaaaattgacctatgaattcaatttggaaaaggcaaatgaggagaggggtgaaggaagtgaataggtggcaggataaattgactttttaaattttaaagcttatagtgctttgataatatagtaaaggttaaaagaaccatctggggcttaattacgtttttaagtttccttgagggctgtcacatttgtctgagtagcaaaagcctgtataaaatagccgagccagttctccaggcactgattcttgcaagattaaaaatagaaaagaaaaaaaaacagtaataagtatttgaagaacggaggattttatgttctctttgatgacgatcaattaaaatattttgcccatggtttgtcattgaattaatctgcattccttttattctccaaagaaataggacacacgatgcaagactacttttattggttttcttgtcaaggtttttgggacatccaacttagatgagacgttttaattgtattgtcagcaggcattaaagtgcatcttaagttgaaatgtatttgctgccttgactataaatcctataaacaaataagtactcaatgtaaaaatatctgtttctacagctagaggattgtagactgaaaggttcaaaagaatcacaaacagaaaacatttagaaagtgttagagaaggtaacattcaggaggttgtctgtgtacgttctaactatttctatgggagtcaaaatatgaaagtgcacatattgataaaactaccaggaccataattttgagaaaatggttttgatttcaatatatctattttcctgtgaaggaaatagtctcagacatagcaataggtagatatacacttgttactgctgtaaaaatatggccgtggttgcaaccaattaggtcacaggtttcatctaccttaattaatttctcactgagcaaatacatatactcctggccgtctgaactcaacggctgccacttgtcccaaaaaaggcagcttactggggatggaggacagtgggtgtctggaaaactccctatagtggaaaatgaacagaaacctattgctaatagtacatgagtgtagatcttttcaacatgatatgccttattccattgattccaatagctcacggaatgtaacatataccatgattttgtataatatgaagaaagaaaaaaatgggctgggtgtgttggttcacgcctgtaatcccagcactttgggaggccaaggagggcagatcacaaggtcaagagttcaagaccagcctggccaatatggcgaaaccccatctctactaaaaatataaaaattagctgggcgtggtggcatgtgactgtagtcccagctactcaggaggctgaggcacaagaatcgcttgaacctgggaagcagaggatgcagtgagctgagatcgcgccactgcactgcggcctggacaacagagtaagaccacgtctcaaaaaaagacaaaaaaaataagaaaggaaaaaatgctgccattgatccaggacacaatgcttttgtatcattggggatttacattttatatttgctggagaatttcacttagatgtagacactgtgtaatcagccaagtaaaatgcagtgtggaactagactgattaaaatgtttctgaaagttcttccaattggaagtctgactcccctgaaataactttcaactcaaggcagctgagtcctctgtaccattaagagtattggtgatgtagcatttctgaaacaaacaaacaaacaaaaaaaaaaaaacaggcacacctgtctctgccrtctctggggttttcttctaagcttgtaataccatcctgtaagttctgatactggttctttcctgagcttactagaaagtacgaggtaatcataaccaccttacaacttgatgacagcaatgggaagatactgtaaattttaaggcacattttattttagaataaaaatgataagaaatgttaagaatgtatatgattctaagaaatgtgtcatttttatatattaatctataaaatataatgtggggaaatgtaatcattttaactcaacaagtttgcattgagctccttctgtctttacactcttgggatggatcaagatagcttattaaccctcatgtgaaagaggttttttttttagccattcagtgtcattcttcaatcattcagtcttagtgctaaccatcgaagtattacgttgaggcagtgggatgaagtggtgaagatcacagtcttcacagccagtctgcttgagtctaacatctagctccaccgttactaagtttgcgacattgagcaagtcacttaacctctgtgtgtctgtttcttcaaaatgatagcatctacctcactgggtaattgtgaggactaaacaagctaatagccattaaatacttagaacactgcctggatgtagagtacttctgtattatttatctgtatcttggaaacttcatttaaataatttacacattgttgtgacatagtctcacatagcatcagcaggtttctcttaccagaatgaagagattaagaactcaatttaatgtttgacttacctgtagttatattcagtctttctgtgattgagtgtatgtgtgtgtgtgtggtcttcctactaagttccatgataaaacagtaacaatatcttttttctagaaggaggaagacataagcgcaccaaaataaatttatatttttgcattacctgacttcttgcaggaaaaaaatcatatttgaatatgagtcactaatagagaagtgaaggagatgcagttttcaatctactaagatgtaaatatagatgcctgattttaagctactccaacgcaatgcgttgccaatatgtatacatttgattcaacaattagtacattttctaggaattttgtgctactgcactttaggtgattgaatttgcttaagttcacaaatgtctctttgctcaggagttgaatga

SEQ ID NO: 93405 - DNA, 90472 bp, Homo sapiens
tgaatatcatgtgattctatttcaccattagaatgatgttgccctatacagaaagaaaatgacattgcaaagattctcaaattgtgtgtcttttggaagcattatctgatataatgctgaaatcataattgagaattccatttttaaatattctgtcttataaacctaaaaacatcaataatactcaagatttatgattgccaacaaaaagtggagaatacacataaatttaagtatatgtaacttaaattgtttaagttcctatatcatatctatttgatttgaaaatcataactaaacattcttgttgcaatttgtatcatatattcttttcatacacacaaatacatatgcatatataactatataaacactttccttgttttttcctaagccgttcatatttggaaacctaaaagtcaaatatatgacatgtaaaagagcattccaatatttattcattattccaatctagatatttaaaaaaacagagatttgctggattttaaaacttttttttaataatgagttttgtcagactgttgtgctttgctttgctaatttccatttgtatgaatttataatgtctttaaaatttaatttgtatcaaattatggtttttaaaattttaacatggggaaagattactctataatttcttccaagacaataaatttatatacatgattttccaccacaagtgaatcataattgtctctttttttagatgtatcatttaatttttttttttttttttggtttgaaaacattaattcctgggtagtgatgatatgaactgctaaccaaagacatgctgtttggcttccagaagtatgaaaaacagatagctttggcacactataatgcagaagaaaagagaagaaggctgggagcggtagctcatgcctgtaatcctagcactttgggagtctgaggcaggcggatcacttgaggtcaggagttcaagaccagactggacaacatggtgaaactctgtctctactaaaaatacaaaaattagccaggcgtggtggtaggcacctgtaattccagctacttgggaggctggggcaggagaatcgcttgaacctgggaggtggaggttgcagtgagctgagatcgagttactgcactccggcctgggtgacagagtgagactctgtctcaagaagaagaaggagaaggaggagagggaggagaaggaggagaaggaggagaaggaggaggaggaggaggagaaggagaagaaggagaaaaaaagacaggagtgggagaaatctgtaaatgtttaccatgattgaatgatcttttgaaaaccatcgcttctttttgcctcagctagcagccagtatgttcagagaccaagaaagattggaagtgcacagtgctctacaaaaggcaatatttaaaaccagcccagaatcttacttcaccatccttttttaatatttattttttccagtttcatattaatgccaagccaatggtgtttgatgtgatgcttcaaatgatgcagattgtttaatggaaagttatctattgaaagaacctaaaagggtagaaaaggcgagagtttggtttttgagactgttattcccatgtcatacttaaagaatgaaggcacatgagcacagagtacttctaggaatagaatcaaaggtacagataaatttaacaattttttttctatgaaactgccaggaacatttttctttcattcataggactttactgagagctttaagggtcagatgataagtttattaattagatagcattctaggacaatgactccaattctggtttcctgttaatgtccacagatgtatataagcataatgaactaccttcatttagctgagaacacattacagtctcccttgggtgccttttctgtgaggtcccatagcaccttgttcttcccactgagaaagtttcctcagctacactgtatgtactattccattatcttgctcagtaccctgctgcaacatttccggcatggagaagacatccaattaattgacaatggaatgaacatatctccagtcatcctatagtctgtcatgaactttatcaaaagcaaattaatgagtaggccagaggcttctgaaattgaataaatataaaagtgttattacacaaaggaggaaatgttggaaatcacttcaagaagactagcccttcagagtaaagaattcattttattctctttaatttcttagaaattattcattcattactttaagtaacttatagcccagcagggatgagagatattgaagaagcatttgcaatacagtgtgatggatgtaatgacaggggacttcgtttgggttgactgtagaagtatgacacagggggactttacctagaccaggaggtcaggacagcttctgtcttagttggtttgggctgctataataaacaagttcaaccatgtggaagtcggtgtggcgattcctcaggaatctagaactagaaataccatttgacctagccatcccattactgggtatatacccaaaggattataaatcatgctgctataaagacacatgcacacgtatgtttattgcagcactattcacaatagcaaagacttggaaccaagccaaatgtccaacaatgatagaccggattaagaaaatgtggcacatgtacaccatggaatactatgcagccataataaatgatgagttcatgtcctttgtagggacacggatgaagctggaaaccatcattctcagcaaactatcacaaggacaaaaaaccaaacaccgcatgttctcactcataggtgggaattgaacaatgagaacacatggacacaggaaggggaacatcacacaccggggcctgttgtggggtggggggagcggggagggatagcattaggagatatacctaatgctaaatgacgagttaatgggtgcagcacaccaacatggcacatgtatacatatttaacaaacctgcacgttgtgcacatgtaccctaaaacttaaagtataataataataaaataaaaaaaaagaaaggaacctacactggctagtttataaacaacagacatttatttctcatagtcctggaagctgggatgtccaagatctaggtacgagcagattcaggtcattttacatgcatgcatgcaagtgcacgggtttctcattttttcaccgagtggcatgaatgcatatttcacatttttcagactcattcttctgagaatagattttcaaatgttggaaactttttacatcacatttaagctcctttcaatacaaaattgagatccagtgttatagaaaagaagacaactaaaatcttttgaattgctcaggaaactcattgaaaatgacatatcaaattattctttaggcagaaaagacctggaggttttaaatctaccaccacaccttgaggagcagtttaggaggagccactattttggagcactgttctttttgaactaaaagcggcttatggatactgttcaaagacaccttatcttatagaaaactgaagtcaataatccagaacacattgtctaaatggttgagtaagccagggaatacagaaactgatgtcaagaaacatggataaatgcattggaaaatgtagcacatttaagaacttaatatacatagggtattattactactattatttcagtttcttaaataaactattgtccacctcagggcgaacattttatctggctagctcctacttttcattgatatgtcagcttaaatacttcttactctagagaaacgtctctgactcccagctaagttagccaatgctccttatacatgttatttttcctgggatttatcataattttaatttatttttgttaatatgattaatacttttttactaaattgtaaagtttagtagtgtagaaattatgaatgcctggtttactgttatatgctcaacatctagtacagtgcttggcatgagtaagcactcaataaatcttcaaagaatgaatagatgtatgaatatataaaggaaccagtgatttcatgaacaagcaagaaggtggtttcctagcaaatttctgggatcggcagtgttatggcctgcccatctcctttatgtccttgctacctgagagatcctgctacatttaacgatccatgaatgggggttcagggtttcttttgaaagtgaagaaaaatttctggaaatagataatagtaagttgtacatgagtggtaatgtacaactctgtaaatatactgaaaaccactgacttgtgcactttggtgaattttatgctatgtgaactatatttcatcattatttttttaaatccattaactcatcattgtgagtgtccattcactttagtagtgtaggtgttgtctgacttgacatgcttccatagtcacccagaagacagttacatggtttcaacaattacattaaaaggtaacatggtgtctattttactaaaaattggagaatttacttttagtcgtatgataccatgactctagggtttacaccactcagcacaggccttgcaaaatctctgcaattgtgtgatatttctcagaaccccaatgcatccatctgtaagctcccacagtatgaagggcatatgaagaaaaggatgtcataaacgattctagtgtcaatttactgcctgcttcacttccactctctcccctcttatactggacactgattctgcaaagaagaaaatcattggcgaactgaaatttctggtccagatccttatttcctgccctcaggaggatttgctactatgactttttcttctgcctaaccttctttctcactgccattcagcctgattgccgaaaggctttcaaggtaaaaaccatttgaaacagacaagctcacccagaggctttgcttggctattgggaggaacagtcttgattttactcctactctttgctcaagtacctcagtatgagccagcagcctcaaagccacatattaggacctggggagaaaagcacagaacacagagcagctgttataaagaatgtcccagtggtcttttggaaagcaagaggtattttagccccaataaacaactaaacctgaagatcatagcagaaaacttcaccagactgtaaacctctatggagtagggaattgtcttaatttattctaggtgccaattactaacattttctcctatatttatatatttattaattagtggctcctttcactctcaaaagtgtccttgtgtatatgaggatttatatgatcacctttgctaagaaccacgcctgacatatgataacacataagtgagagctattattattattcaaagtgatgccttgttttcttattgactgttacctttcagccacttcaaactgttaacactgttaaaagaaaaagtataattcagattatcaccagcatttagataaatcatttatcctttttactttttcagatgcacaaggagacaacaaagtcgtggttaaaagacagatagaaccatagcagaattgtctcaagcttatgtgacgtcttaaactatttcctctctccccgaatactcttaagtgatttgtaaattattttctttctttgtagcatatggcaatcctaatttgtaatgccatttagtaatattggggaaatttaacattaatttacaagaagtttcttcaagaaatacaacacgtgtagttcattatcacagttttgtttcattgcctttttaaaaaatcgtaagtaagcaagaaagaagaataacagtactgattctttcttttccgttactgatggcttctagtgggtagctctaaaaatctctgtaaaatggaagtcatactgtgtcataccccgctttaaaacaaatggctgtcaatatgtttcagaataaaggctgcactcctcctaagctggcactcagcaacaaggtcatgttcattttgagaccaagatcatgaagcgcaaccacatgaagccacgtgagtttgagtccagcttttctggagctggagatgaactcggacctcaagcctcagctcagggaactgaatataacaacaaccaaggaaattgaaattgttgatagttggaaagttattataatctttgttcccattcctaaactgaaatctttccagaaaatccaagtctggctattacatgaattgagaagaagttcagtgggaaacatgttgtctttgttgctcagaggagaattctgtctaagccaactcgaaaaagccacacaaaaaataagcaaaagctcccaggatcttctctctgccagtggtgcagagcaaggaggaccatgttgccaggctatggattgcagcctatgtctttttgtaaaatttcttttaactgtgaatatacattttttaatcatttttgtttgcaactatgggaattcaaaatgaacatccttgctcatgagcttcttacagacatcagaaaaagttttcaccttgaggtccacatgttctgctatggtttgtccaaaggaacctttatgcgttggccattcagtgtcaggaagattccgttgcccacaatttcgattatgttattttatataattttgtgtcttttaaagtacttgagagaataaacattattgttatattagccttcttatttatgtttctggttctcttcatttctagctgtggatttaagttactatctcatacaattttcatcttataatgaagatctgttcccacacactgccttcatgtcattactgtcaaatatattacatttttttacattgtagactcatcaataccattaaatttatagtgttttattcaactgctttttcaatcaattaagcaaagaaaagaaatacgcaattttatgccacttataattggctcaataattatctttagaaaaactctgttttttgcatgttaatttgaatttccacttggatccacttgctttcttataaagaacgtcctgtaatcttattattttttgtaagtagtgtgtgctagcaacaaactctcatgatttttgtttatcaggggatagtttttattttgccttcatttgttagaggtggttattctgcatataagagtttcagttgattctttctttcagcactttgaatatgtcaccccaatgctttctgcctttttcttgtcaacttggcatgcatattcatttttataaataatactaatttccaaataaagacaataacaaggtaatagttcacgtgacacaatggaactattctgtgattgttactttggggatttttagacattagggtgtttatactttagggacttagacattagagattttgatctttcaggatttcaacattcgggattatgatgtttaggattttgcttttcaagattatgattggctaccactaaatccattatctaaaatatccacaattctaaaaaaattacaatacaacaggaaaatgtgagccataaccagaaaaaaatgcaaacaataaaagctgcctctgattggacacagatttcagacaacatatttcccactgaacttttttttctccagttcatgtaatagccagacttggattttctggaaataaatttatcataaatttattggaggagctagtataagaaagtatcagtgaattcaaagaatatcaatacagattgttcattctaaagagcagcaaaatgaatgaacagaagtaaaaagcacatccgataaatgtgggacgtcattaacttatcaatgtacatgtaatggagtaccagaagaggacagggacaaaagagcagaagtaataatgggtgttattatcttttgaaatttcaatgcttgggattgtgtgttttaggattatgatcagctccttatcagcatcttcccatctctcctctttcctaaccactcaaattctctggtaactatcattctactctctacttctctactttattagatttcacatgtgagtaagatcatgtggtatttgtctttctgtgcctgactcaattcacttaacataatgtcctccaggttcatctgtattatcatttgttttttaagtaactttcctgaacttaatctgtggtatttttcttccctgctctgtgtggtcactgatgtttatattcagtttttattttatgtcattttagtgtagtttagtttgaatatgtttggattagtttagcatatttgcctgattacctatcggtaacctttatttctacatggcttagtggtttggcaacagttggtcagaattttttatatatatatatatatatatatatatatatttattatactttaagttttagggtacatatgcacaacatgcaggtttgttacatatgtatacatgtgccatgttggtgtgctgcacccattaactcgtcatttacattaggtatatctcctaatgctatccctctcccctcccccaaccccacaacaggccccggtgtgtgatgttccccttcctgtgtccaagtgttctcactgttcaattcccacctatgagtgagaacatgcggtgtttggttttttgtccttgcgatagtttgctgagaatgatagtttccagcttcatccatgtccctacaaaggacatgaacccatcattttttatggctgcatagtattccatggtgtatatgtgccacattttcttaatccggtctatcattgttggacatttgggttggttccaagtcttttatcaaacaccttgagtcagttagtcttccatcttttgacagtggatttgtgtgtggttcaagggaggcatttcaaagttcccaaacttctcacattattttcttcttttactttcctctgggtcctcttagttttctcttgcatatttgcagtgtctcagtcaggttagtaatatggggaggctttgtgttctctcaagtttctcctattcgtacgtccaggctctcattcaatcatgcttctttaaacaaattgggttttcttgtgcctctcttgtgtatttgggtgagttggccaggcatgcgtggagtgcttagctaacctttctatgatttgcccatttccagaatctcccagttacatttctggctgtttttctaatcagttgtcacacccagctgagaccacagcctccagttagcaaagctgcagatcttccctgtttaccaatgggtatgagtttcccaccctttgctgtcaatcaagtcagcccagattagcaataaagtttctgtttcttacagccaacactgtcctggtgtctctactgttctgattaaactcatgagggatagatatagcctcaggccacaacactatagactcctacagtttttacttgatttttaggagtaaactattttcattgtgttgtttgccttagatcaatttccacaacccttaaatggttattatcaaatacttgtccaattttgtactattttagggaatagagtttttcaccttgttcattccttcaaagccgtgagcaccatccctccatgagtttatgaatacataattgaggtcatattcttaataagattttatatccacatatgttcaataaacttagaattattcatgtcattgtaaatgcattgaaacacggtttttaaaagtcacatggaaatcctttgtactaagtcatcataatttaaccatctactattggcaatttaggttaaattttttgcctctatgaactgygatggatatttttgcatataaattctttcctaagccattcctgtcactagaagtattgtgtcaaaaatataatttttaaaggttaaaaatacatattgcgacagtctttaaaaaaaaaaaagaccacaaggattaactcctctagcaccgtagtgctgtttattatacccttaccattattgagaattaacattaaaaatatatgcactttgataataagataatataaaagctctggcaaattttgagttgcttttctaagtgtctttattcagctcaactctgtaattctttatttaggattaatagatatagatattttccccttttttggctgtttcattcattatcttttcttgcagtagagcagcatatcatttcccatcattgcgtgcaacatctaccccttttatctttctaatggagctatttttagaaacagcattttcattatcagttctccatgactgtaaattgattcatccaattcctatgtcttaaattttaattagatcacagaaatatcttctggctttaaggagtacaaactccaagttcctttgcaaagtagctgtctaggttttacaaaatgtttgaagggaaaggatggataatacattgcattttaaaacattttgcttttattatactactttttgaacagagactaaaatacatttgatttaatctactgtagatatacattgggtgaactcggtgattaccttttttgagactatctgaacgttttcttttaaagcttttttccaaaagatatttatctttgctaattcttttttaactatgatggattgaatctagaaagataattagtctagactatgccacagcaccttatgtaaacttttagcaatagccatgacattgttcatgcagaaatgtctagtaatatttattaaacattttgaagacagtttcttcctaaactaatcttctacctgaggtatctgcttatgtcccagtagaatcattcacctcacaatagccagagtaatctttaaaatcatcagattatatgattcccctttgaaaaatcatttagtatgtggtaagtttatgacaatttctcccatcccattatgtatgtccttttgtaatggctttgtcactcctcatttgaagagttaaggtctgtttccttaccccttcaatctgagataactgtgtgccttgctttgtgctaaagaatgtgatgtatttttctagttctctgaagaatgatgacggtattttgaaggaaattgcactgaatctgttgactgcttttggcagtatggtcattttcacaataatgatactacccatccataagcatggaatgtgtttccacttgtttgggtcatctgtgatttcttccagcagtgttttgtagttttttattgtagaaatatttcacctctttggttaggtatattcctaagtatttgatttattgttttgcaactgttgtaaaaggaattgagttcttgatttgattctcagcttggtcgctgttggtgtatagtagtgctactgatttgtgtacattgattttgtatctggagactttactaagtctaggagctttttagatgagcctttagggttttctaggtatacaatcatatcatsagcaaacagtgacagtttgactccctctttagtgatttgcatgtactttatttctttctcttgtctgattgctctggctagacttccagtactaagataaatagaagtggtcagagtgggcatccttgtcttgttccagttctcagagggaatgccttcaaattttccccattcagtattatgttggctgtgggtttgtcatagatagcttttattacattaaggtatgtcccttgtatgctgattttgctgagggttttaaccayaaagggatgctggattttctcaaatgcttttttctatgtctattgagatgcttatgtgatttttgtttttaattctgtttatgtgatgtatcacatttattaacttgcgtatgttaaaccatccctgcatccacagtatgaaacccacttgatcatgatgtattatctttttgatatgcaattgtattcagttagctagcactttgttgagaatttttgaatctatattcatcaggaatattggcctgtagttttcttttttgttatgcttttttctttattttggtattagcgtgatagtggcttctagggaggattccccatttctccatattttggaatagtttcagcagaattggtaccaattcttctttgactgtctgatagaatttatctgtgaacctatctggtcttggacttttttgttggcatttcttttattactgtttcagtctcaccacttgttattggtctgtttagagaaataaagccaactacttacatctaactgatcttcaacaaagcaaacaaaaacattgagtggggaaaggacaccctattcaacaaatggtgcttggataattggcaagccacatgcagaagaatgaagctgaatcctcatctttcaccttatacaaaaatcaactgaagatagaccaaagactaaaatctaagacctgaaaccataaaaactctagaagaaaacatcagaaaaactcttctagacagtggcttaggcaaagagttcatgaccaagaacccaaaagcaaatgcaacaaaaccaaaaataaatagatgggacataattaaagtagaatgcttctgcacagcaaaagaaataatcagtggagtaaacagacaacccacaaagtgggagaaaatattcacaaactatgcatccaacaggaggcaaatatccagacttgtcaaggaactcaaacaaatcagcaagaaaaaaaaaaaaaacaaataacccaatcaaaaagtgggcaaataacttgaataaacaattctcaaaagaagatacacaaatggccaacaaacgtgaaaaaatgctcaacatcactaattatcagggaaatgcacattaaaaccacaatgagataccatcttactcctgcaagaatggccctaataaaaaaaaatgatagatgttggcatggatgtcgtaaaaagagaacacttttacactgctggtgggaatgtaaactagcacaagcactatggaaaacagtatggaggctccttaaagaactaaaagtagaactaccatttgatccagcgatcccattgctgggtatctcctcaaaggaaaaagagtcattatatgaaaaagacacttgcacacggatgtttaaagcagcataatttgcaattgcaaaaatatggaaccagcctaaatgcccatcaatcgacatgtggataaagaaaatgtggtatatatacaccatggaatactacttagaaataawaaaaaaaaaaccaatataatggcattcacagcaacctggatggatttggagaccattattctaagtgaagcaactcaggaatggaaaaccgacgtcgtatgttctcacttagtgggagctaagctatgaggacataaaagcataaaaattatataatggagtttggggacttgaggggaagggtgggaaggggatgagagataaaattctacacattgtggacagtgtacactgctctagcgacaggtacaccaaaatctcagaagtcatcactaaataactcatccatgtaaccagaaatcacctgttctcccaaaatttttgaaataaaataaatctcatgtaccacataaatatatacatgtatgtacctacaaaaactaaaaataaaacattataaaagaaacaaaaaatgtgatggaaatgttatacaagtgcaagagctttgttttaaagttgcattgcagcctctgtttacaatctcttggaatgttgtatcaagtttgtcacataaggtagctagtctaacgtattgaggaattagaggccctgttgagtgtagcagagcctccagagccaacaaccatcagaaactgctggacatgcaagtgagagagacatcttggaccctgtagcccatcagctcctccagctgaatacttctacataaattagctctgaaaaaaccagcagaggaactgaccagctaactcacagaatctctctctctccatatatatatatatatataaaatcaatatatatattgattacagaatcatctatatatatagaatctacatatataatctataatctataatacatatattataatatattatatataacatatatatagaatatatatatatatatatagtaattttaagacaataagtttgggggtgggttttgctgcagcactagctaaatgatacaagtaactttccatcctactrtgtattttactctaatttttcttttacctttgcccacaagtcccttggttatctataattttctcccacgatatcttttaatatgattcttcctatttttttaatatgatttttatatgattcttcctattttttaaatatgattcttcctattctttgttgcaatatctttttttatcgattttagattgctttttttattattattatactttaagttttagggtacatgtgcacaatgtgcagatttgttacatatgtatacatgtgccatgctggtgtgctgcgcccattaactcgtcatttagcattaggtatatctcttgatgctctccctcccccctccccccaccccgcaacagtccgcagagtgtgatgttcccttgcaatatcttaaaagctaaaaattctccttgattcccactctttatccccctatgttagtatgtcatattctcttgccactgattctgttatggccagagaccagaacatgagctattatctcacaaataaaaataagccacagtgttcagctggcctgtcctccaataattcccactggcagtgaaactcaaggcacaccccttctgatagttcatcagcataggtaatttaaagtttaccaagattctgaggatgtgggccaagggaaacagcagtacactgttgatgggaatgtaaattagtatagcaaattagaaaacagtgtgaagcttcctcaaaaatgtaaaagagatctaccatatgatcctgtaatcctactactggttgtatgtccaaaataaaagaaatcagtatattaaagatagatctgcactctcatgtttactgtagacatattcacaatagccaagatgcaaaagcaacttttcatttctaacaacatgaatgaagctggagatcattatattaggtaaaataacccaggcacaggaagacaaacgttgcatgttgtcacttacttgtgggacccaaacatcaaaacaaatgatctcatggggatagagggtagaaggatggctaccagaggctggtaagggtagcgggggtgggggtaagtggggatagttaatgagtacaaaaattgtgagaaagaataaataagacttggtatttgatagcaccacaaggtgactatagtcaaaaataatttaattgtgcatttaaaataaaaataggctgaatacagtggctcatgactgtaatcacagcagttagggagaccaaggcaagtggattgcttgaggtcagaagtttgagactagcctttgcaacattaagaaacccccatctctacaaaaaatacaaaaattaggcaggcatggtgttgactacctgtagtcccaggtactcgggaggctgaggcaggaggatcgcttgagcctgggaggttgaggctgcaatgagcgaagattgcaccactgcactccagtctgggcaacaaagtgagatcttgtctcaaaataaataaatagtaaataaaaataaataaaataactaaaaaatataattggattgtttgtaacacaaaagataaatgcttgaggtgatgggcaccctgtttaacctgaaattattattactcattgcatgcctatatcaaaacatttcatgtaacccataaatatatacacctacaatgtacccacacaaaagactgggaaatagaaaaaaaaaaaaaaagaaaaacattactattgagaatctcttattaagaactcatacaattaagtatctcccattgagttattgcctaatactcctgtctctaakcgacactgcttatcatatagtctctcagtggaggcagaagtaaaatcagctgttcactggagaactggcagcatcgtgggaggaggtagsccttgatacttaggtacaaggaagagcatcagaaacaccttgtgtggagtttctaagcatagaatcttggcttagcagagagccacagactgagaaattgtagagaagcaaataagacaatgagcataaagatttgtacaatgttaaaatattaataaaaatatgaaagacagcaatacataactatacatmtgcatatgaagaaaagaaacactggaatgagaaataatattaagtaacaccttctatatcccaaacactgtacttggtaggtgatggatattattttgttttaaacattcagaaaacctgggaagttgattcagttgttctattttacatagaaataaatcaaagatgacagaaatgaagcaccttatgcaaggcttaaagataactaaactctttaaggcagtattcaaaatcaggtatctctaactccatttttttttccattctgttacattgtgctgctttgttatttcaaggccaaaagaggcaaaacaaagatttaaatggacttatagtcaagattaatatgtgagcatataaatttgtctcttgtcatccctattcccattgaaataacaaaagaaatattaaaatatgataaaacatatttaacttattcaaggagtatgtggatgtttatggttctatctgatgtaggaaacttttaattttttaccaacttggattaaatcagaaaattacattcatcctttaaaaagaatgatatttatcataaggaatgcatttattagatagaatatctggagccaaactgcctgggttaaaatcctatctcctccaattataaattatatagtcttttttcaagttatttaaactctccttatcttgttttccacatatgtaaattgaggttgttatgagacccaaatgaattaatatttgtgaagatgtcagaatggtttctgatgtatgataaatgtaaattaatagttgctaaataaaaataatttgagtaattgttgtttttttgtcatagacttctgtgaagaaggcaacattaacaccagaatctaattattgctcttttgaattcttatctacatgactgtgaaaggctaaataatggctcacaaagatatgtaggtcttcattcctggaatctgtgaatgttatttatatgggaaaacagaagtttatatatgtaattaggttaaatattttgagatggggagattacctgaattatctgggtgagccctaaatgtaaacacaagtgtcctcagaagaaggaggcagatagagatttgaagactgaagaataagaaggaagaggagaaatatttgaaggaggaagaagctatgtgataataaaagtgggggcaggaaacaccatatgataaggaggtataagcgaaggaatgaggacggcctatagaagctatagaagaaaaataaatggattattccatagaaactttagcagcatcacaacccagctgacattaagacttcggtatagtgaattctattttgtatttctggcctccacagccatacaagaatgaatttggctgggcacggtggctcacgccttaatcccagcactttgggaggccgaggtgggtggatcacctgaggtcaggagttcgtgaccagcctggccgacatagtgaaaccccgtctctactaaaaatacaaaaattagccggatgtggtggtgtggtggtgggtgcctgtaatcccagctacttgggaggctgaggcaggagaatcgtttgaacctgggaggcggaggtggcagtgagccaagactgtgccattgcactccagcctgggcaacaagagtttttgaaactccatctcaraaataataataacaataataataaataaataaacbtgtgtaaattattctgttgttgataattcattacagcagcaatagaagactaataaaaatgactggctaaggcatatgagtggaggaaaatctacattaatgctaaagactagaaaaaggtaaacaatttccactcaatataatactgatgtgacctctttgaaggaagacasagggctgacatttgacatactctgtaataaaagaacagtatatctaaaattgaatttgacacctcttattttatrgaattcacatctggagatgaaagcatggcatgagatgtcagaacacacgacttggtcttctcttcaacaatatgggtaaatcaacacaatgtggagtccagtagtgttacttggtgaacccagaaatcatttatggccgaagctcctataataaacagagctttgggagagtagcagcaaggctgagctgagagttgaatgttgcttcctgacatggtctccttggcaaaaacagaggcacatgtgaaagtccccactgagcatattcttgttcctaactttttctaaacttctgccagtgaactagatctctgaatttaaagaacatatttctagcaagtgtaatttttccttttcccctcacttgtaccattaaaatttgtcagaatcccagtctatttcacaagatatccatttcaaatcaactttattgatagtaaaagaatatttggaatgcctagacatttctctataagaatgcaaaattaaaggaaaatcagtagacccaaaggcatgtgttgcaattcaaaaagctcccctgaaaaattagaacaacagtcttcacctgaaagagatgtactgtaagaaacaaaacaaaatccagacattaaatctacgacgttagaccaagcagccacaatgaaagaataatcaatgagcataaaacattgaggaaggtgaaaactattattgtcaaaaactaaaataatagaagtcatagctaaagtcttttagtaagcctcttgaagtaatagtagtgggctattagttatttgtctctcatatttcaaaacacggatcaatgaaatttaaagattttgtcataagtattgagtgaatgcataaatatgatttttgatagcactgtaagcgtacacaggaatttcatttactggttgtttggtgccttttatccctgtttgaatgttttcagtgtagttaacagtgtattatagacattcacattaaaaaaaatgacatgaattaacagctcctgatacaaaccaaaccaayaaaaaagtaaaaactgacaatttcactggaaagtaatcctttgggaaaacaatttgacaaatacgagaaaagtttccagttactataaagctgataggaatctattgagaaaaattactttgaattcactttatgatctactcatacattgctttatgaaatatacaatctgattttaaaatggccaacgtgttttgtttatttcgtgctacctgattctcattcataaagtgtttcattttgaaaactggttagttgtcattctatttcacaagcacctctttgtgatgccaccagagtatttcctcaaccagttttctacaaaatattggacactgtagtactttaaaaccaaagttccagaaggtctgatggcagtgtcttgcactctgataattacagtcctcaaaaatagagagatacttcagaaataatagaatgagaagctctacagatcttcttcccaaccaaacaattataaattttaaagaaatctttctttaaagtctctaaaaatttttctgagggtatacaacaaatagatacgtttacttgggagaatctcagtgttttttaaaaagtgagatactgtggcatttgagacacactcacacctccagttcagtgcaattgaagctctactgctgataggtgtaggtaagaataaaagactccttctacccccatatctcagtctagggctccactggagggggaggatgccagcatttcttattccccaaaacttcatgttgcagacttcatgttgcagaagctctcttccggaaaagatggtctataagtagctatactgaaaaagaatgaatatctcaaataaacaacctaatttyccatcttaatttattgtaaaaggaagagaaaagtaagcccaatgcaaatattttaaaaagttgtttcctcggaaagattaataaaagtagcaaaactttagctagtatgaccacaagaatgagagaaaaaattctaattgctaaaatcagaagtaaaagaggggactgtactaaaatctttacagaaataaaaggaattatgaagaaatacaatactaggaacaatgtatgccaacacataagacaactttgataaaatgaacaaattcctcgaaagacgcaaattgccaaactgactcaggataaaatagaaaatctgaataaacatatagtaagtaaagggattgatttagtaatcaaaatataaccacaaataaaagaccaatccagatatctttgcttctgaattctatgaaaaatttaaagaataattactatcaatttttcactacaccttctaacaagtaaaagataaatgaacatgtatgattcattttaggaggctggtattaccttgatactaaaacagacaaagaatcaaaaaaagaaaagaaaaaaagaaaaagaaaaaaatactacaggccagttggggtccttatgtgctgatgcactgcagatggaaatgtaaaatgttagagccactttagaaaacagtctggctgtttctccaaaaaaaagttaaacatagaattaacattgaccgagcagttccactgctagatacatacacaagagaaaaaaaaagcatgtatcaaacaaaacttttatacgaatattaatagtagcattattcataaaagcaaaaaagttgtaaaccaacttaaatgtacatcacctgataaatggataaacaaaatgttgtatatacaaacaattgagtattatttgtccactagcattactaaatagaactaatcttacaattaagatggaaatatgagttgaaaaactaaaaaaactaaaaagacaactagacctcataggaatatatgaaaatttccgcccaataatagaagattacacatttttctcacagtcacacagaacattctccagtatagacaatacgtyggggcataaaacaagcttcaatattttttaaatgattcaaatcttaacgtatgttctctgacccaaatgcaatgaaatgatgaatcaaaacagaggaaattcacaaatataggaaattaaacaacatactcctaaataaccaatgagtcaaagaaggaatcacaagagaaatgataaaatattttgatatgaatgaaaatatagacgcagtatatcaaaatgtatgctaaagctgtactctgagagaaatttatcattgtaaatgcctatatyaaaaacaaaacacaccttaataatttaaccttccacttcaatcacctgaagatgttaccaaaacaaacaccaggggttcagtctaggttctggggcttgcagcagagaaagccagtcactcagaagaattattgcaaagaatgaaggcctcaattgggtgctgcagccaaggagatgggatatcagtctaaaatccgtctccctgactgaataaaattcgtagtctagatagcagggaataaatgtaactatgtgtgggaaaacaggaaatgaagagaggtaaggaagtaatcatggtaaatgaggggcctggtgtcttattttctggatgcaatgatctagtgagtttcagttctttgatactttctgagaggcctatgggtcctttcctgaggaagaaactcagagaaaacaaatataagctttgttttcaagctttaagctttaagaccagaatagtcaacttctatgcaaaaacaaaatcaagaacaacaaaaaaactgtaaatgggactattaggttggtttcaaagacaatgagaaaamaaaaagcaaagaaaaagcctacagaaggaaacgagattagcgaaaaaattcatataatagaaaacacagataaaaacaatagagaaaataaacaaaaccaaatttaggcactttggaaagataaataacattgacaaacttttagataggctgaccaagaaaaatagagaaaaaatcaaattactttattcaataatagaataaggtacgttgcttgtaacaagtcccaactaattccttgagatatgcatagctctgataccaaattcataaagatatcacaaaaaagaaaatgacagacccgtatctcctatgaatataaatgcaaaacttcaacaaaattctcaaacataaaatcaaaacttaacagggatttcaatgaatttgttttggacagtattcttttcacagcataaattaataagcatataatgttttcccattcatttaggtattctttaatttcctttagcagtgttttgtagtttttagtgcacaagtatttcacctctttttaaaagttttttttcccttggtattgtattattattaggatgatattttaaattgaatacttttaaaatttttttgtttttctttgctaatgtatagaaagataaataattctttcacacttattttgtgccatccaacattctaaaataatttgttaccactaataggtttttttttttgtaaattccttgggttttctatatataagatcatattatctgcaaacagagaaagtttttacttcttttctatttggatcccttttatttattattggccaatttttctgtctagaatgtccactaaaaagttgaatagcaatggtgaacccccacgtttattgcagtactatatagctaagatatggcttcaagctaaacatccatcaatatacaagtggataaagaaaatgtgttatatatacacaatgcaatactattcggccataaaatgaatgagattctgtcatccctggcaacatggatgagcctggaagacattggattaagcaaaatcagtcaggcacagaaatataaatatgatgtgatcttactcatatgtgggagcaaaaataaattttgaggttatagaagttgggagtaaaattgtgggtattagaggctggaaagtgagtgaagatggggaggtattggctaacagatgcaaaattacagctagataggaagaatgagttctggtgttcttcagaactgtaggatgattatggttaactgtaatttactgtatacgtttaaaaacctaaaagagaggattttgaatattcccaacacacacaaatcacccggattttgtcattatgcaatgtatgcacatgttgaagtgccattctgtattccccaaatatgtacaatttttacatgtcaaataaaaataaaaggaacaaaaaccaatgagctattatctcacctttttggatagctattatcagaaagataatacaacaagtctcgatgaggttttggagaaaagcaaagtgttgtacgctgttggtgggaatgtgaacgcatattacctttatggataacagtgtagagattacaattaaaaaatacatctagcttataattcattaatctcacttcttcatagatatccagtggaaataatattaggatttcaaaaatatatctgtatccctatgtttaatattgcgttattcacaattgcctagatacggaaacaaaccaaatacctaatgatagataaagaaaatgtggtgtaaatacacaatagaatgctgatgagcgttaaaaaataaagaaatcctgttatttgtggcaacatggatgaatctggaggacattatgctaagtgaaagaagccaggcatggaaagaaaaatatgtaagatctcatttatatgcggaatttaaatcatcaaactcatggaagcagagaggagagtggtgttttccaggggctggggagtgaatgcggagaatacgggagatatttgtcaaagggtacaaatttttagttatgcaaaatgaattagccctggagatctaatgtacagcaatgtgagtatagttaacaacattacattgtgtacttgaaatttgctaaaggtgtaaatcaagtgtggtcaccacaaaaaataaaaggaaaaataaaagaataaatatgcggggtgatggatatgttaattagcttgtttgtggcaattatttcacaatctgtacatatatcagaacatcgcgttgtacaccttaaacatatacaatttttatttgccaattatacctcagtaaacgtgaaaaaagagaaataagkttttccaattcatttatacctataaaaaagctcacagataaagaccaataccactaatatatatacatgcaaaattcctaaatgaaatatgagaaagataaatacaataaaaataatttttcatgtccaattggtttattcataacattacagcttaataagacttaatatagtaatcacagtatcaatgggttaaaggattattattccgaataaatcagatgacaaagagacatttaataaaattcaatataactttcaaatgtaagctctcttcaaataaaatcttcctttcttaacaaaatcaaagaaatctgtctttaaattatgatgaatatcatttgttccaaagaaaatatagaaaatgtatgttgcaaatcaaagattacatgcagagtctaataatcacctcattaatttacattatctgggaagttctgattcacataacaaaattataaaaataagtaaactaattgaaagtgggagataatatctttatttgcataggatattttctacctagaaaattcaagaaaatcaactgaattctgtttttttttttttcggagacggagtctcgttctgtcacccaggctggagtgcagtggcacgatctccactcactgcagcctccgcctcccgggttcaagcgattctcctgcctcagcctcttgagtagctgggactacaggcgcatgccaacacactcagctaattttctgtatttttagtagagatggggtttcactatgttagccaggatgatctcgatctcctgacctcgtgatttgcctgcctcagcctcccaaagtgtgggattacaggcgtgagccactgcgcctagctgaattcttagaactcatacaaaatgtgtgtaatctggttggatacagaaaaaatcactgaaaaacataacaaaaacagcaaaaaaaagtaaaattgtttaataacacatttaacaaaatatatgaaaagtctttatgtgtgtataactttatttgaatgtatagtcaaggcatgtgcttggcatggaaagacaatattttaacattctgaaatcctctctagttaatgtataggttagaaattccagtaaaaatctcaatagcatttgagcactaacaaaaagctttacatacatgtaactttattggaacgtagagtggaggtttgtgcctgggatggaaagataatattttaacattccaaattactccctaattaatgtataggtaagaaattccattaacaatttcaatagcgcttgagaactaacaaaaatattctgaagattatctggaaaaacattcctaaacatagccaggaataaataaaaagttaaacagtagaaaatttctctacaaaatattaaaataagagagttctaataagttacagtacagtagtattcatctaattcattgagaaaagaatcagaaaaaaccatacatgaaatacgctatcattcaatagtaataacagamgtacaaattgtaacagtataaattgtactttttcagtgggaaaatgaccacaaaaacacctttgaagactatatttattattggtgaagattggaggaaataaacttttcatatatcgactactgtaggaagstatgttcatgtgtataaaaaatcttatatattgcagagtgacaatactacctttgattctttcacagtttgcactcagtaaggagatgtctatataaaggacctaagagctactgaattccccagaaaaggctatttagagccattctgcctttggatattgcttaccttttttgctaataattcaaggaatatcagtaaaaaatagaattcggcacacaaacttgcaaaatgcctgacaactatttcttccttgagattttctgtctttagtttcatcttgtcataaatgtttaaacttgcaagttccataaaataaaaatcacaattatgtcagtaattactttgttttccagtcctgtttaataataagcaaacactgaaataattgaagggacaaaatgatcaacacgtctctgaatttaatcaggtgtttctaattgccatcaattacaaatgacatttcgttctttttctaactcaagttactccatctttatcctcatcaaaagagtgcattcttccaaactttttaactttcataagaaagaaaatgtgaggcaacaaaaaatctgtaagaccacagtaagttggccctattaaaattcacggcaattatattggcttaacaatatatttatataaagacatagtggctcctttattatcatctcattatctatcaattttggacaaaattttaatttcttaaaagtagagctaaaaacatatttttgttgttaaaaaacacctattttacatggccacaaacttcctaaacaagagtagacaaaagcaatcaacatcttgagagatgatgaagtaaaaatgtgcatctacagttattgtactattaagtctgtacatctttgatagtagtaatccaaaatctttggaatattaaaaacatgttttagttactgaatggagttacrtgtttccagttgaaactacatactttgtttcaattaagttcttctagccaaaacatcctcttactaagtggaccaggtggagtatccacttatctctaagtatggggtttcagttctctcatggcctcagaattatttaaacaagccaatcgtttttttctactggaaatagggagcagtgtaccctcttgatcctaggaagcctgcttcccatagtccctggttgtttactttgttcttgaatgcaaaccccaaccccatgtggcctgtgatgccttcctcttccaggctttgagtatatgtgaccaataaattgctgtggatatcatttatttagtatcagatgttgtgtgttcggctgtctcaataaccctagggagggaattccttcctcacaaatggggtgaataaaaacaaaaaataaataaatatgattcatgagaagtgttacggatagtcaatagtagttagtatatcagaacaactcatatacatatgttaagtattgacattggataagcaagtaatttataagacatagtcaaaattcagaatacaggcatgcctccttttattgtgcttcactttcttgtctttcacagataatgtgttttttacaaattgaacatttgtgtcaatcttgcatccagcaatcaatcagtgcctttttcccaacagaatgtgctgacttcatatttctgtgtaatattttggtaattcttatatttacaattttttattatatattctgatgacctttgatcagtgattcaaagcaattattctagtaattgttttgatgtaccacaaactatgcccatataaaatggtaaacttaatcagtgaatgtggtgtgtgttctgactgctcaacccacaggctgtgcccctatctctcttcatctcctcaggcctgagacaaaacaatgttgaaattaggccaactgagagccctataatggcatctaagtgtttcagtgaaaggaagaatcacatctctcactttaaatcaaaagctaggaatcattaaccttagtgaggaaggcatgttgaaagccacgatagaccccttgcaacatgttattagccaagctgtgaataaaaaggaaaagttcttgaagaaaattataagtgctactcaagtgaatacatgaattataagaaagcaaaacaaccttttttgctgatggggagaaagtttgagtggtctgaatagaagatcaaaaactagcctcaacattcccttaagccaaagcctaattcagagcaaggcccctaactcccttcaattctatgaaagcaaagagagccaagaaagctgcagaagaaaaatttgaagccagtatgacttttaagtaaagatgtctccctgacatcaaagcacaatgtgaagaagcaagtgtagaagcttcagcaaattttccagctctcactaagataacgatgaaggtggctacaataaacaacagatgttccatatagatgaagcagccttctatgaaaagaagatgccatctagaatttttacagctagaaaggagaagttgatgcctggcttcaaagcttaaaaggacaggctcactctcttgttaggggctaatgcagttggtgactttaagttgaaaccaatgctcatttacygttctgaaaattctagggctcttgagaattaatgctaaatctattctgtctgtgctatatacatgggaccacaaagcctggatgacatctccttacagcatggttgactgaatattttaagcccattgttgwgatacgctgctcagaacaaaagattaatttaaaaatattactgcgtattaattattcacttggtaacccaacagctcttgtggaactgtataaggaaattaatgttgttttcatgcctgctaacaaaacatcccttctttagcccatgtatcaaggaataatttctacttgcaagtctcattatttaagaaagacatttgtaaggctataggtgccatatctaaaaattcctctgggaaacgtaaattaaaaacttcctggaaaagattcattattctaaatgccattaaaaatatttgtgatccgttggaggtcagaatatcaacattaacagaagtttaatgaagttaattctaaccctcatggatgacttttatgggctcaatatttcagtggcagaagcaactgcagatgtggtagaaatagcaagagaactagaattacaagtggatcctgaatatatggctgaatggcagaaatcttataataaatcttgaaagcatgaagagtacctcttaagaatgagtgaagaacatggtttcctaaaatggaatctactggtgaagatgctgtgaacattgttaaaaagacaacaaagtattttgaatactacataaacttagttgataaagcagtggcagggtttgagagggttgactccaattttaaagaagttttactgtgggtaaaatgctataaaacagcattgcatgttacagaaaaatctttctgtaaatcattcaaggcaaagtccatcaatgtgacaaacatcgtcatgttattttaagaaattgccacaatcaccccaaccttcagcaaccatcaccytcatcaggcagcatacatcaacatcaaagccagatctcccctcagcagcaagataatggstcactggagtctcagatgattgttagtgttttatcagcaataaagtatttttaattaagatatgtacatggtttagacaatgctattgcccacttaatacagtatagtgtaaacttcatatgcactgaagaaacaaaaaacaatggtgacttgttttattgtgatatttactttatttatgtggtctgatatgaaacctgaagtatgtccaagatacgcctgcatttaatttgttatgtgggcctttgtgttccatgacttctgggataacttacttggcagtaaacctggatgccaccattacatcaatgtaatttccttcatggcactttttctgacacctcttacttctcgattctctatccaattttaaaaaaagaaggtgtcacacctctcaccactttttattactatgatgtattctcccaaagttattaaaaactaccagagtaccaaatgagggaatgatttgaaatactggtgatagtgttgagaaattgaatgagtgaaaagactgactaagcaaggtgattttcgtttcttttttaaagcaaaactgaaagagatgcattggagttttcagctgacaaattgtttttatattactcagagaatgtttttaaataattgtgtcacaacttttctcagaatgtgtctatagaagcaaataaaatggcacaaatgaatagttgcagaaccctgttttattcaaagctcaaaaaatgacattcatttaataagggattttttcacaaataaatgaattacttaaaaaatgctctattcatctcaataacatgcattttctttccatgtttaattgtaatgtatcaaatttgtagtttaattttgttgttttgatcaatgctatactaagaattacaatgacaacttagtacatgtgtgatttttaaaagttaaagtttagagttataggatactaagacatttccaatgagtatgacttttaaacataaaatatatgtaattaggatacaattctgttatgaattaagtggtaacaaacattcaaagagaaaaaagtttaaagatatccatgctttttcttataagcaagaccttgtttatatattcaaatcaacatggtgactagaatttagtgaatatattggaaagagcagagaaactattttgttactaatgaagtaacaatgaatgaagggctgtggatgaaggttggaagtaggtgtgattcctctcaccaagacagctaacaacctaataacataatttttggtttatgttctggcagttttaagctctgctgattcaaatgtttcagtttgcatgaagtgaatatttctaccagtaggcacaacaatggttttattcatttggatagtaagacttccacctggacatttttggtccttatgacactcaattgacagatgaaggaggagttaaactcctgggtgaggtgattaattccagttactcatatttcttagtacttctatatgcaacagtaaaatttaataaaaagggtaggacggctcattatgaatctatgttctctttacttttaaccaaccattctggtgatcagctatggtctcatggctgttatagaaacaagaaacaaagtaggtctgcacatgagttttcatacttatagaaatattttctttctccatctcccctattattttgtttaggatatacttgtagtggttaattttataatttaaaatttagatgaaataatatacctgtgggataaatactgaattagaagaattaacatcttacagtgttggattctgaggttttgagtcttcatttttggtgggagagtgtgagacaatctttgttttcataaagaactgttatagaagcacaatgttcttgttattttttgttacatagaattttaagtgagagaagatggtaagaatggattctaagcagccaggttcgtggactgtgttaggcatttctatttgctttatttccatcctttcatgcctctttttgtattgcagggtgttggacacttgcaaactaatttcctgacattcttgccagttagcttttattcaggatgtgtctattggaggcacagagggagaatgaaaggcagaagaaagaaagacatttttctttcttttcttgggtttcttataatgcctttgagaatgtcagaagcaggatggacaacctagtattccaggttctgcttgacattaaagttccaggggacattatggcagctgatgctccaccagtcttggtagtgtagtgcttgtaaccattggctctggcagcaacagcaataatgggtgactccaggctctctgtatctttcagggtcagcataaaataagtgatttaatgtatttaaattccacttgacataattacgtgactgatgtaaactgttcgttttaaaatttcagtattttaaatatgtctttctcactttatacaagtatgaaaaattttatgtgtcaatgtaaaaatatgcaaacacttttaaaggctaaacaggaaaaactaagacaactcttctgcaagctcaaggctgcctcatagtcacatctctaatttggttcacaggacagacaaaaagaggaagttcagggcgacaaaattccttttaagtaagtgagtcagaaattacacagattgtttccactaatttttcttttgaggtaatctagtgacctggccataaataatcaagactgagagtaggacacttaatattttactcaggtaaaattactgactttatgaaacagagagaaggtttttattgaaaaatagctgtcactccccacaatatgttcaaaagccaatatcagagtctttaatttacatctgaaatacctaatgaagtttctattttctggctttcaaagttctcttagcctgtagagcttgcctatgacctagaatttcctgttctagaaatatacattcacttaacaaatatttatacaacttttactatgttcccagcacacttttgggtggtaaaggtgtagttatgaataaggaaaacatgattcttaccctcatggagcttacaatctcctgaaataatatataactatatattataataatatataatataatatataatataatgtaataaagatgaagaaagatagtaccaaataatgaaaagtgttagaataaaagcagacagcaccctgcctaaaattttcaggcctaagacaaattgcaaacagaggctctgcatgattattacatatttaattatgtattcttcaaaagtgtcctttgaatagtcataaaattagagtgtataatgctacatattgtctcttcaaaaagtagaaataaagatagataaaattatttgattacagaatacacaaagagtcttacatcccaaatttagaaaaacaattaaaaagtaaattcttgggtaaaataggcaataaaaaaatttaaaaattcatacaaattaattataataacagtattagggcctgtagaggacagctaatggagtaatcagagaaaaatcaataaccttaaatgtgtatatcagtaaaaaaacagataattgaaatagacatctggctaagataagaaaaaataaaaaaagcagaaggaaagtattaataaatacaaaagcagaaatgaatagaataaataacagaacatataaataattctaaattgtgattatttgactaaaaacgaaaacaagcaaatcttttttaggtttttatttgttattaattagcacataataattgtacatatatatggagtacagtgtgatggtttgatacatatatacagtgtgtagtaatcaaatcagagtatttagcacatttaccacctcaaatgcatatcatttatttgttactaaaacatttaacgttctttcttctagctattttgaaatatacaatacactattgttaaccatagccaacctactaagcaatagaaaatctaaacttatacaaatgcaaaatgcactggaaactctcagcaatagaatcaaacaagcagaaaaaagaacttcagagcttgaagataaggtttttgaaataacccaatctgacaaagacaaagaaaaaagaatttaaaaaaaatgacaaagcctccaagatgtttgggattatgttaaatgacaaaccctaagaaaaattggcattctgaggaagaagagaaatgtaaaagtttgaaaaacttatttggagaaataatcgaggaagacttctctggccttgctagagatctagacatctaaatacaaggagctcaaaaaacaactgggaaatatatcgcaaaaagatcatcgctttgacacatagtcatcaggttatttaaagtcagtcaagattaaggaaagattattaagagctatgaggcaaaagcacaaagtaatctataaaggaaaacctatcagagtaacagaggatttctcaacagaaaccctgcaagctagaaggaatgggtgtcctatcgtcagcctttttaaacaaaacaactataagccaagaattttgtattccgtgaaactaagctttataaatgaatgaaagatgaccaggcatggtggctcacgcctgtaattccagcactttgggaggctgaggtgggcggatcataagttcagtagttcaagaccagcctgaccagcatggtgaaaccccatctctactataaaaaaaaaaaaaaaaaaaaaaaaaagaaaaattagccaggcgtggtggtgggtgccggtaatctcagctactcgggaggctgaggtaggagaattgcttgaaccctggaggcagaggttgcagtgagttgagactgcaccactgcactccagcctgggcgatagtgcgagactcagtctcaaagaaaaaaaaaaaaaaaaaaaaaaagaaagatacagtctttttcatacaagcaaatgctgatggaatttgctgctaccaagccagcactgcaagaactgctaaaaggggctctaaatcttgaaagaaatcctggaaacccatcaaaatagaaccttcttaaagcataaatctcataggacctataaaacaacaacacaataataattttttaaaaaggtatttagccaacaaatagcatgatgaggagaagagcacctcacatctcactacaaatgatgaatgtaaatggcttaaatgctccacttgaaagacacagaatcacagaatggataagaattaaccaaccrtctgctgccttcaagggactcacctaacatataaggacttacataaacataagctaaagaggtggaaaaatacattgcttgcaaatggacaccaaaagtgagtaggaatagctattcttatgtcagaccaaaaaaaaaaaaaaaaactttaaagcaacagcagttaaaaaagacaaagagggacattatataaagataaacagccttgttcaacatgaaagtatcaaaatcttaaatatatgcaccagtggtggagctccctaatttataaagcaattactacaagacctaagaaatgagatagacagaaacacaataatagtgggggaattcaatactccactggcaacactagaaaggttataataacagaaagtcaacacataaacaatggatttaaactataccctggaacaaatggacttaacagatatttacagaaaattctatgaaacaaccacagaatacacattctgttcatcaatgtatggaacattctccaaggtagaccatatgataggccacaaaacaagtctcaatcaatttatgaaaattgaaattatatcacgtactctccctgaccacagtggaaagaattggaaattaactctaaaaggaaccttcaaaaccatgcaaatacatggaaattaaataacctgctcctgaatgatgattgtgtcaacaatgaaatcaagatgaaaatttaaaaattctttgaactgaacaataatagtgacagaacctatcaaaacctctggaatacagcaaaggtggtgctaagaggaaagttgatagccctaaaagcctacatcaaaaagtgtgaaagagcacaaacagaccatcaggttttttgcccactttttaatgaagttatttgcttcttgctattgagttctttgagttccatatataatttgggtattaacagattatcagatatatgatttgcaaacatttctctcattctgtgggttgtcttttcactttgtgagttttcttttttgccgtgcagaggcatttcagtttgatgccattccactggtctaacttttgttttcgttgtccatgtgttcaggattatatccaaacagtcattactacagcaatgtcatggagctatttcctcatgattttttagaattaggtttacagtttcaggtgttctatttaagtgttcattttttatggctgcatagtattgcattgtgtatatgtactacattttatttatccagtctatcattgatgagcatttaggttgattccatgtctttgttattgtaaatagtgctgcagtaaacatacatgtgtgtgtctttataatagagtaatttctattcctttgggtgtatacacacacagtaacaggattgctgaatcaaatggtatttctgtatttatgtctttgaacatgtcccttgcagggatatggatagagctggaggccattatccttagcaaactaaagcaggaacagtaaaccaaatacagcatgttatcacttataagtgggagctaaacgatgagagcacatcaatacatagaggagaacaatgcacactggggtctatcggaggggggaaggtgagagaaaaataactaatggatagcagacttaatacctgggtgataaaataatctgtacaactatcccttatgacatatgtgtacctatgtaacaaaattgcacatcctgcacgtacactcctgaatgtaaaataaaagttaaaaaaatacatcttcaattcattttgattcaattttttatatggtgtaagaaaagggtcaaatttcattctgctgcatgtggatatccagttttctcaataccatttattgacgagattctcctttccccattgtatgttcttggtacctttttcaaaatcggttgactatatatggtttagtttatttctaggtttcctattttgttccatttgtctgtgttttgtgtttgtgccagtaccctgctgctttgattactgtagctttgtaatatatttttaaatcaaggagtgtgatgccttcagcgttgttctctttgctcaagactgttttggctatgtagtctcttgtggttccatagcaattggagtatttttgatggcagcagtggcccatctggagtggccattgccaagatgccactgcagtaggcagttgtggccaggactgtacactccatggagcaggcaggaaccccatgcccccaggctcaggcctcctattccacagagaaggctggagccctaccacagctccagacctgagtgtctctgtgctattgggtgcctgggaggttcccctgcccccagcatgctcagaagtgccttctcccacaatctggcttctccccactgtcggtgtctgctccgatatcagaggtgtggctggaaatgcatgctccacagagccagtgggagctgtggacaagcgggagccccacccttttggaactggctaggcaagaggtccttggatgcagctgcagctgcccaagccaggctgcagacccagacacctctgtgctcttggggaaatgcaaaggtctctgtgcccccaccccccagactcagagttgccttcttctgctgcctggcctctcccctctcccagagcctgctctaatcttggagcaaggttgggctgagctgagtactgctgcagcctacctgggtgggtgcatgctcagggcagcgctgacacactagccccctgccaccttcgccccctctggattttgggcactgacaagcataggaggaaagccaaaggtgggggggggagttgagggcagcacagtgctggcctgcaggtgccacttggcacaagcagcctgggcaccagaatggcagtgagagacagactcctgggcagtttttgagggtgcgcccccagtgaagccccaccttcaggccagggaaggcctgtgcctgggaactggtctgccaatcctgtggaccggaggtggactggtgatgcttttttctgggcccacccgtggttgtccgtggaacaattagcatgtactttctctctctgaagaccataaaaagccctgacccagccagagcagagtagacatcaacacaaccagctgcagagagaagctgccctctccagggcctcctctctgctgagagctgcagacatcaggacaaccacctgcagagaggaggtaccctctccagggcctcctctcccctgagagctgcagatattgggatgacctgcctgtaaggggagccascctctccagggcctcctctctgctgagagcagcagacatcaggacaaccagctttagagtggagctacccactgcaggtcccctctgggctgttgtaacactcaataaagctccttttcgtcttgctcactatccacttctgtgcatatctcattcttcctggatgcaggacaagaacttgggcaaagatgcccctggccacagagatgtccagccagaaaagtgataccaaaagatcccgtaacatttatttttcatttatgttaaaaatggcattgaccctttcataaggattgcaatgagactttcgattgcttcaagtaatatggacattttcatagtaataatgaacatgggaattatttccatttgtgtcttttaaatatattttatcagtgttttacagttttcagtacccagatcctttacctccttagtggaatttacacctaagtatttaattttttggttgctactataaatcatattgcttacttaattttcttttcagagtgtttgttactaatacatagaagtgccactaatttttaaggctgattttgtatcctgcacctatactcaatttacttatcatttctaacagttttttggtagagtctttagggttttcttaagtaagattatgtcatcaacaaatagagaaattttcacttccaccatgtgacgatatggcaagaagaccttcatcagatgctgatgacttgatcttgaaattcctagcctccagaactgtgagaaaaatatgtttttatttataaattacccagtctcaggtattgtatcggcacaaaacagactaagatagcttgtgacagatatacattgattactctaattactattaatgtcattattactgagtatctataatgtgaagtactataacagatgggcatataaaaggagtgagaatcttagcatatgaagaatttagagaattcattcaagaattgtttttagttacatgtgtctgcacttggtactattctaggcactggggatctgacagatggaaaaaagataaagttcctgccataaggaaacttgcattgatcagctgaagaacaaaagcctaagaacaattgacaactatattatagtgtgatgaatacaatgagaagccagagcacacggaggaggaatttaaagggaaggggcatgtaacctggttttctgagagcaaaattataaaaagagtcttagagggggtaatgtctatgctaagcctggaaagacttatttgttgatttaaaaactttctgcataatacctgttatgtgcctgaaattgttctaagtgctttacaaatgagttattaatttgatttaattatcctgataactcagtgaggtggggaaagtgaagcatatagggggctatatttcttgccccaaatcacaaaactaaacagtggttccaaagtgcattgcattaactgcaatgtactatgcttctccctcttataatgtttttgtaagctgtgttgggtgagctggaggtcaaaggaatggggcataggagaagcagtcaatagtcctaaagactctaccaaaaaacttgtagaaatgataaataaattgagtataggtgcaggatacaaaatcagcattaaaaattagtggaacttctatgtattagtaacaatctgaaaagaaaattaagcaaacaatgtgatttatagtagcaaccaaaaaattaaatacttaggtgtaaattccactaaggagggaaaggatctggatactgaaaactaaaactctataaaaccttcaactttactggagcaataaaaagaacctggtggaaagttcaagagagaaaaatagagggtgattttgaatattctagaaagccaggtgagagattttgttattttttgtattgtgttcacagctggcactcatctagtgttatatgactacacaaaataatgcattattgttaaggtagaagtattaatatattttacagattctaagatatagatcaaaaaacatggttaagtatataaaggatatgcattgcctgtttgatccaggaatagcaatatttagattccctctcatgtgtttcacaattaatttagttacaacttaaatcatgccatatctatgcttaagttagtatctcttttgtacgcagctatacatgatgctcttgttaggaatgcctagcatactaaggtaaagtgagattgccaaaggtaatccaaacgataaaaatagagctatacatccaggaaaaagatctaattctagtttttattttatccctttagtagtttttatgttttctcactatataccaacagacctaaactaggttctcagttaagtatttgtattagtgcgttttcacgctgctatgaaaatactacctgagcctgggtaatttacaaacaaaggaggtttcattgacgcacagttctgcatggctggcaaggcctggaaaacttacaatcatgacggagaagcaggcacctttttcacaaggtggcaggagagcaagtgagagggtttaagtgccagacacaactctaactggtgccctatcacgctgtcgccaaactggtgtcctggatgcaagacaaagtcctccccacttrtttctctcctcaaacagaaggaagggatctgccttggatctgtgagttgtgtggttacggaagacgtgatgtaatcactctgttggctgccccagctggtgtctgaataagtttccccccccactccacccaatccactgtctctaggcctagttcagcactgggactcaactaagtgttgcagtttttatggcctacactcacttctaagttcatttatagacacagatcactgcagtcctcagtggtgaggtttgcagacactcaagtttggactgtgggcatagaagattctcctctggctaaggctggtttaaatgctacctctgtgggctgatgtcagctgagtttggtcctgtttttctttctgctttaacaggacagcattgagttcaatgcctaaccgctgctgtattctccctccctcaatgcccagagacactctctgcaccaggtcactgcagctggggtgtgggggaggggcattgttggcaaatcagtattgtttattctctcttcagtacctctgtcagcaatacgagaataaaaccaggtactatgagggctcacctaatttttggttcttctgtttttttttttttttttctgtgtagatagttgttaaattggtatccttctgttggggattattgctggagccttctgttctgccatcttgcttagcctgtccatattttctgtatccatttatctttattgaacatctaggttgattacatttcctgactattggaaataatgccataataaagatggtagaacagatatctctttgacatactaattttatttcctttgatatacaccaaatagtataatttctggatcatatgttagttccattttttatttgttgaggaacctccatacagtttccaattatggctgtacttatgtacgcccccaccaacagtgtatgtgttctccttcacatccttgctagcatttttgatgttttatcttcttcataatagctattctaatggggataagctgatattctattgttgttttgattgtaatttctctgatgattggtgatattgaacattttttcacatacctcttagccacttgtatgttttcttttgagaaatgtccattcaggtattttgcacattttaaaatcagattacttttattttcgctattgatttgtttgagttcctaaaatattgtagtaattaacttcatgtcaggtgcgtagtttttgatgtggtttggattcttgtccccatcccaatctcatatcaaattgtaatccccaatattgaaggaggggcctggttgaaggtgattggatcgtgggatcagatttctcccttgctgttctcatgatagtgagtgagttctcacgagatctggttgtttaaaagtgtgtagcatctcctgtttcgctgtcttcctcctgttctgaccatgtaagacatgcttgcttcccctttgccttctgccatgattcaaagtttcctgaggcctccccattcatgcttcctaaacagcctgtggaaccatgagccaattaaacctcttttctttataaattaccaaatctcagatatttctttatagcagtgtgagaatgggctgttaactattacagttttcaaatatttattgcattatacagtttgtctctttaccctgttgattgttttattattggtttctttgctgtggagaagcattttagtttgacataatcctatttgtctatttttgctttcgttttctgtgcttttgaagtcttatccaaaaaaccttgtgtttattccaatgtcctaaactattttgtctatgtggtcttctagtagttttatcatattgggtcttacatatatgaatttgatccattttgagatcattttttatagggtgagagatacaagtctagtttcatttttctgcatgctgatatccgttttacccaacaccagttattgaagaaactatcctttcaccaatgtgtgttcttggatcctttgtttaaaatcagttgactctaagtctatggattgatttctctactatttaatttgtttcattaggcaaggtgcttatttatatgccactaccatgctgtgttgtttacaatagctttgtaatatattttgaagtcaggtagtgtgatgcctccagctttgctcttttttgttcagtatttctttggcatttcagggtctttacggtttaatataaaatttaagttttttttttgtttctgtgaagaatgtcataagtattttgacagattccattgaatctatggattgctttggtagtatgaatgttttaacaatgttaattattcacatccatgaacacaggatgtgtttccatttatttgtgtccttataatttatttcatgaatattttatagcattaattgcataaatctcccccttttgattaaattttttcctaattttattttatttagttattgtatattggatttcttttcttcagatagtttgctattggaatatagaaatattatgatttttaatgttgattttatatctcaaaacttcactgcatttttttaaattctaacagtgtttctatgaagtttttattttttaaaaatgtcatgtttctgtaaatagaaaaaatttgactttctttttttccaatttggatgccttttatttacttctctttcttagtcgatctgcctaagacttacagtactaatttgaataaaagtggtgaaagtgggcattcttgtgttatttcagatattagaggaataactgttaacatttttccatttagtatgttatctgtggatttgtcatacatagcttttattgtgttgaaatacattcttgcwatactacatttgttgagaatttttattataaaagaatgtctattttttcaaacacttctgcatttattgaagtggtcatatactttttgtctttcattcttttaatgtggtgtattatctttattcatttctgtgcattgtaccatccttgcaaccctgggatgaatatcacttcatcatcgttaataacctttataatgtaatgttgaatttggtttgctagtgctttttgaggatttttgcatctatgttcatcagggatattaccctacactcccrttttcttttagtgctttgtccttgtctggttttggtatcagggtaatgctggccccatagaatgagtttggaagaattccatcctgtccagctggccccatagaatgagattggaagaattccattctgtccaatttttttgaaatagtttgaaaagaatgaataataatttttatttaaatgtataggaaaaatcagcagtgatgccattaggtcctgggctttgcttttatgggagatattttatcactgattcactcttgttaaggtttttctatttcttcatgattcaaatttggtaggttgtttccaagaacttatctatttcttctaggctttccattttgttggtatatatttgttcaaaatcgtctctaataattcttagtatttctgctgtaacagttgtagtatcagcttttccatctctggttttatttggctccttcctctttttattttagctagtctagctaaaagtttgtcaattatgtttaccttttaaaaaatccagctctttgttttgttgacttttttactctttattttgtttatttctgactcaatctttataatttctttcattctactaatttgggtttctctttgctcttgtatttttagttaactgaagtgtaatattaggttttttatttgaaaccttttttaatgtaaatgtttattggtataaagtagtctctttaaacttcttttgctatattctaaaggttttggtatgttttgtttctatttccatttgtctcaaaaattttaatttctcttttaattatttctgttgaccacttgcttgttcaagagcatgtttaattttcatgtatctgcaaaatgttcaagatttcttctatttttgatttctagtttgatagaactgtggttagaagttatttgatatgatttaaatcttcttagatttgttcatatttgttttacagccttacataatctacctgaaagaatgtttaatgtggagttgagaaaaaagtgtattcggtagctgttgcatagaatgttctgtacatgtctgttaggtccatttggtctcaagtacagtttaaatacattattttttttcttaaattttattaaattaggtaagaaattacatgggtaatgtaaaattgttcttcataccctgtttaatgcatcttttattattattatactgaaatgaggtactgtaatctttcacctaagttcctgagttcttgtggtgattttttgtgtgtggatagttgttcaaattgatgtcgttgttggaggataatccctggagagttctactgtaccatcctgtgccgccctctcattaaataagcaactctttaaataacttaattagcaaaaaccacaaatatgtgagaaaaagaaatgaaaattgggaaataaataaactgataaaattgcaactataagaaactaatattttcacctctatggtaataaatgtgaaaaattggatgaaatagataattttctagaaaaatgtactttaccaaaaacgaccgtaaaatacatagaatatctcaacagactagtttccacagaataatttgagaaaattatccaaaagatcaccccacctcacataaacagaaacaaaaaaagactcaggtaatggtttctctggaagattctatctaaccttaaaaaaaaaatttacttcagagacgggggaggaatagcattaggagaaatacctaatgtaaatgacgagttgatgggtgcagcaaaccaacatggcacatgtatacctatgtaacaaacctgcacattgtgcacgtgtaccctagaacttaaagtataataaaaattaaaaaawaataataatagagtgtagacatgcaaggacattccctataataataagaaaatctctggaaaaaaataaataaataacttcagggcatggaaataaatagagcctaaagctatttatttttcatgaagctacttcagactcatagaaaatttcaaacaacagcacaaaaaataaaactttaaaccaatctcatttagaaaaatagatgcaaaactcaacctaaaatattagtaattcaacagcacattaaaagagcaaatccatattgagtaagatttgtttcaggaatacaaagaaagtacagtaataggatacctgataatttaactcattatcatagcagacctaagaaccatttttgattgactctatagatgctgaaaagcatattgcaaaattcaacaatttctcgatttataaaaatagttcataaaataagaatgcatggatattttcttaagctartaaaattctcaccccaaaagcagcattatgcttaataagtaaataatagatccattcatgttaaagtaaaaaagtagatgagaatgttcacaattattcttattatttgatgttaacttggaaatactagctaaagcaattagacctctgaaagaaattagatataaattgcatagagggatgtgaaactatccctatttgcaagtgataagattgtatttatagaaaatcccggtagatcaaatgaaaaaagtaatgaaaagcagtgaatcagtgaggtgcaaaataatacacagaaattaataactttcatatgaatgcataaccaccaatatggttattattgaaatggaatagagagtgtgatggaagaagtcacagcttaacaatagcaattaaacagactaaatatgtaagatgtgttaatactagtaggcaagttttatataaagagaaaactgtaaaagcactcatgaaggacaaaaaagaagataagcagtatatactatcctaaatataaatgaccaaaaacatgttattaatcctccataaactagcctataaatttaacacaaacccaataaaaacactaacagtgttttgtgggaagttagagaatctgatcgtcatgcctgtagagaaaaataaagaagtatatataaaacattctgaaagagtactaaaaagggaataattatatgaggatttgaaatatataaaactgtaataaatgagacccattatagaaaggagtctgaagtttcctcagaaaactaaaaatagaattaccatataatccagaaatcccacttctggatatacattttgaacatctctaatccagaaattcaatatccattcagtatgatactggctgtggttttaaatgtccatcaaggatagactggattaagaaaatgtggcacaaatacgccatggaatactatacagccataaaaaaggatgagttcatgtcctttgtagcgacatggatgaagctggaaaccatcattctgagcaaactatcgtaaggacagaaaaccaaacaccgcatgttctcactcataggtgggaattgaacaatgagaacacttggacacagggaagggaacatcacacactggggcccgtcatggtgtggggggataggggagggatagcattaggagaaatacctaatgtaaattatgagttaatggttgcagcaaaccaacacggcacatgtatatatatgtaacaaacctgcacattgtgcacgtgtaccctagaacttaaagtacaataataaaaaaaagaaattcagtttctaaaatgctcccaaattggagttctgagatgaagtcacaagtgaaaaatttcacatctgacctcaagtgacaggttacagtcaaaacaggtacacaagacacagtttatttagtaccccccagggaaaaaagatttttccagcttctctcagctgtagtatgtcttttctgtgcatgcccagattcctacaaacatgcccacaaaatgcaataaaattatatgtgtgtaggctagatgcatcaacaagaggtttcccatgatgccccacatggggccaatacctacaggctttacatattagtattatttttggttcattctctgttgtgtggttgtaaagatacagtgtaaaatatcaagaaggcctgcagatacttttatgagtaacggtgataagaggaaagcatttatgtttaataaatacaatgtatttataaataatgaaataaatttatatataaattactaataaatataatttatttaataattaaatagaagaggcaccatttatgtttatctttgacatagaaagtcaagttgttggagaaacaagatagcagtgtaagtgtgaaatgtcttacagaagagtatgatattggaatgaacagcatatatgacctgaagaaaaagaatgctaaacttttgatgttttaggctgcacatgatgagcagaagttaatgaatttaaaaaaatgcataaacttaaaaatcaaatgaagatctttattgtattttgaaagagtggatccatgagcactgcactgaacacatgccacttaaaggtatactgaccataaaacgaagaaagatctatcacaakgaatggaaaattgaaaagaactagaatattcagcaagctagtttcagagatttagaaaaagccacaacattaaattgttgaaatttgtggtgagaaagcatctgctgtcataaagcagcagggaaattcagtgacaagtttaccaaagtccttgctgatgaaaatctcatgtcagaacaagtctacaatgatgataaaatatcatgttttggaattattgccccagaaagtcacagagtacaggcgaagagacaggaattaaggatgcaaagcacagaataactctgttaggatttgctaatgcagcaggcatgcataagtctaaacttgctgtgataggcaaaagcttgcattctcactggttttaaggagtgaatttagtactagtccattattatgttaacaaaagggcacgtgtcaccagggacatgttttctgattttttctcaagcaattttataccagcagctgatgctcactacagggaagctgattggaaaatgactgcaagattgtgttgtttctttataactgttttactcatcctccagctaaaattgtcatcaaaaatactgtttgtgcaatgtacttttccccaaatgtgacttcttacttcagccctgttaccagggtatccttgcatcaatgaagagtaaatataagacactttttgaacagtatgctagcagcagtgaacagaggcatgggtgtggaaggttttcagaaggagtttggcgtgaaggttgtcctatatgtttttgctaacacttggaacacagtgactaaagatacagttgtgcatacctggcacagcctctggcctgcaactgttttcagtgatgatggtaaacaaggaagtgactgaataattatgtatgtaaagtgagaacaaaataatgtctgacctccttacatatgcaaaaaatataccctcagagtccatcagtaatatggaagaagtgactatcaaagaaatttttaatatcactaaagaggttccagtagttcattagttgactaatggtgaaatagccaaaatggctctttatcaaagtgattttgataataatcaaaatgaagatgatattgttaacactgcaaaaagaagagcctatcagtaacatggtgaaaatgtgtactagtcttattgaggactagaatgtgtgcattcataatagaacaagaaattatgtctgtttataaaatcaaagagagacttctaagacaaaaactgttgttaatgagacaaatgaatctggaggaaacattttaaaagccatccagcagaatgcctcctcatccctcaaggacccatttcctggtccttcaactgcttctggtgtttcttctcatctaaaaaaaaaatacaatgtactgtaaccttttaatcaaaacacagcatcgtgggtagaaactaaaatgctgctgtagtttgttgtttaacagttaatacaagwattatgatgatgctactgtgttattttgttacactgagcatattatttttcactgtattaacggcatgtcataatttttactgttaagtattgatgtgtgaataaatgtgagaaaatgattgcttatcagtagcatataaatttagagtgaggaatgacggtgatgacaaacaaccacagattttccacgtgggtggctgagatagtgacatcatttctttctgatgattcaatgtatacaaatgtttgtttcatgcataaaatcattaaaatattatataaaattacattcagcctatgtatataaagagtatatgaagcaaacatatttgtatttcaatttgggtcccattccctatatatctcattatatatatgcaaatatgctaataattgaaaaaaattaaaactccaaacacttctggtcccaagcagtttagataaagcatactcaacctgtgtatatccagaggaatttaaatcaatatgtacaaaagacatccgcactctgatgttcattgcagaattatttaaaatagccaagatatggaaacaacctaaatgtgggtcaatggattaatggataaagaaaacgtggtatatatatatacataatataacactgttcagtcttaaaaaataaaattctgttacttgcaataacatgcataaatgtggagggcattatgctaagagaaataaggcaggcacacgcaaaacaacaaatactgcatgctcacatttacatgtggaatcttaaaaaaagtcaaacttacagaaacagagtaaaatggtggttaccggggctaggggaatggggtagatggagaaagggaagatgttaatcaaagggtacaaaatttcagttagttagaaggatttagtgatctactgcacaacaataattactgcatgttttaaaattgccgaaatagtagattttaaatgttttcaccacagaaaataagtatgtaaaatgatggatttgtaaatatagtttgatttaattattcaagaatgtaaacatatagcaaaatatcatattgtatgccataaatatacgatgtatataatgattagtcaattaaacattaaataaaagatacaattaaattttaaatggaatgtttgttacagatacatgaatagtcaaaagatgaagagaatttgacatccaggaatggacctcaatgcatataagagtttagtattatacagatgtcacttcaagtcagtgcaagaacataaacttgttttatatacagtgttagaaaaacttgagtaaccatttggtaaacaacagaagttggatttgtaccttaaatcatatatcagcatatgtttcaaatgaagcagtaatttaaatatgaagatagctttactagataagcagaagtaaataatagataacttgtataaatccattgaatgaaagatgcctttcttccacctgcctccacaaggacatgttccacatttatttacatttttggactaactttaatctcaaagtcatatcttcatacacctatttcctatgtgttgatgccacctagacttaaatgcaaggtttgttaaacaaagactgtaaacaagtgtttacctgtattttaatctattaattgatatcaggaaactttattttgtttctttttttattttattattattatactttaagttttagggtacatgtgcacaatgtgcaggttagttacatatgtatacatgtgccatgttggtgtgctgcacccattaactcatcatttagcattaggtatatctcctaatgctatccctctccgctccccccaccccacaacaggccctagagtgtgatgttccccttcctgtgtccatgtgttctcattgttcaattcccacctatgagtgagaacatgcggtgtttggttttttgtccttgcgatagtttactgagaatgatgatttccagtttcatccatgtccctacaaaggacatgaactcatcatttcttatggctgcatagaatttcagttagactgcaagaataagttttagagacctattgcactacatggtgactacagctaatgataatatatagtatatttcaaagttgctaaatgaatagatttttaaaacattcttatcaccaaaatataagttggtgggatgatggatatgttaattcgcttgatttcatcttatacatagagggaaacatcatattggtccccggaaatatacacaatgatcatttgtcagttaaaagagtaaaaaatataatagaaatgattaataaatttgattttatgaaatacaagtaaaacttgtaaggctaagatcaaaatacaaagcaacaacaacaaatgaaagcactgtgaataaagtacaaaaaaatgacacagaacaaaaatgttacttttatcatcaggaaaaaatgaatcttcttatatataaagagtacctgcaactggagaaggtaactatcctcacttgtaataaaagaaatattacttaaaactacttgaaatttctcttttgaaactatcagattggctataattgaaagtcttggtaataaacttactggcgaagccttatataaacaatcactttcatttgttactggtaggaatacaaattggaatgamatttgacactgtctatcaaaatttcaaatacatagatttttttgtccctagaattccacttcatgaattaaacccattaatggtcctgtgtatgcgtaaaatgaaatgttacataatgttatttattgcaaaagtatttgttgaaacaatgataaaaatatctcagtgtgaattgatcacaagatgaataagtcatgctacatttatatattggagtacaatcctgttttaagaaagaacaaagacattctttagagagacagtttaatgcaatgttttaggccgctgatatcagaacaagtcttcctggcttcctctcacaactctattgcttattaactgtgtaatcctgggtaagttcctaaggctcattttcatcatatataaaatgcagataatactagaacttactgtttaggattttcatcaaccttagatatatcagctcatttcatatatagtaaacgctatataagcattagctatttcttccattgttgatttgcaaaagtctccaaaaatggtttcaagtaaaaatgtaagtaaagaacaaagttacagtgtgttgcccattgtttaaaagaaagaatgtaaggagatacatttgtattttcttgcttatacataattaaactcaaatatacatatatatataaaacaaagaaattagaatataatttctaaaaaattgaataaatcactgatttctacataagaaacagtaattacatttggtaatgtgatgggaattgggcaaatgaggcacaagggtggaagaggtattattaatggatagtttaattttcgaccatgcgattgaagccctgttacacggtgaattgtgtcctcatayacagcccccgaccccacaaaaaaaagatatgttgacatgttaattcttcagaatgtgatgttatttggaactaaggttcctgcagacatagttcattaaaatgaggtcatactggagtagggtggtatcataatcccatatgactgctgttcttatacaaagaggagaagagacacagacacaaggggagaataccatgaccacagaggcagagattagagttttgctgtcagaagccagaaggcaaggaatgcccgggactaccagaaactagaggaagcaaaaaaaaaaaaaaaaaaaaaaaaaaaaaaaatcactcctacttacagccctcagtggaagtgtggccctgccaataacctgattttgaatttctagctcacagagctcagaactgtgagaaaataaatttcagttgtttttagccacccaatttgtggcaattatctacagtagttttagaaaatggatacaaatccctaactgacaattaaatatacatatatagtatatattatcttgaaagttgtaaaacgacagtttaaataagtaatgaacatagtacttctcacttcctgttggatctatcacttcagatgagaattttatatacaattgaactgaactctgttagaccaataaaagtatttgtttttgaaacttagagaattaacaaaatccagtaaatccactctcttacagattgtacctcacttacttattttctatatgtataattttatatcaatttattattaaaagcaaaagacttgctcgtggagactgttgttaaaacctgacttgatttaaggagggaagaagccacagaaacaaatgagtcaccaggaaatagctaatcatctttgtgtgactcactgtaagaatcctttaataccggctaaaaacatgcatttaatttcatatttataggactaatggtgaatagaataaaaacagtatagcctgttttaaactatcactttttgaaaattactttagatatttgtttaaactattaaaataaatcctaaaacaaatgttctctcatatttgaaacctgcattacataaaaccccataaataaatttttctgtgcttggtggtcagctttcttcatgaagcattgctgaatccccaaattctagatcatactgcagctgagatattggcatagaaacacagtcctcattttgatgtaatactggctattagttcaagctgtatgattgaaagaatgttgtggtataggagaaaaagcataaggcaagacaacaagaggcctgggtcctagaccaagctctacctcttattacctttgtaaatctcagcaacattgttctcatctacaaaggagaggtaacagtaacaagatacttagagttgtatgttttcttccagtatagaaggttatttgggagatcaatgtaatagtgaatatgaaagtgctttgcaatttgtataactgcataaatgcaaaattatctttccatttcataaagagacaatttttctcttataactttatttatttttcagtttagtaaaagaaagaggtaacatcaatggtagccaaccatgcagtatcatgtggtcaaagtaagcccccttaatatatttttagatgaatttataacgttgtatttatctattttcttttgaaactctgcaagcttctattttgcataactatatttcattaataaaatataactgttgataatagccagagaacttggaaaacctcagcagcatttaatatagcaatattaaagtggaaataaaataaatatatatcacatataagaaaactggcactcaaaattgttagtacagcatttaaacataagtctaaatttaatatcttctaatctcatttcctattttctccaaatattttgacttgcattactctattttactttctatgcactcaccatgcatagttatttctattagtttatgggtgaaaaaattgagattttgagaggatatctagggtatccctgctggcaaatgacagaactgaactaatactcattttttctagtcgctaaaccattgcacttagcatcaagattgatttattcaagaactgtgtggccaggcacagtggctcatgcctgtaatctcaccacttgggaaggccgaggcgggtgggtcacctgaggtcaggagttcaagaccagcctggtcaacatggtgaaaccccgtttctattaaaatacaaaaattagctgggtgtggtgctgtgcacctgtagtcccagctatttgggaggccgaggcaggagacttgcttgaacctggcaggcaaaggttgcagtgagccgagattgtgtcactgcactccagcctgggtgacagagggagactccatctccaaaacaaaaaaagaaatgtgtattgggatatactggggtatactgtatgcccgcttttctgcctttaggtaaaatttttctttcactcaattgaatttttgttattgttgttgattttaacgtggtgtttcattagtatagcaacataaatggcaatagttgaacatatctggttgtattcctactagcatgcttttgcctgctttctctcttgctatgtttttaaacatcacaaatttctaaaggcagctaaatgtactaaatgagcagatatttaagtcagaggcataactttaaggagttagctatctggaaggctctgagaatgaaaggcccaaacttgaggaaattgtttgggaagaacacttccttctgtgcgtatctgtatggttcccactgttccacacaggtaaactactgctacatcagaatatgaggctattcattcaatctggatttaaaatgcaaggattgtcttggctctttgggctctattttggttccatatgaatttaaaaacaggttcttctaattctgtgtagaatgttaatggtagtttaatgggaaccacattcaatctataaattactttgggcagttagggcattttcatgatatggattcttcttattcatgagcttggaatatttttctatttgtttgtgtcctctctgatttcttggacagtgatttctagttctccttgaagaggtccttctcttcccttgttagctatattcctggatattttattctgtttgtagcaattgtgaatgggagttcattcgtgatttcgctctctgtttgcctgtttttggtgtacaggaattctagcttttttggaacactgattttgtatcctgagactttcctgaagttgcttatcagcttaagaagctttggagctgagacaatggggttttctagatataggattatgtcatctgcaaacaaagataatttgacttcctctcttcctatttgaatacactttctttccttctcttgcctgattgcccgggccagaacttccaatactgtattaaataggagtgatgagagagggcattcttgtcttgtgccggttttcaaggggaatgcttccagcttttgcccattcacaataatattggctgtgggtctgtcatagatgggtcttattattttaaagtatgtttcttcaatacctagcttattgagaactttcagcagaaaaagatgttgaattttatcaaaggccttttctgcatcaattgagataataatgtgtttttttctttagttctgtttacgtgatgagttgcatttattgatttgtgtatgttgaaccagctttgtatcccaggggtgaagacgacttcatcatgatggataagctttttgacatgctgctggatttggtttgcaagtattttactaaagatttttgcatcagtgttcatcaagaatatgggtctgaagttttctttttttcttttttgtatctctgccaggttgtggtattaggataatgctgacctcataaaatgagttagagaagagtccctccttttcaattgtttgagatagtttcagtaaaaatgctaccagctcttctttgcacctctggtagaaactagcatcagagtgaacagagaacctacagaatgaaagaaaatttttgcaatctattcatctgacaaaggtctaatatccagagtcaacaaggaatgtaaacaaatttacaagaaaaaaccaaataaccacattgaaaagtgggcaaaggacataaacagacacttctcaaaagaagacattcatgtagccaacaaatgtatgaaaaaagctcaacatcactaatcgttagaaaaatgcaaatcaaaaccacaatgagatatcatctcatgcctttcagaatggcacttattctgtcaagaaacaacagatgctggagaggctgcagagaaatatgaatgcttttacactgttgatgggaatgtaaattagttcaaccattgtgaaaaatggtgtggcgattcctcaaagatctagaaccagaaataccatttgatctagcaatcacattactggtatatacccaaagaaatataaatgattctattataaatatacattcatgtgtatgtttattgcagcactgtttacaatagcaaagacatggaaacaacccaaattcctatcaatgacagaccgaataaagaaaatgtggtacatatacaccatggaatactatgcaaccataaaagggaatgagataatgtcctttgcagggacatggacgccatgatcttcagcaaattaatgcaggaacagcaaatcaaacactgtatgttctcacttataagtgggagttgaacacatagtcacaaggaggggaagaacacacactggagcctgttggggagggggtggtggaagggagagcatcaggaaaaatagttaatgaatgctgcacttaatatctaggtgatggttgataggtgcagcaaatcaccatggcacacatttacctatgtaacaaacctgcacatgtatcccagaactttatatatctatatctatatctatatctgtatccatatctatctatctatctatctatctatctatctatctatctatctatcatctatctctctatcwatatatatatgtcaaaaaacagcaggtgttggcaaggttgcagagggaaagaaatgcttttacactgttggtgggcatgtaaattagttcaaccattgaagacagtgtggagattcctcaaatgcctagaaccagaaataccatttgacccagcaatcccattactgggtgtatattcaaatgagtataaatcattctattacaaagatatatacaggtatgttcattgcagcactgcttacaatagcaaagacatggaatcaatccatatgcccaccaatgacagaccgaataaagaaaattttgcagccataaaaaggaacgagatcatgtcttttgcagggacattaatgatgctagaagcagttatcctcagcagactaacacaggatcagaaaaccaagcactacatgttcttacttataagtgggagctgaatgatgagaactcattgatacatggaggggaacaacacacactggggcctgtcagggtgggcgaggtgagagagagcatcaggaagaatagctaatggatgctgggcttaatacctaggtgatgggttgatctgtgcatcaaaccaccatgacatgtttacctatgtaataaacctacacattctgcacatgtgccccggaacttaaaataaaagttgaagaaaaaaataaaaataaaaatgcaaggatctatgcaagtcaaaggggatgaggttggggatggactgttttataaattctgaatgtcatgacatttttatttgcataaagagaaatagtgtgtactggccagaacacttaattgaaagcaactggtttcactctgtgagatggggcaggccacatcccctttccaatctgcacatatcacatccgcaagacaggaatattgggcatctctagacaatttctaggacagttttggggtacatgtgcccttgtacaatatgatcttcctgatttgacttccttcctccgttttttaaaattcctcagtgtggcaagttcttacatatcatttaagaaacagctcaaatgcaaccaccccataacattttccagacaccccaaggaacagtgcatttctatgagcttctatgttccagcgtacctgcctctagtattacataattatataatcacaattcttgtttgtgaaggctgcctctcccctcaaattgatagttttctcatggcaggagtctgtccatatttggctctttatgccaattgcattttaaattacctggtctggagtaggcactagataaatgtctgaaatatccgttgaaatggtagtattaggtccatcttccatggagcactgtccccagcagtatggtcaatatatgctaagagatctgccgtgtgctgaatagagaggcctacaagacaggaggtaatgtagtttctcttctaatatccattcagaaggaacgaacagggaaagatatgggaggtattactttaatgttaaaagtaagtgtccatggtaactgtaaggtagactgcttcttcttcaaaaaagttagtgcctgaatgcaattaagataatccttcaggcttttaaaaatgaagagttcatgtacataggtcccactggatgcaccagatattgtgtgtacaattgtctgtgctttatgtaacaagatgcaacctcaaagcatgttagctaaagttggttactaaattttctaaatgtattctttgagctttctccttattaaatttagaaatgttttaacaggtgaatcaaatccactatgattttaaattgaataatcttatataacttctactatttggccctatagaaatattaacagtgcacactatttcaaatatccctccagagtacctaaaagccatactatatgaaatgtcaactcagacgtaagtttctccttacatatcaagaaatgttttatttcaataaatgaagaatatagactttatataattcattgaaaagatgcttacttcctgactttaagaatttttaaaattttaggtttggaggtagatgtgaaagtttgttacacaaacacatgtcacgggggtttgttgtacatattattacatcatccaggttttcagctaagtacccgatagttatgttttctgcccttctctgtcctcccactttccccactcaagtcgaccccagtatctgttgttttcttttttgtgtgcataatttcttatcatgtagctcccacttaggagtgagaacatgtggtatttgattttgtgttcctgtgttagtttgctaaggatgatagcctccagctccatccatgttcctgcaaaatacatgatcttgttactttttatggctgcatagtattccatggtatatatgtgtcacattttctttatctggtttgttattgatggacatttaagttgatttcatgtctttgctattgtgaacagtgctacagtgaaccttcatatgcatatgtcttttcaatagaatgctttatattccgctgggtatatacccagtaatggggttttggggttgaatggtagttctgcttttaactctttgaggatcgccatactgctttccacaatggtagaactaatttaaactcccacctgaagtgtataaagtttcacttttcgccacaacctcaccagcatctgttattttttgactttttaataattagcctttctaactggtgtgagatggtatctgattatggttttgatttgcatttgtctaatgatcagcgatattgagcttttcttcatatgcttgttggccgcatatgttttcttttgagaaatgtctgttcatgtactttgcccactttttaatggggttgtttgtctcttgtaaatttgttttagttccttatagatgctggatatttgacctttgtcatatgcatagtttgaaaatattttctcccattctgtaggttgtctgtttactatgtggataatttttttgtttattttgctgtgaagaagctcttaagtttaattagatcccattggtcaatttttgcttttattgcctttgcttttggtgtccttgtcatgaaatctttgcccattcctatgtccagatagtattgcctaggttgtcttccagggtttttagtcttttgggttttacatttaagtctttaatctgtcttgagttaatttttgtatatgatataaggaaggggtcccgcttcaatcttcagcatatggctagtcaattatcccagtaccatttattaaacagggactcttttccccattgattgtttttgtcagctttgtcaaagatcagatggttatagatgtatgaccttttttctgggccctctattcagttcccttggtctatatgactgtttttgtaccagtaccatgctgttttggttactgtggcactgtaggatagcttaaagtcaggtaacatgattcctccagctttactctttttgcttaagattgccttggctattcaggctccttttcatctccatataaattttaaaatagttttttccagttctgtcaagagtgtcattggtagtttgataggtatagcattgaatctgtaaattgctttgggcagttcagccattttaataatattgattcttcctatccatgagcattgaatgtttttctatttgtttgtgtcttttgcagagtaggctcagagactccagtgcagccacatggtggaagaagatttatgcatagaaaaatcaaagtgacattaaaaaaacagaaatgaggtacagaaacagttggattagttacagcttggcatttgccctatttgaacacagttttacacaaaattacaactataaaggaaatctctgtttttaaagatgtctgccgatgtacactagcaacccttaccattcttttaaatttatatgtgtcatactttgtttaacatgtttttctggccatcttgtcttgagtacatttttacttgagcagctttttctcccttggtttgagcaagtagaatacttaagcctaaaatctaagtyctatgattataaaatataattttgttttgttccaactaagagttgtctctttagaaatgcaaatttgttgccttgttaacaattgcttagggtaatgaaacaggtaattagaagactgatagaccaaatgaaaaaaaaaagaaaaactatttaaaagccagcaaattgaaatcctttatgagaactataagatctgccactgtgtgtttgtatatctatatgtgtttgtgatatttggtaaataaagctagtttttaaattgttggtaaaacagaaatgacttacaaattatcaggtaaatatcgttagatgcttgcttgatttgaccgtgagcatatgtctttggtttagagtctctggattcacgggtctggataggtggccatgatgacgtctggagatttgttctaagtgccgagaccagaagctacaagccaaaattaagcccaacatggtcccttctacctctgcttttcctgttttgcctcctggctattttcggaggagttggatctttcaggtacagtcttcacagctctgtcttctgttcatagttctgctgggtgtcatgtgactacttgggacctagaatgactgggggaaggcattagtgaggcaacctgtgtcatagtttcaaaattcttttcagtaatttaaaattttcgagtcatgttatgttaaattaaataatagataatcataaaatgtctgagttatctgtaagttaagatactgaaatattaaatatgagtttaagtctatataccttgacatgttatttttatataatatagataagctaaatatatttagacctgttaataaacattttgaagaactatctttctaaaaattataaaatggtttttagctacaagttgtgataaaaaacagttcaaaattactttctataattagaaagtaattagtatttctaagaaacccttgaaattggggttactaagagttaaaaaatactacatatgagagaaacatctctgtatacagagtgtataaacaaaagcaagatatgcatttgatgaggaaaattatgaagacataaaagtgtgtgttaaaaatgttgtctggtttgctttgggaggccgaggtgggtggatcacctgaggtcaggagtttgagaccagcctggccaacatggtgaaaccccgtgtctactaaaaatacaaaaaattagctgggcgtggtggcgggtgcctgtaattccagttactccggaggctgaggcaggagaatcctttgaacccaggaggcagaggttgcagttagccaaggtcgcgccattgtgctccagcctgggcaatgagagcaaaactctgtctcaaaaaaagtaaaacaaaataaaaaataaattttatctggtttgaagtcacttaaaggtgtcaaatagaaggagtaaaaaaatagctacaccaagatgaatacagaaaattggggaaaaagtaaagcaaaatatttatggaaactttttgtgcttaaaagatgacagatttgataaatttatttctaaggttttattaaaattaactttagtattgataatacactgataaaaactaaaattttgtttactcttttgaacaaaaattgtgtgtagtttaataagmcagtaaaatatttttgttcaccttttaagtaaactgtaaaaaggaaaaaagagacaaaagaaaagacagattgtttcatgctgtcttaggtcttttgattgttttgaaaactgagtcttttttatcaaagagtagaaggttattgttttcaaaaatcttatatttatcaccttggttaaatgaatgactgttgttttatggtgacctgtgatcctattttggtcaagtgttttaaacctttgacatatctgacaggtttcccaaaatctaatttcagcttcaaaattaagtatttttgacttccaactttgggatgctatggagcacccctgaagcatccaaaagagacattaacaaaattattttacgtgttaagttacataagaagcattgtcaaataagaaatgatgattaaccttcttcaagataaatgttattaacatatgttacaaaattgtatgggatttctaaagttctaatttgtctgagtacatgttattgatcataattatgtttattatgttaagttattgtaggccatagaaataatcaaatttccttgtcaattttgtccttaactatgactgttgaaagttattttcacagttaattgcttaaatctgatgcagtttatgaaaacttcacaagcacaaaaaatcctagaatatagtatctttaaggaggttcatgaaagaatgtaaaggattctgagacgcattcttgaataaaggtttgtaataactttagaatcatataatttgaactggataagaattcttggaactttagtaaagtgactgactggtttataaaactgctaatgcaagcaagacaaaaattgaataccaagaaaatactttgccagattttcatgctaaatcatccagtactgaagttctttagatacacaatttgaattaattccgtggtataaatcaaatttcctatgataacctattagttatcagtgctattcacctaaattggagaaacaactggtattcaaaaagacataagtccagtgttaagcataaactcttggagaaccacgacagctgccttgtttttactcactccttaaagatttccttattaagagttctgcattctaatgctcgtcttggaaaccacaaaatgatccaaattaaatatatatatrkgtgtgtgtgtgtgtgtgtgtgtgtgtgtgtgtgtgtgtgtgtgttgtgacttctacattgctgaaatagtttatgaccaactttggtttttcaaacccatattcctaggaagacaatcaaaacttcaggtacatttcactacccgatgggccgtttaaatgtttatagaggggtttcatctaactgtcaatttttaatgcatgttttctggttgtataaaagctttcctatgcaagagagctgatgttagaatagtagatcattatgtcacagtttattttcaccagataaagaaaacttttcatggttcactgactaaggacaatcaaccccttcacaatctagaacccaatgattggatttctggaaacatcagagaaagactgtcctgccatctactctgtagcaaaactttgggacctcaaaccttgggtttataatctcacaactcagaagagtccttccacactcttggaactgtacacccattggaatccttaaggtgaagctaaccagtgaggtttctccccagaagaagatggcatccttgatggggacagctttttctcaagattagagattgagacttctctactatcatgagactcttatctttcatttttttcccttgcttatgcctctttgaacaatagaaaaagaaaaacaggttttctgtgtgcactcacagggtttacttttatttgtgaaggattttcgagccagccttatacatgaataactttatgccttgacagatgaaagttgaaggtccaatgtatgtgagcaagtttaatgttacatacattgcctcataatcagtcagaaacagaatgttgctccactcttcttaacctacattatgcatcaaagaaaacattgccagaaggtcttcactcttctagaagggcttcattttttagattattttatccattgtttggagtaaatgaggcaatgattagaaatttacccctcgtgataggttctagagaagatgctaccttaaagaaaacattctcttatgaatgtgatgctaaataatagaattgctctagattacttactggctaaacagggaagtatctgtgcagctcctggcacatcttattgcccatggagaaatgcatcacattgggtattatagagattcagttgtaagggattaacaaagagactccttagttaaagtgagtagactccttatctaacttattctttgatctatctgattttagttggtttagtttatggggaccctggctaaggagcatactccaaactcttggtattatcctcatgatagtcataatattcatctccctggtgcagtgtattctctcaaaagcttgaaatgtttgcatgaagtcatttttagaaccataaagttgaagagagtggaaagagattccactctcttcaagtggaatgacaagagctgaaagaaatgtgtgactatgagggcactgtaatgtatgaataatgtgttaagatcagaaacccaaaatgatagtaactgagagtgggcctaaggctctaagttttggtcatgctctcacctaagtgagaatgtgaccaaaagggggagtttttaaacatattatgagaggacattgttatggactgagctcatgcactaggccccacagatcagaccaaaccaaaatggagtcacttatactaaatgtgacataatcaaattcagactttaaggaaacacataaatcctaaaacagactaggttttgtttttcttctataaacaggacattccatcataaagaggtatcctctactctaatacttacaaaagaaataacctcatgtccttgtcctcaccttataaaacccactgtatgctatttcccagtgggtttcaagaccaaataagtacttttatgatggtgatagtaacatcaatggttaaagttttggtcaatctctcaaaattgagaggatgaacaaaaggagggaattttaaaatgaagtttagtctaaagctgcctgctaacatatattaaggtcggcctaataatttctctgtacgtcatcaactacaagctaaatgaagttgtaaacaaagggcggcctactctcatggcaattactgtattgtggccaatcaaaggtggccagctgttcaaacaatgttcaaataaggcaaacccctagccataaccaatcaactctttctgtaccttacttccatctttggtacctcactttgctttgtctatgcataaattttcttccactatatagctgtgttggaatcactgagcctgttgtggctccagaggctgaccaatttgcaaatcattccttgctcaattaaactctgttagacgtaattcagctaattttttttcttctaacagaaatgagctttatcattgtctgcctatagcagttactaaatttatttgtcttctatctccaaatcctcctctaatcgagattaaacaccggtgcatttgaccccattgtgaatggcaaaaagaaattagcataaggaatgcacacttaaaagaaaattttataactgattaattactaaagaagagtctcataactaaaagaagctaatcagaggcttagattggagtagtcaaagataccacttatacttgctgtatgttccactgtttgatcactttttttttcactcagttttctttgtacctcctttaatggcaccacattatagggaaaatcttccttgctcactttttgaacataaaatagaattgttctaaatttagatttccctcagatctctgatctgtctagatttgcagtctatataaaataagacccatccccagctttttacaccagaggtaaattataaagaaataaaaaatgacctagcatctctggtgcattgatatttttcatctttcatcattattctgcttcgaatagcttatgtttgaagaacattaaacatcttcaatatcctctgattttataatatttcttacattcctgagaggaggacttatcagaaacatgacaaaatcacatgcaattttttgttatttttctgtttagtaaccttcctttacatttgcaaaatagtttataattcagaaagcactatcctgtactacctttttttttttttttactttcacagcaattctgtaaattattaagggcaagtattgtcatctttcatcatttaaaagaaactaacctcagaaaactttgaatattctgctttaggtgaaaatgctaatacacagtagagcacagagtagaaacaaattctatatgaaagttcaaactgaacacatatactgatgcataaaatacacccagagtacaatcccagtcaatgaaactaataaatattattcaatttctaggtcagagcaacatcaaaatcccctaaaactcaatttattgttgatcctgagcagtcttttcctctttgtttttttcgcctcaagtaaaatgcgcccttttctggatttcagagaactctttaattgaagtaggataaagcgtattcttcattatacactcagaaagcccggcaacattcaaactcctatcagcagacaatctctaagactgcaggaaaccctgctacactgtagtttgctaaaataaagtgttttactatcgagtattattttattaatgccatggtcctcttttggtcaaggctatggrttaggatcttgggcagataacaaattcctacatactactgtgagattttatttgacttatccaaatctcatgaataatgatctaccaatatgctatgagctcacaaagaaagaagggcttgaaaatgtatgttcttagaagaagctggaactagaaatgtaaaaaatgctagacaacattatcatgaaagctatgagtaagatggagccaaagtgaatgactggatttaaagatttctatgttctgtgtattttcagtactaataagctttagacttttctaatgtaagtatgaattataaaaactaaggataaaacaaaaccttatcaccaccacaaccacaacagaaaagataagggtaacctctgcacattcagaaatagactgactaacctcaaaatcagtactgaggaaaatgcagaagtaaaaaaaagtctcataaactcagtagaaggctagagaggaaaaaaaaaccataataattaaaaataaaataaaatttagaaacaagttaggattcatcaataatcacattaaatgcaaaagtttaaaccatctactgcatgacagtgactatcagatgagaggaaagtttatttatattcttcttaaaagagatacatttaaagcaaattcatacagaatggttaaaaaggttggaagaaaatacattctaagcaaagtataaccaaagaaaggaagtgtggcattattaatttcaaaaagaacagaaaatcaaaatgcattcagaacagaaaatcaaaaggcattattagggatacagagggacactgccaaaaagatgacagtcataaactagtatgtacctaataatatagctttgaattatataagccaatattaggattattagtatttctggtttcagctccaaaatgtaaagcacttggacattctcactttcacttttacaacagtgaaaaagttaagcaaactgaaaaccaatgcctttcttagagccgtcataaaattgaggccacaggataaaccaccaaactgaaatctggagacatagataaatacagaggatcacagttgagatcaatttatttgaagcagaagcaactcgagcaataaactggtaggaataattaaatggtgatactgatgaattgctggaggcttagtgtagastagcaccagagggataatctcctgcaggcccagtcttatggaagtcatacagtttcatgggcattcacttgaagaaactcatcatgttgtcattgtgaagataaaaataaaattcctcatgctttggtcagagtaagggaaaaagtaaccacttggaaatacacctagtgttctctataagaaagagctactttacagaagaaaaaacttcactagatctttatccaacatggaaggagagcaaccagccaactccacccatctctagacattctgtctcatgcaagggaagaaataaaaggctatgaattacttcagaagtaattcataaaggccatcgccttggtgttcaggaccaataaaggagtgaaatttaatcataatagtgaagagagcttgtactctcccacaccttagtatagctgaaactgctgctaagctagactttattggtgaagcatttattaggagaaaccaaaaagtagcagagaaaacaaaacaatgtttttaggggtatttaaatgctctgacacctgtggttacagcaaacatcaaacattgctcaaatcctattcaagttaatataaaacctcacactagatccctgtacgcctcagttctctattagctgatatattatatctggctttcaacagtggcaacaacaatgacaagaaatggtaaaaggcaaggaaaaatacagttccaaaagacatagcaagcatcagaaccagacacacgcattggaattttagacaggggatgtcaaataactatgactcgtatactgatggctctaatgaacaaaagagataatatgcaaaaacaaatgagtaatatcagcagagaagtagaaaatcaaaaaatgaaaggaattaaaggcaattctaagaatcagaagcactgtaccagaaatgaaaaattattttgatgacctggacatggccaaggaaaggattagtgagtttgaagatgtgtcaattaatacttaccaaactgcaacaagagaaaaaaagratcaaatcagtaaactatctaagatgtgtagggtaatttgaaaacatgtaacatgtgtgtaaattggaataccataaggagaagaaaaaaaaaagaagaaatatttgaagtaataatggccaaggacttttcaaaattaatgacaaacaccacaccacagattcaggaagtttatagaatcccaaacagaataagtatcaaataaaatataaccaggcatatcatactcaagctgcagaaaaccaaatacaaggacaaaatcttgataaaagccagtggtgggtgtgggggtaaagaaattaccttatctatagaggaaaaggcctaagaatagcaggccgggcacggtggctcatgcctgtaatcccagcactttcggaggcccaggcgggcggatcacctgaggtcaggagtttgagaccagcctgactaacatggtgaaaccccgtctctactaaaaatacaaaaaaaaaaaaaaaaaaaattagccgggtgtagtggtgggcgtctataatcccagctacttgggaggctgaggcaggagaatcggttgaacctgggaggtggaggttgcagtgagccgagatcacgccattgcactccaacctgggcaacagagcaagactctgtctcgaaaaaaaaaaagaaaaggttttaaaaataaaaataaaataaaataaaaaagaataacagcagactccttgtcagaacccacataagcaagaagagagtggagtgaaatatttaaagcattagaagataaaaaaaactattaacctaacatggaattttatatatgcactgaaattatccttcaatagtgaataataaataaatgttttcttggagcacctaatgcacagaaaaaatctgagagattattcttcagaagacttgccatgaactaaatgttaaaaaaaaaaaaagtattcagcatgcagaaagatgatacaggtcttttaagaacataaagaaaaaatgtgtcagagaagaaataaatgaaattaaatattattatttattttaaatgtaatataactattcaaatattaatggtaacaacatactgtctgataataacctcttaatcagtaaaatgagttttataaggcatagtggagtggaattgagatttctctgttgtaagctacctgcactacaggtaaatccatgtaatgttattcaaaggtgaaaagacggaagtgtggaaatttctacattatgaggcacatgcactacatgtgaatctatttaatattatttaaaagtctgcttagattaattgtaaatgtatactgcaaactctaaggcaactactactaatatgttaaaaaagaagcataggtgatattgtaatgtcaactcaccattgatgtgaattgagtaatatgattggtctaaatatacatattaaaagaacaatgaataggaaaaagttaaagcatagtaaatattatttcaacttatatcagtaattattttaaatgtgaatggaatggtctaaatacacatgttaaagatggtgattgtgatggtggctttttaaacaattgctcaactacasgctttttataagaaatctgctttagatataaagacaaagatgaattaaaattaacgaggtaaaaaatatatataccatgttgacactaattgaaagaaaactggaataattgttaaatttagacaaaacagatttcaaagcaaataaaatggcagggataaagaccaacattgcataatgataaggcatccrttctcctaaaagatgtaacagttcttagcatgtatatgtctatcaaaagagtatcaaattacaaaaggcagagaggggtgggggaagatggtggagtaggaatctccagcgattatctccccttccgccatagaaacattaatttgaacaactatccatgcatgaagaagttttcacaagagctaagaaaaccagatgagacrttacggtacctggttttagcataataattagaatagacaaattgaagagggcagaaaggaccatttaagttttgcatcacctgttccccaacctcaggcagttcagtttgtagagaaataccatctacttgaggaaaaggagggaagcaagcataggactttgcattagaatccagtactgggcccactacagtaaagcccagcactgggctagacccctctgctcctggcaccaggccaatatacatgaacaaaacctctagacctgccccaacatgagacaaaatcctgtggtmccagggccagatgggaacctgtggccctggtaaggcaaacttgagatctgacccacatgaccaccagctgactgcaacagcctcagaccctgaataaacctcggtggtgggcagactatagcagctgtgggtcttgggcacactccagtgctgtgctggtcttggcagccacggtttctggtgtgactcagcactgtgtcagcctcagcagccaaatattatggacccagcaattytaggctttcgggcacctcagggaactgcaactgctgaaatcgtaatggatttaaggatatcaccagtcaacctacattgaatcactggacaaacctgctgyggaagaaagttaccaaacaaagccaggctgcaaacactggattaggtaagaatatcgacatgcagacattgacacatggccacaagcatcaagatcaataaaaaaaacatgatgacagcaaatggacaaaataaagctccagtgatgctcaatggattaaagacttaaacataagacatgaaactatgaaacaactagaagaaaacaggaaaaagcaattttttttttggatatgacctctagaacacagacaacaaaggcaaaaataaacaagtgagactagatcaaactaaaaagctctgcacagcaaaggaaacaatcaatggagtgaagagacaacctaaagaatgggagaaaatatttgcaaactttgcatctgacaagtggttaatatccaatatatataagaaactcagataactcagcaaaaagaaaacaagtaacctgattaaaaaataagcaaagtgtttggatagcratttctccataaaaggaatacaaatggccaacaggtatatgaaaaaaagaatcaaaatcactaatcatcaaagaaacacaaataaaaaccacagagagataccatcttataccagttgaaatggctattatcaaaaagatggataacataaagatgtaaaataaagtgagacgttgtacacggttggtggaaatgtaagttggtacaaccattatggaaagcattatggagattagtcaaaaaattaaaaatagagctgycatatatccagcaattccacttctgtgtgtgtgtgtgtgtgtgtgtgtgtatatatatatatatatatatatatatctccaaaagaaatgacattagtatattgaacatatatcttcatttctatatttattccagcattattcactatatccaagatatggaatcaacttagctttccctcaacagatggggtatattgaaaaatatatggtatattgatatggtttggctgtgtccccaaccaaatcccatcttgaattgtaactcccacaattcttatgtatcatgagaggaagccagtgggagatgattgaattatgggtgcaggtctttcctcctctgttctaatggtagtaggtttcatgagatctgatggttattataagggggagttttcctgcacaagctctctattttttttcctgctgccatccatgtaagatgtgacttgcttctccttgccttctgcaatgattatgaggcttccccagccacgtggaactctaagtccactataaacctctttcttttgtaaattgccccatcctgggtatgtctttatcagaagcctggaaacagaccaatacagtaaattggtaccaggagagtggtgcgctgctgaaaagatacctgaaaatatggaagtgactgtggaactgggtaacaggcagaggttggaacagtttggagggctcagaagaagacaagaaaatgtggaaaagtttggaacttcctagagacttgttaaatggctttgaccaaaagcctgacagtgatatggacaataaagtccagagcaaagtggtctcagatggaaatgaggaacttgttgggaactgcagtaaaggtgactcttgttatgttttagcaaagagagtggtggctttttgcccctgccctagagatttgtggaactttgaacttgaaagagatgatttagggtatctggcagaagaaatttctaagcagcaaagcattcaagagctaacttgggtgatgttaaaggcattcagttttataagggaagcagagcataaaagttctgaaaatttgcagcctggcaatgtgatagaaaagaaaaaccaattttctgaggagaaatttaagcaggctgcagaaatttgcataagtaacagggagcctaatgttaatcccaaggacaatggggaaaatgtytccagggcaagtcagaggtcttcatggcagcccctcccatcacaggcctggaggcctaggagaaaatggtttatgggcgaggcccagggtccccatgctgtgtgcagtctagggacttggtgccctgcatcacagaaactccagtcatgactaaaagggaccaaggtacagctcaggctgtttcttcagagggtggaagccccaagccttggcagctttcatgtggtgttgatcctgcaggttcacagaagtcaataattgaggtttgggaatctccacttagatttcagaagatgcatggaaaggtctggatgcccaggcaacagtttgctgcaggggcaaggcttgggccctcatggagaaactctgctagggcagtgtagataagaaatgtggggtcggagcccccatgcagacttcctactggggcaccacctagtggacctgtgagaagaaggccaccgtcctccagaccccagaatggtagatccactgacagcttgcactgtgggcctggaaaagctgcagacactcaatgccagcctgtgaaagcagccaggagggaggccataccctgcaaagccacaggggcggagcttccaaagaccatggaaacccacctcttgcatcagtgtgatctggatgtgagaattggaatcaaaggagatcattttggagctttaagatttggctgcccctcgggatttcagacttgcatgggacctgtagcccctttgttttggacgatgtctcccatttggaatggctgtacttatccaatgcctgtactcccattgtatctaggaagtaactagcttgcttttgattttataggctcataggcagaagggacttgccttgtttcagatgagacgttggactgtgaacttttgagttaatgctgaaatgagttaagactctgaaatactgttgggaaggcacgatcagttttgaaatgtgaggacatgagatttgggaaaggataggggcagaatgatatggtggctgtgtccccaaccaaatcgcatcttgagttgtaactcccacatttcctatgtgtcgtgggaggaacccggtgggaggtgattgaattatgggggcagatctttcctgttcttttcttataatagtaagtctcacaagatctgatggttattgtaagggggagttttcctgcacaagctctctcaagctctttctttttgcctactgctatcaatgtaagaagtgacatgctcctctttgcctctcgccatgattatgaggcttccacagccttgtggaactgtaagtccattataaacctctttcttttgtaaattgcccaatcacggttatgtctttatcagcagcatgaaaacagactaatacatatatacacatacaatagaatattatgcagccttaagaaaggaaatgctgtcatttgcaacaatgtggatgaaactggaggatattatgcaaatataataagccagacacagaaagacaaatactgaatgatctgacttatgtgtgggatctaaaaaagttaaacttatagaagcagagagtagaatgatgtttgctgggggttgagggagtgaagaaatagagggcttttggtcaaagggtacaaaggttcagttatgcaggatgaataagttctggagatttaatgtacagtatggtgactatagttaataatactgtgttgtatactagatatttgccaggagaataaatcttaaattttcagaccatacatagacacaaagatggtaagatggtaactatgtgaggtgatgggtatgttaattagcttgattgtggtaatcattttccaatgtgtatatatatcaaatcatcagtttgtacattgtaaacaggtacaattttcattcatctattatccctaaataaagctgaaaaataaaaatagaaatgagtaaataaatttttttttttttgagacagagtctcgctctgtcgcccaggctgagtgcagtggcgccatctcagctcactgcaagctccgcctcctgggttcacgccattctcctgtctcagcctcctgagtagctgggaccacaggcgcccgccaccacgcccagctaattttttgtatttttagtagagacggggtttcaccgtgttagccaggatggtctcgatctcctgacctcgtgatccacccgcctcggcctcccaaagtgctgggattacaggcgtgagccaccacgcccggcaagtaaataaaattttacaagaaataatttgggagaatttctgggttcatgctcggtcaacaaaaatggatattttttctatagattaacaagactcttagaaattatgatacaaaaaatgtcttattataatatcatatacacacattatttaggagtaaatctaataaagtacactcatgattttgacaaaggaaatcacaaaacactgagtgacagtaagggcaaccttagatacgtagagagacgtatcagtttgatggatgagaaaacaacatgaaaaaggtattatttcactttacaataaatttaatgcaatttgaatcaaagcctcattatgaagctatatatgtagaattataaaggtctaaaatattcttcaaaaatataaaagtatttataaagtactttcattttaaactcttgtaattaaagtaacgtaggtgaagaaagaggcaaattaatcaatattttagatgatagaactcagaaattcatcaaggtatatacaacaattgaatatataatagaattaactttctacatcagtggggaaagaataaactttcagtatattatgttgggataaattgttttccaattgaaaaaattacaatattagatctttaccaaatatcatatgcaaaaattgatcccagacaaataaaagagagaaataagaaaatcttcaaaattattaagaaatagtattcagtaattttttctaactatgataaaatttcttagataaggaacagaaaacccacaaataaatgaaagaagttactgaagttactgaaaaacaaatttaaatgacaacaatatacttaaacatatttagcaaacaaaatgttaatatcaagtatattgaaacaatctttctgatgcctaagtcaaaaatatataaatattaaaaatgggtaaattacataaaattgaactcagcaaaaaggacaactgaatgtacaagttaccttttttcactgtacatataggacaatttaaattgtaagcttaatattaccaagaaatggtgagcatgtgttgaaacaggaaggttcatatactccttgtggaaatataaaattgrtatcgtaacttgagagagctatttggaaaaaaaatgttagtttgtaaatgtgtataccccaaggcctggaaattttattcatcaaacatgattgtgaagaaaggaattaacaggttaaaataataaaatagcctctaaaagatacacagaaacgattgtagaaatccaaattaaacataatatgaagcccagaaagcagagaaaatattgagatgacaaattaaattaatgaaattaacaataaaaaagtgttgaagaaaatattcctgtggtcaaaaagagccaaatatgattaatgcaagtgtgtctcatgaattgggcaaataatacaaaacaaaatttagacttattttgggaaaattcttgcatttgtaagactgattttttattcctacaaacagttcagttgagaaaaacagattgacagcaaatgatcaaattcagttcttttttttccttttattttcatttctataatttttgaacactagaggaaccagatctacagaaggctgagagagaaatttttgtgaatgggaaattacatacagtgccaaatggcacttacgaaaacaacaacagcaaaactttctttttttttttttttttgtttgtttgtttgacagagccttgctctgttgcctaggctggagtgctgtggcacaatctcggctcacggcaacctccacctctcgggttcaagaaattctctgcctcagcctcctgagtagctgggattacaggcgcccgcaagcaagcccagctaatttttgtatttttagtagagayggggtttcaccaccttggccaggctggtcttgaactcctgaccttgtgatacacctgcctcagcctcccaaagtgctggcattacaggcgtgagccactgcatctggccaatgttgagcatttttatatgctgttggctgcttgtacaccttgttttaagaagtgtctgttcatattctctgccattttaagtggatatttttgttctttccttgttgatttaagttccctgtagattcttgatattagacctttatcagatgcataatttgtgattatatcctcctattccgtagcctgtctgtttactgtcagtaacttcttttgttgtgcaaaagctctttagttgaattaggtgccacttattacttttcgtttttgttgtaattgctcttggggacttagccacaaattctttgccaaaacttgttaagaaggtgtttcttaggttttgttttagcatttttataatttgagctcttacatttaagtctttaatccattttgagttaattttcatatatggtaagaggtaggggtccaattcattattctgcatatgactagccagttatcccagcactatttattgaataggcactcttattgtcaatgcttatttcagtagattttgtggaaaatcggatggttgtagttgtgtaggtttacttctgtgttttctattctgttccaccggtttatgcatctgtttttgtacttgtaccatgcttttttgattactgtaaccttatagtatggtttgaggttggatagtgtgatgcctccagcttcattcagcaaactgaatccagcagcacatcaaaacrttaattcaccatgaccaagtaagatttatttctgggatggaaagttagttcaccacatgcaaatcagtaaatatgattcaccacataaacagaataaaaaacaaatctcatacactcatctcagtagatgcaaaaacaaccttcaataaaatccaacattccttcatgataaaaatcctcaacagattaggcattggaggaagtacatcaaaataacaagagatgtttgtgacaaagccactggcaacatcatactaaatgggcaaaagctgaaagccttgcacttgagaactagaacaagacaaatgtgtccactcttaccactttcattcaacatggtaatggaaattctatccacacacagcaatcaggaaagagaaagaaaaaaragccattcaaataggaaaagaagttaaactatctcgttgctgacaataaaattccatacatagaaaaccctaaagaccacaccaaagggcttctagggctgattaatagattagktaaaggttcaggatacaaaatccatgtaaaaaattcagtagcatttttatacacgagtaacattctagctgagagtcaaatcaagaacatgatcccatttactatagccccaaagaaaatgaaatacccaggaattcatctaaccaaggagtgaaagatctctacaaaaaaaaaaaaaaaactacaaaacactgctgaaagaaatcagggatgacacaaataaataagaaaaattccatggtggatgtagttaaaatggccctactgcccaaagcaatatacagattcaatgctatctcaatcaaaatgccaacattatttttcacagaattagaaaaatctactataaaattaatttggagccaaaaaaagagctttaattaataaagccatcctaagcaaacagctttgaaaaaaaaaggaaggagagtgaatggacctttgatgaacagaatgacagactatggcagaaacaatgttcctcaccttgcaacactaaaaacccacatttcccagcactctttccccttgcgtctcaatgaaaccttgtgagtatatgttatggtgaaggaaatgttctagaaatgaggtattgtgttcagaaattgaggtttttttagttgtttccaaaaaaaaaaaaaaaaaaaaacagcctgtctagactaatacaaagagaaacacataaaacatacatttcaaaaaaaatttagcaaaatctaggcagaaacatcatggaaaacatagcaaaatgaaaacagatattttaatgctattacaaagttgaggacaagcctaaaagcattgaaagggaataaaatgtttaccttatatttgaaagtcagacaaaacaactcaggtatcacgataataattatttatgtactgaataatatttcatcaaaatrtaaaatataaatttatatgcatagtagaaaatgacaaaatgcaatcatacatggagtgcattacacagcttgctatatgtttgctaaatgaaattggtaaacacaaatgatatagatttagtgactgaacaattctacgttccactgaataaaattaaattctatttaattaatggaatgttttatgtgtaaatctgtttttccatttatccatctaattgcaaaattcctttctggcatacagatatcaattttgtgagtttctgtgaattgcgctatatagaaatttcaataaattctaaaattcaggtttaagaaaggccacacattgggaccataatgtgcttatatttaaaaataatgatgtgaattaaaatgaaatacccaaatagataaaagagaaaatgttttacaaaattattttttaggtcaaagaagaaattataactgtagttatagataattctaaaaagaaatccaaggagaaaattaggtgtcagatcttcatcatggggttgaagtggtgtttgctaaaatgtaactggccaagccataaatagtcacagtgttcagtaaaatataattagcttcatttgacttcactacaaagtaaaacaaaaaawggagctataatatgtaaacattaaaggtaataattataaaatagcaatgagaaaaatattaaagtatgaattttaaaagataaaacataaaattgataaaaaatataaaatcatagaattaatttttaatactatgtaactrtttgttaaaatttcaattagaataacaatttctaggaaacctgataagtggacaaaagagataaagcacatacatacaaacttataaatgttaatataaccacaaataatgtaaaattatgataactagctatatcaaactttatactaataaagttaaaagtcttgaaattgatgatgtttctaggaaaaaggtaattcatgcaaatgttttcaagaaatagaaaaattaaattattattaattgatttaaattaaaataagagaaaaagggccacatttaaaaatggtacccactccagaggttttataggaggtgatttatttgaacgtattatggagtaactaattatcacccatttatggtgttataggactcaaaaagctatgagctctttttgaacttaactcattttgtaaacataayatctccttgaagcaaaatgcaaaatattattcattgttttaatcttatttctacacacagaaatacttgcactgaataaaatactactaattctaacacagagctataattaaagagcaatccattgtgaactagtagggtgtttttttattcttgaaacttctacttatgtagttcatcacatcaagagaaaaggaagcaaaaccatatgatcatcttggtagagtccagtgaggcatatgtaaaaagaatttgtgtctatccctcatataatatagttaatgaaaaacataaatattcttagattcatatgatgaatcatatctatctaaaatttacttatgaagcaaatacaacttaaagatagaatataaaatgttcttattaaattctagagaaacaagaatatagttcctatcatctctaaaatttaactttgtaagttatatttattatagagaaaaataaaaattctcaaaaaagacaaaaatgtactcaaataatatgatgttcaatctggaaaatttaagaaaawtgcctttctttttgagacggagtctcgctctgtggcccaggctggagtgcagtggtgcgatctcggctcactgcaagctccgcctcccgggttcacgccattctcctgcctcagcctcccgagtagctgggactacaggcgcccgccaccacgcccggctatttttttgtatttttagtagagacggggtttcaccatgttagccaggatggtctcgatctcctgacctcgtgatccacccgcctcggcttcccaaagtgttgggattacaggcttgagccactgcgcctggccgaaaaataacttgaccttagtttcaaactacaagatggttcattaacatggtgagattaaaaattgttttaaaatcccatgcacatatatttcgtatatagctgtttaatacatgattaaatgatattacattttaagtagaaataaaagtataaagtactggatgagaccagaggcygaactcaggttctgatggccgagctgccccacaggatcatcaaggaaacccagcgtttgctggcagagccagttcctggcatcaaagcagaaccagatgaaagcaacgcccgttattttcatgtggtcattgctggggaatcaaaggattccccctttgagggagggacttttaaacgtgaactattacttgcagaagaatacccaatggcagcccctaaagtacgtttcatgaccaaaatttatcatccaaatgtagacaagttggaaagaataagttkagatattttgaaagataagtggtccccagccctgcagatccgcacagttctgctatcgatccaggccttgttaaatgctyccaatccagatgatccattagcaaatgatgtagtggagcagtggaagaccaacgaagcccaagccaytgaaacagctagagcatggactaggctatatgccatgaatagtatttaaattgatccaatcattaagtgtgcatcacttctcctgttctgccaagacttcttcctttttgcttgcatttaatggacatagtcttagaaacattacagaataaaaaaacccagacatcttcagttatttggtgattaaatgtacattagcaaatctatgtcttgtcctgattcactgtcataaagcatgagcagaggctagacgtatcatccggattgttgtgaaacgtttaaaagcagtggtccctccctgcttttattcatttcccccatcctggtttaagtataaagcactgtgaatgaaggtagttgtcaggttagctgcaagggtgtgggtgtttttctttatttttttgaggggggtaagtagttttattttaattttatgggctcctttccccgcctttttggtgctctaattggattggttaaaagcagctaaccagttctttagaaatatgctctctatccaagtctaactttatttagacactgtagatggacaagcttgattgtttgaaccaaaatgggaacatttaacaagcatcactgccctcactaataacattgtgactttgctgtcaagtgtagagtccccccttcaaaataagcttgtgaccattttgtatggcttgtctggaaacttctgtaaatcttatgttttactaaaatattttttgttattgtaaaaaaagtttaaagtactaggtaattataagaaatgtgaagcacatataggaataaaaatgatttaatgataaatgaattgggtaaatggagaaaattgtttgaggttgaaaagcctgaatgtaataaaaatatctgttagaaaaagctaaaagcaatgacaggcagggaaaaaattatatgcaacaaatatagaaggtaaaatatacttactatataaagagctcttattaataagaaagagttcttgtcagtaatacaaattctccaagaatacatgtgttatattgctttacaacatccttatattattattgtcattgtacagataagaaactgagccactttagagctcatgaacataccttagatttctcagaaagttagtggtagtctaggtatccaaatcctcatctgcctgagttaagagctcctctctattgtactataagtcaacatttgttaatttattaatattataactgagcctgattcttcctgtacttctgcactcgctgtaaattaaccattttacaggataatgcctctctcaacactaaaatctgtataattaatctatttatgtagccatgcattttaatacattagaatcccaaagcccagcaatagatttttttatattttattttacaatagctaataaagttgatcaagtaattatttattgagttgctagtatatgacatatattagcctaggtattagaagactgaacgaaaaatagacaaagatctctttcctcatgaagttttatattttagtgggaatgagatagacaataaacataagaggcaagatcgttatataaaatattaaaaggacaaagaggtgtggagaataattaagttaggtaaaaagaatagatggtgatgaagggtgtgtgtgtgtgtgtgtgtgtgtgtgtgtgtgctcacacgctattttaaatagtttgattaaggcagacctaagtgatatggaaaattactgtacaaaggttaaaagggtttgagggagatatccatgaggatatctggagttagagcgtttcagatagaggggtcaggcagttcctgagatgagagcatttctaccatgatacagaaagaacaaggttcatgcggttggaaaaataaaaaaagtgagcgagaagagagaggaatcaaagatgaggttccaaagctaatggaattttagatcctgtggagctctgtagcacgtggaaagtacttggtcttctattttgcatgaaagtcattaatccattggatgttatgagctgaggaatgatatgaactgacttaaaacagagtcattctggctgctgcttgtgaatcgattgcctgggggtgtgtggagggggaagaaaatgtaaacttttagattaggtgggtctcaaaataattcagtgagaaaacagagtaatgatctagctctagcctataggtgtggattgacactcaatgaagaaaaagaaaagaaacttatatatgattattacttgagaatatacaaaaagtttgaagctttagaaaattgataaaatttactgtgttttcttcagattgatggctacttcctgtatctaccccaaatgacaaaatgctactgatttatatatattttatgctctgtgtaaaaatttagtaatttgcaggtgtcatcttcctctatcccatttcctctgtcagggctgggatttgttttccaaactacatgtgaattgtctttttttttgacggagtttcactctgtcacccaggctgtagagcagtggcgcgattttgtctagctacaacattcccctcccaggttaaagcgattctcttgcctcagcccctggagtagctgggattacaggcatgcgccaacatgcctggctaatttttgtatttttagtagagacagggtttcatcatgttggccggactggtcccgaactcttgacctcaggtgatctgcccacctcagcctcccaaagtgctgggattacaggcatgagccaccacccctggccatttttatttttaattaagtttttatttttctagcctatttctaaactcctatcgatttttagcctatttctaaactcctattgatcgtgaaggttaaaagtatcctcccatttgtcccatgaagtccgtagatatcacataaaaactggacttctcgaactcatgctttcaccagttattctgaaagactgtgatccgtatcaacacaaaggataacaaaagttcttatggctacatttaaagcaaattcaattttatattttttaatgcaaaatttgagggaaataagggaaacacctaaaggcaaggtctttgatttagttgtatactttttccgaacttaaataacatggcgaacttaagtaagataggatatatatatatatatatatatatatctcacatatgtatcaaaataacagaaactaggcaaaattcatcacaaaatcagacatgcagttttgttgtggtcttcaatatcttttacatgattgcattttattacataaaaatgtattttcaccagaaaattatttaccttgtaatgaatgttatttgaaactctagaaaaagtgtagatatttagatatttaggcacttcgaaagcgtactgataataaggaatactttatcatccttaagagacattagtacacatatacatggttcaagaagcagggctaagcatatactatgtaaaagaagcaaaaagactcttactttaaaatactggtaaaataatttgacactagttctagtgtcaaactattctgaatttgtccttgagcaaattatataagttcactaaacttcagtttctttacctgtaaaaagtaaagataataccagctgcaagaagttactgtgaaaagtagataaagtaatgtattaaatatatagctactagtacagagtaggaactgaagaactgatggtttccttccccttcactgggcctcaccaatcagttggggaaacagagtatagatactacatgtaaataataaaacatagcagtcagcataggcaaagagtcatgtgaatggtattggtaactgacacaacaagagttcagaggaaatttttcaggactggcgtcaaaagatgcttcttggggaacacaggctttggtccagaaattaaaggaaaaatattagaaaaatagaaacacagttggtatgatcttccaaattcaacccatttatttaataggcaggacttggtggagatccaaacaagaaagcttattctttatcaccacaatttaatacataaaacaactctgctagatcttcctttactgtcttcttgatctcatgggggattttatagtctttccagccacatttgtttaattacaatatcctccttttagaggtaattatatgtatttattttttattttaatgtttatagatttaggggttttgatacatggacacattgcatagtagtgaagtatgtacttttaatgtaaccatcatgcaaacagtacacattgtactaattaggttatttctcatccctcacgtttctcccaccctctcacctttccaagcctctattattcctctctctgtgtccatatgtacacaatattgagctttgatttataagtgagaaaatgcaacatttgacatactgtttctgaattattttacttaaaataatggcctctaattccacttatattgctgcaaaagacacaattgcattattttttatggctgagtaatattccatgatgtatgtgtatatatacatatacatatacatatatatatatgtctgtgtgtgtatatataaaattttctttttccaatcatccattgatggacatttattttgattccatatctttgctattgtgaatagtgttgtggtaaacatatgagtgccagtatctttttcatataatgatttcttttcccttatgtagatgcccagtagtgagattgttggatggaatggtagttctatttttagttcttagagaaatctccatactgttttcaatggatgtacttcaccaccaacagtgtatgagtctttccttttatttgcatcctcttcaacatctgttattttttgactttttaattatagccaatctgactggtgtaaatgacatctctttatgattttaatttcccatttttctgctaattagagatgttgagcatttttttatatgctcgttggccatttgcatgttttcttttgcaaagtgttctgttgcgggaagtcagggaccccgaatggagggacaggctggagtcgcggcacaggaacataaattgtgaagatttcatcttaatatggacatttatcagttcccaaataatacttatataatttcttatgcctgtctttaatctcttaatcctgttgtctttgtaagctgaggatgtacgtcacctcaggaccactgtgataatgtgttaactgtacaaattgattgtaaaacgtgtgtttgaacaatatgaaatcagtgcaccttgaaaaagaacagaataacagagatttttatggaacaagggaagacaaccataaagtccaactgcctgcgaggtcgggcaaaaagagccatatttttcttcctgcagagagcctataaatggacgtgcaagtaggagagatattgctaaattattttcctagcaaggaatattaatattaataccctgggaaaggaatgcattcctcgggggaggtctataaacggtcgctcttggaatgtctatctggcgcagttgtgataaggactgagatatgccctggtctcctgcagtaccctcaggcttactagggttgggaagactccgccctggtaaatttgtggtcagactggttctctgctctttaaccctgttttctgttgtttaagatgtttatcaagacaatacatgcactgctgaacatagacccttatcagtggttctgcttttgccctttgttctgttccctcagaagcatgtgatctttgttagacccttagtagttctgctttttgttctttgaagcatgtgatcttggtgcctactccctgttcttacaccacctccccttttgaaacccttagtaaaaacttgctggtctgagactcaggcgggcatcacagtcctaccaatatgtgatgtcacccctggcggcccagctgtaaaattcctctctttatactgtctctctttatttctcaggggctgacacttatggaaaatagaacctacattgaaatattgggggtgggttcccccagtagtgttcgttcatgttctttacctacattttaatggggtcatttgttttgttgttgttgttgttgttgctgctatttttagttccctgtaggttctggatattagtcctttgttggacatatagtttacattatatttttttccattttgtaggttgtctattcaccctgttgattgtttatttttctgtgcagaaacttcttagtttagttaagtgccatttttctatttttgtttttgttttattcacctttcaggtcttagtcatgaattatttgcctagaccaatgtccagaagagtttttcctatttttttctagaatttttatggtttcaggtcttacatttaagttttaatctatgtttagttaatttttgtatatggtgagat

SEQ ID NO: 93406 - DNA, 13772 bp, Homo sapiens
tggagtctccatagtcacatccttgcatgtacacgtgtggttacataccaacatatgtatgcatacacatgcacacacatatatgcatacacacagacacttaaaacactgaaaactgtgtcttatcactcctgcactgtggaaaaataaaccatttttaagctccttttagagtttttgcaaaaaacaaaagctaatgccgtttttcctaatctgagcccccaaagctacacttatattatctaacttctctgtggaatattcttatctttttcattctgttttatttcctgagtcttcattctttccatttcttcaggtcattgacttgtatcccatctctcctaaaagctataaatcattcaatgttattttcttcaattccaaagcaattttcagtgatctttaaaaactattgaatctattttatttagaactaaatttttttaaaatgattttcagtactcttttcatgaaggaaggaaaactcaggtattataataaatgttaaatatttcctttttttgtccctgaaaatgttttgaattatttttaattgcactctttattttagtttttaaatatatgatgctcttttcaagaaaccagtttctttaatctttttaattttaaatataagtgcactttagttttcactttgttttacctacaaataatcatgattttctatgtgatattgaaaatgtctttgttatgattccattcattgattccatattttcttttttttttaaattactactttctttctagaactgactgctttgacactgctatctatgtgaaatatttcttcttctgtttaactatgtcaacatgatgaatcggatctgccatgtaaatgagaagccaaataatgtttttactgctttaaaatacagaggggaagctgtctagttttattaatattgtttttataatggcactgcatagtttttaatgagtgaggagagcaagaataaaaatatcacccaacattcagattatgtaatagccaaatggaaaagtctgagcagctctaatatgtactcaatgtggtcataataaaaagatattttataacttttcatgattctggctagttatgtgttttcaggaatcctcgtttggtgtaaactatagttcacctgtgctaatactgaaatcctggagtccatgggaaggtattggttttaggtaatgattttatttaacacctggtgctctttgcacagatgtgcatccttgcttctcctcttgacaaggaggaaagacaatagatgggtagagatgggtagatggagcccttccgtagatttctttcattaaattctccatgggatgacatctttgactgatcatgaatacatgtacctggcagaagatcaatagctcaggcagcaggctagaagacaggtgggctttgggctgaaaaagtctaaatatttcaaagtcctgggatttctgtgttaggaacagtatattttgttttcttttgtactccagtgttttcctacctaagggaggctgctggaagtgatgataaaagcaccagggctagccttggctttcagtgatttcaagtgacgccaggaaagtccctgagttcccagaatcacaaggttgtgagggactaggtagtatgcagaacatatatccctggtgacatttgaaattatttgtgggtctggaagcttttgaggcattgataaaaaattgagattgtctttgtttattgtgttcatggtgttttcacccagctcgaggagttactcagtcatgacactatggtttgtgtgtgtgactaagaccagttcttgaataatggccagtatccttattgaactaaagtggaactttgaggatccccagataatgaggtttccaattctgtcatgtgtgccttgagaaccctccgcagtaactatgggagacatcatcactgatcgaggcacacaatttatgctaagcccagaagaggactgggaattctacaaatatctagctaggcagccactaccagtagattagttgtcaagcatgttaagtctatttgtcttggctgtcttaggccttgagtaagcattcagcataaggccttctgcctgtcctggaatgaggccagataggtggatcagtcccagaagagcttcactgtccccttagagaaaaattagtctgagtagaaatatctagatttatttctaggatatatggtctggaggctgtcttatccttggttatgagccatgtgcaagaacacaagttgtcaggaacaactgctcctagtcaccacttgcaacctaaggtcaagaagctggcctcggaccaatctgcatcagatagaaaaattcatctgacagcattgcatatggacaagtaccaccgactatctctaatgcctgttcaaacctctccaggaacttgtttagcaggaagaagtgggagaaagccctctgcagtgaattacactgtctcttcaaggtctgtgagctgggctagtctcttagaagaaggcttaggcctagtccttgatcacctgttagtgtaaattatctgcaatgttaaaacagaagcgagggagaaaaaagcaaactggcatctatggtggctggaattttgtatacacaatgtcattaatcttttcaacagccccttgagtgagtggtatgatttcattttacatgcaagaaaggtgatggctcagagggattgtggaccctgcccagtgtcacaagtaggaaaatgacagaggtgagattacatttaggtctgctcagatgctgcccttattccttacggcatctgctgctaccataccatgtggcctgtacttgaaaataagccacatctttcctatcacatattttgcctcttccaaattttaaatagcttcccactattgtttcaggtcgctactctacagtcagcatttaagcagattggtcaagcactattacccacctatccaagcttaaaggctgccattagtaataattctgacatttctgaggtcattccttctcctcccctcaacatagagacacagtctggctccacaattcaaaatgaaaaagcaaaatggcaacaaatgtcaagtgcaacagtgattcttacagacaaagcactaagagagcaaagctattaaaaatttcattctactttgctcttccatttactgggctatatcttctttatggtactgaaatcagcaacattggaagcaatatctatgaccactacctaggacacagacactctcctgtacatgagaatctagcagagtgagacccacgaatagcttatttagtactgggggttggtagcaaaaagtaagtaaatcttgtaggatttactataaagaatatagggaaatatagcaacataagagctcattatctttgaagcaatgtaagcacacacacacgcatgcacacacacacacgcatatatgtatatatttatgtggttttggttaaaatgttatttatttaatttggttaaatgtaactaggctacttccatgaagttttttttttttttttttttttttttttttttttttagttgaagtaagagtatagaaaaagttatctgggttactaagaatagataggatggctggtgcaggagcccagacaagatgagccagacaagcttggcctaaggttgtggtggtcaaagtagaataaagtagatacctctgtgttactcaggagattaacaagtgataaggcttggttatgaactggggtgagtggatacagcaacttcaactgaattatccagctatccacagtgggattggtcagggaaataacccaactcatggagaagaaagaaaagcagggtagggcgatggcccacctgggtgtgacacagggccaagggaacccccatatccagttaaaggaagcagtgagtgattgtgcgaccctgggaaaccacgcttctcccacagatctttgcaacctgcggatcaggagatccccttatgagcccacaccaccagggccttgggtccgacacacagagctatgtggagtcttggcagagaagctgctcaggcatgcactgagacccaggagctttacatactccagtcctgggatccccaacaaaggtgtctgcagcccaggcaatgcacggtgtctgtacatacccctaggaagggggctgaacccaaggagccaagcagcattggcctgtgggtcccacttccatggcacctcacaagacaagacccactggcttggaattccagccagcctgcagtaaaagggtgcctgcctgagaagaaatggggccctgaggggaggggcaggctgccatctctgctgtttggttgactcagctgttccagcctgtggactttgaagagtccaaatggtctggatgaggaagagtttccccagtgcagcatagctgctttgccagaatgtggccagattgcttctgtaagctggacctcaaaccattccccctcattgggtgagacctcccagctgggcctccagctacctcaacctgcacatacggtatgaacagttctgatctttccctgggatgaagtgccctgggggtggggcatgtcactaccttggctgttcaagcatcttagccagtccagcttgtgggctttggggtgctcaatctgatcagaggctgaagagatccccaacacgcatgctgctctatcaaaaagcagccagactgcttctttaagcaggtactagatcacttttcttctgactgggtgagacctcccaaacaaagtcttcaggtacctcttacaactgcatttggcctggcaacaggtccgtaccccccgggatggagcttccagaggaaggggcaggctgccatctttgctatttcgcagacttcggtggtgatacctccaggtacaggaaaaacggaggtaactagggtctggagcagactcccagcaaaccacagcagccctatgcaacagccatcagactcttcaaagaaaaacaacaacaacaaaaaaaacacagaaaacaacaacaacaacaagaaaaaatccctgtgagaaccccatccaaaggttggcaacctcaaagatcaaaggtagataagcccacaaagatgagaaagaatcaactcaaaaatgtcaaaaactcaaaaaaccagagtgccccctttcttctaaatgactacagtgcttctgcagcaagggcttaaaacagggctaaggctgagatgctgaaatgacagaagtaggcttcagaatgtggataaaaatgaacttcgctgagctaaaggaatatgttttaacccaacacaaagaatctaaaaatcataataaaacaatgcagaagctgacagccaaaatagcaagtttagagaggaacatgatagaactgaaaaacacagtataagaacttcacaatgcaatcacaagtattaatagcagaatagatcaagtggaagaaagaatttcagagcttgaagactgtttttctgaaataagactggcagaaaagaatagataaaaaagaatgtaaaggaatgaacaaaacctccaagaactatgtgattatgtaaagagatcaaatctatgactgattggggtacgtgaaagagacagggagaatggaaccaatttggaaaacatacttcaggatatcatccaggagaacttcctcaacctggcaacacaggccaacattcaaattcaggaaatgcagagaactccagtaagatactccatgaaaagattatccccaagatacataatcatcagatctctaaggtcgaaatgaaacaaataatgttaagggcagcaaataatgttaagagaaaggcaaggtcacctacaaagggaagcccatgagaataacagtgatcctctcagaagaaactctacagccagaagagattggggccctatattcaacattcttaaaggaaagaatttctggtccaagttggtcacttccctacaccaaagtgagaagtagccaacatgtaaaggtgggagtcgtattacaaaactgaggccgatgaagaagcaaagaagaacaagaagagaaccttgaagcaagtggagactataagtattcaggaagagatagtttgttttttttttgttgatgcctccagggctatgtttgaatctcagagtaaagatgagttgactccctttgacatgagcatccagtgtatccaaagtgtgtacatcagtaagatcataaacagtgtttgagatctcttggcagtgatgctctatagtgcagagaaagacaaagattcagtgaaatatttacatcttacaggagttggataagccaggtgcaaaataaattctagagcttgaccagtttaaggggcagcaggaacaaaaacgtttccaagacctgatgggccacagatctgatgactcactcagtgaagtgctgtgtatctgtgccaacctctttagtgatgtccagttcatgatgagtcataacaagatcatgctgttcaccaatgaagacaaccccatggcaatgacagtgcctaagccagctgagccaggaccaaagctggtgatctctgagatacaggtatcttccttgacttgaagcacctgaagaaacctgggggctttgacatatccttattctatagagatatcaccagcatagcagaggatgaggacctcagggttcactttgaggaatccagcaaactagaaggttcactccaaggagaccaggaagcaagcactaagcaggttaaagctgaagctcatcaaagatatagtgatctctgggcatttataatctggtccagagggctctcaagccttctccaataaagctctattgggaaacaaatgaaccagtgaaaaccaagacccagacatttaatacaaatacaggaagtttgcttctgcytagtgataccaagaggtctgagatctatgggagtctcagattataatggagaaaggggaaacagaagagttaaaacagtttgatgatccaggtttgatgctcatggggtgtaagcccttggtaatgctgaagaagcaccatcatctgaggccctccctgttcatgtgccctgaggagttgctggtgattgggagctcaaccctgtttagtgctctgcacataaagtgtctggacaaggaggttgtagcatcacgcagatacacaccccgcaggaacatctctctttattttgtggctttggtgccacaggaagaggagttggatgaccagaaatttctggtgactcctccaggattccagcttgtctttttactctttgctgatgataaaaggaagatgccctttactgaaagtcatggcaactccagagcaggtggacaagatgaaggctatcgttcagaagctccgcttcacatgcagaagtgacagctttgagaaccctgggctgcagcagcacttcaggaacctggaggccttggccttggatttgatggagactgaacaagcagtggacctgacattgcccaaggttgaagcaatgaataaaagattggactccctggtggttgagtttaaggagcttgtttacccaccagattacaatcctgaagggaaatttaccaagagaaaacaaaataatgaagattttggaagcraaagacccaagatgaagtattcagaagaggagctgaaggccaatatcagcaagggcatgctgggcaatttcactgtgcccatgctgaaagaggcatatgggctgaagaagcaggagctgctggaagttctctctgagcacttccaggcctgaccagaggctgtgtgaccagctgcccttccacactgtggccaggctggctggccttgttcccagccagttaaaatgtgtttcttctgagctaggaagagtctgcccaatagaagttgagggactttacatttttgaggctttctgttgccacggtgaaggtgtagtcctcccactttgctgttccttactttattgcctaaagagccctaagtttgtactgaacacaaacaaacaaacaaaaaaacaaaaaataaaaataaaaaaaagaaaataatttccagcccagaatttcatatccagacaaactaagcattataagtgaaggagaaataagatccttttcagacaggcaaatgcttaggcaggcaaatgctgtctcaatgaactgcctaataatgtcagtgggatgttaaacctctgccttacaggagcgtatgaaggaagcactaaatatggaaaggaaaaatcgttaccagccattacaaaaacatatggaagtgcacagactagtgacactatgaagtaaccacataaactagtctgcaaaaataatcagctagcatcatgatgacaggatcaaatccacacctaacaatactaaccttaaatgtaaatgagctacatgccccaattaaaagacacagaatggcaaaccagataaagaatcaagatccatctgtacgctgtcttcaagagagctatctaacatgcaaagacacacagaggctcaaaatgaagggatagaggaaaatttactgagcaaatggagaacagaagaaagcaggagttgcaatccaagtttctgataagatagagtttaaactaacaaagatcaaaaggacagaaaagggcattacataatggcaaaggtttcaattcaataagtgccaactatcttaaatatatatgcacccaatacaggggcacccagatgcataaagcaagttcttacagactttaacagagacttagactcccacacaataatagtgagagattttaacacctcactgacaatattaggcagatcattgaggcagaacattaacaaagatattcagggcctgaactcagctctggatcaagttgacctgatagataactacagaactctccaccccaaaacaacagaatacatattcttctcattaccacatggaacttactctaaaattgatcacataatcagaagtaaaacactcctcagcaaatgcaaaagagctgaaatcctaacaaatcatctcttggaccacagcacaatcaaattagaactcaaaattaagaaattcacagaaaaccatatgactacactgaaactgaacaacctgcttctggatgacttttgggtaaataatgaaatcattgcagaaatcaagaagttctttgaaactaatgagagcaaagatacaatgtaccagcatgtgtgggatgtagataaagcagtgtcaagagagaaatctacagcactaaatacccacatcaaaaagctagaaagatctcgagttaacaacttaacatcacagttaaaagaaccagagaaccaagagcacacaaacctgaaagctagcaaaaataaccaacatcagagctgaattgaaggagacagagacatgaaaaacccttcaaaaatcaacaaatccaggagctgcttttcctggagaaaattaataaaatagatagactgatagctagactaataaactaaacatagagaagattcaaataaacacaattagaaatgataaggggaacattaccactgaccccacagacatacaaacaaccatcagagaatactgtaaacacctttgtacacataagttagaaaatctagaagaaatggatacattctaaatgggctaagtgctccaattaaaagacacagactggcaaattggataaagagtcaagatccatcagtgtgctgtattcaagaaacccatctcacgtgcagagacacacataggctcaaaataaagggatggaggaagatctaccaagcaaatggaaaacaaaagaaggcaggggttgcaatcttactctctgataaaacagactttaaaccaacaaagatcaaaagagacaaagaaggccattacataatgctaaagggatcaattcaacaagcagagctaactattctacatatatatgcaccaaatacaggagcacccagattcataaagcaagtccttagagacctagaaagagacttaaactcccatacaataataatgggagactttgttaccccactgtcaacattagacaggtcaacaagacagaatgttaacaaggatattcaggaattgaactcagctctgcaccaagtggacctaataggcatctacagaactctccacctcaaatcaacagaatatacattcttctcagcaccacaccacacttattccaaaactgaccacatacttggaagttaagcactcgtcagcaaatgtaaaagaacagaaatgataacaaactgtctctcagaccacagagcaatcaaactagaactcaggattaagaaactcactcagaactgctcaactacatggaaacagaacaacctgctcctgaatgactactgggtacataacgaaatgaaggcagaaataaagatgttctttgaaaccaacgagaacaaagacacaacataccagaatctttgggacacattcaaagcagtgtgtagagggaaatttatagcactgaatgcccacaagagaaaacaggaaagatctaaaattgataccctaatatcacaattaaaagaactagagaagcaagagcaaacacattcaaaagctagcagaagacaagaaataactaagatcagagcagaactgaaggaaatagagacagaaaaaacccttcaaaaaatcaatgaatccaggagctggtttttgaaaagatcaacaaaattgatagcccgctagcaagactaataaagaagaaaagagagaagaatcaaatagatgcaataaaaaacgataaaggggatatcaccaccgatcccacagaaatataaactaccatcagagatactataaacacctctacacaaataaactagaaaatctagaagaaatggataaattcctcaacacatacaccctcccaagactaaatcaggaaaaagatgaatctccgaatagaccaataacaggctctgaaattgaggcaacaattaatagcttaccaaccaaaaaaagtccaggaccagatggattcacagctgaattctaccagaggtagaaggaggagctggtacctttccttctaaactattcctatcaatagaaaaagagggaatcctccctaactcattttatgaggccagcatcatcctgataccaaagcctggcagaaacacaacaaaaaaagagaattttagaccaatatccctgatgaacattgctgcaaaaatcctcaataaaatactggcaaaccgaatccagcagcacatcaaaaagcttatccaccatgatcaagtgggcttcatccttgggatgcaaggctggttcaacatatgcaaaacaataaatgtaatccagcatataaacagaaccaatgaaaaaaccatataattatctcaatagatgcagaaaaggcctttgacaaaattcaacaatgcttcatgctaaaaactctcaataaattaggtattgatgggatgtacctcaaaataataagagctatctatgacaaacccacagccaatatcatactgaatgggcaaaacctggaagcattccctttgaaaaccggcacaagacagggatgtcctctctcaccactcctattaaaaatagtgttggaagttctggccagggcaatcaggcaggagaaggaaataaagggtattcaattaggaaaagaggaagtcaaattgtccctgtttgcagaggacatgattgtatatctagaaaaccccatcgcctcagcccaaaatctccttaagctgataggcaacttcagcaaagtctcaggatacaaaatcaatgtgcaaaaatcagaagcattcttatacaccaataacagacaaacagagagccaaatcatgagggaactcccattcacaattgcttcaaagagaataaaatacctagcaatccaacttacaagggatgtgaaggacctcttcaaggagaactacaaaccactgctcaaggaaataaaagaggatacaagcaaatggaagaacattccatgctcatgggtaggaagaatcaatattgtgaaaatggccatactgcccaaggtaatttagagattcaatgccatccccatcaagctaccaatgactttcttcacagaattggaaaaaactactttaaagttcatatggaaccaaaaaagaccccacatagccaagacaatgctaagccaaaagaacaaagctggaggcatcacgctacctgacttcaaactatactacaaggctacagtaaccaaaacagcatgatactggtaccaaaacagagatatagaccaatggaacagaacagacacctcagaaataacgctgcatatctacaaccatttgatctttgacaaacctgagaaaaacaagcaatggggaaaggattccctatttaataaatggtgctgggaaaactggctagccatatgtagaaagctgaaactggatcccttccttacatcttatacaaaaattaattcaagatggattatagacttaaatgttagacctaaaaccataaaaaccctagaagaaaacctagtcaataccattcaggacataggcatgggcaaggacttcatgtctaaaacaccaaaagcaatggcaacaaaagccaaaattgacaaatgggatctaattaaactaaagagcttctgcacagcaaaagaaactaccatcagagtgaacaggcagcctacagaatgggagaaaatttttgcaatctactcatctgacaaagggctaatatgcagaatctacaatgaactccaacaaatttacaagaaaaaaacaaacaaccccatcaaaaagtgggtgaaggacctgaacagacacttctcaaaataagacatttatgcagccaaaagacacatgaaaaaatgctcatcatcactggccatcagagaaatgcaaatcaaaaccacaatgagatagcatctcacaccagttagaatggcgatcattaaaaagtcaggaaacaacaggtgctggagaggatctggagaaataggatcacttttactctgttggtgagactgtaaactagttcaaccattttggaagtcagtgtggtgattcctcagggatctagaactagaaaaaccatttcacccagctatcgcattactgggtatatacccaaaggattataaatcatgctgctataaagacacatgcacacatatgtttactgcagcactattcacaatagcaaagacttggaaccaagccaaatgtccaccaatgatagactggattaagaaaatgtggcacatatacaccatggaatactatgcagccataaaaaatgacgagttcatgttctttgtagggacatgcatgaagctggaaaccatcactctcagcaaactatcggaaggacaaaaaaccaaacaccgcatgttctcactcataggtgggaagtgaacaatgagaacacatggacacaggaaggggaatatcacacacttggacctgttgtggggtgggtgggggggaggggagagggatagcattaggagatatacctaatgttaaatgatgagttaatgggtgcagcacaccaacatggcacatgtatacatatgtaacaaacctgcacattgtgcacatgtaccctaaaacttgaagtataataataaaaaaaatttccataaaaaaagaggaaatggatacattcctggcacatatgccctcccaagactgaatcaggaagaaattgaatccctgaatagaccaatagagagttctgaaattgagacagtaataaataacctaccaaccaaaaaaaaaa

SEQ ID NO: 93407 - DNA, 14194 bp, Homo sapiens
gaaggattattattgttggccttataaaatctcataatttaatatctaaattatattattttttaaatggaagtctactttatttaaattaagaggactaggctacttattttttttattttgttttggagagtacatgtgcaggttttttatattaatacattgagcaatgctgaggtttgggcttcccatggacccattaaccaaatagtaaacatagtacccaataagtagtttttcaacccttaccccctaccactgtacccccttttgggattcccagtatctattatttccatctctatgtctatgtgtacccattgtttagttttcacttgtaaagtgagaacatgcggtatttcattttctgtttctgacttatttcatttaggatgatggtctcaagctccatatatgttgctgcaaaagacagaatttcattcatttttatgcctgcatagtattccatggtatacatataccacatttctttttccagtcaaccagtaatagacccttaggttgattccatgattttgctattgtgaattgtgttgtgataaacatacaagtgcaggtgtctctttgatgaaacaatttcttttcttttggatagatactgaagagtgggattgctggattgaatggtagttctatatttatttctctgtgaaatctccatactgttttctataaaggttaaactaatttacattcccaccaacagtgtataaagtcttcccttttctccacatccttgccaatatctgttattttttgactttttaataatagccaatctgactggtctgaagtagtatctcattgtgattttaatctgcatttctctgatgattagttatgttgagcactttttaatatgtttgttgtcctcttgtatgtcttgttttgagaagtgtctgttcatgtcctttgcccacttcttaattggattatttgtttggtttttgttgatttgtttaagtccctcatagattctggatattagtctttgtcagatgcacagtttgcatttttttctcccattctgttggttgtctgtttattctgttgactatttttttatgtgcaaaagtttagtttaattagatctcatttgtccatttttattgttgcatttgcckttagccttagtcataaattctttgcctaggccaatatctagaagagttcttcttagattttcttctagcgattgcatagtttcaggtcttatatttacatcttcagtctatcttgagttaatatttgtatatggtgagaggtaggggtccagtttgacttcatatggctggccagctttcccaatgtcatttattgaatagggtacccatttcccattgtttacttttgtaaactttgccaacagtcggttggttgtaggtgtgtggctttatgtctgagttctctattctgttccattgatctatgtgtcttcttttgtaccaataccatgctgtttttgttactatagccttgtcatatagtttgaagtcaagtaatgtgttgcctctggctttgttctttttgctcaggattgctttgctactcaggctttcctttggtttcatatgaattttagaattgtttttataattgtgtgaaaatgacattggtaatttgataggaattgcattgtatctgtacattgttttgggctctaaactcattttaagaatattacttcttccaatccatgaatatgggataattttctatttgtttgtgacatctacagtttattcaatcagagttttgtagttctccttgtagcagttttcacttccttggtaaaatgtattcctagatattttatgttttgtgtgtgtggctattgcaaataggattgagttcttgatttggtttttaccttgagtattgttggtatacagaaaggcacctgattttcatacattaattttgtatcctgaaactttactaaagttatttgtcaggtcaaggagtcttttgaagaaaactttagggtcttttagatataagatcatgttgtcagcaaacagagacacttttatttcctctttttcaatttgggtgtcttttctttcttttcattatcagatttttctggctaagacttccagtattatggttaaataggagtggtgagagtagacatccttgggttgctcgagttctgaggaatgctttcagtgtttcaccattcagtttgatgttggctgcaggtttgtcttacagtatgttccttcaatgcctagttacttgagagtttttattatgaaaggctactgtattttatcaaatatttttcctgcatctgttgagatgatatgatttgtttttaactttgtttatgtggtgaatcacatttattgacttgcagatgttgaaccactcctatattcctgggatgaaacctacttgatcatgatgaattgtctttttttctatgctcttggattcagtttgctagtattttcttgaggatatttgtgtctatattcctcagggatattaacctgtggttttcttttttgttgtatccttgccaaactttggtaacagagtgatactagttttgtagagtgagttagttagaaaggaatccctacgccctgatttcctggaatactttcagtaagattggtacgggctcttctttacatgtctgatagaattcagctgagaatccatctgatcctcaactttttttggttggtagatttttcattattgatttgattttataaatcattattggttgcacaagatttcaatttcttcctgattcaatcttgggagttacatttcggttatttatcaatttcctctaggttttctagtttgtatacatagaggtgttcgtagcagtctctgagaatcttttatatttttgcaatatcagttgtcatgacacatttgtcatttctgttgtacttatttgattctttctctttttttcttggtttatctaactagcattctatttattttgtttaacctttcaaagaacaaactttcttgtttcattgagccttcattgattgttttataattttaaaaatcaatttaatttagttccactctgatcttttttatttcttttcttctgctagcttagtattttgtttgctcttgtttttctagttccttgaggtgaggcattagtttattaatttaagatatttctatctttttgttcaggcatttggcactatgagctatcgtcttaacactgcttttgctgtatgccagaggattttataggttgtgtctctacgttcatttgaaataattttttgatttctaccttaatttctttgattccctcaaagtcattcaggagcaagttgtttagtttccacgtacttgtgtgattttcatttaatcttccttttgaagtgaaccctatgtcattatataacaaccttctctgtgtgtgtgtgtgtgtgtgtgtgtgtgtatgtgtgttgttctgtttattgttgtgggtttaaaatctgttttatctattacaagaatggcaacctctgctctttttggtttttcatttatgtgatctgtctttctccacccctttactttgaacctctgggtctcagtacatgttaggtacatctcctgaaggcagcagatggttcagtctcattttttaaatttaatttgccaatctatataagtggagaatttaggtcagttatgctcaaaattaatatttatatgtgatatgtaaggctttgtttgtgtcatcatgtttttagctagttgctttgtagtgtaacttatttaattgctttgtagggttggtaaatttgtacttacatgttcttttatggtagcaagtattattcatttgttttcatgtttagaactcctttgaatatttcttgcagattcagtctagtggtgacaaacttttctagcatctgtcctctaccttgtctgggaaaggctgtttctccttcatttataaagctcagtttagcagcatataaactggtttgtaaggtttctcctgagaagtcttccgttagtctgacggaatttcctttataggagatttgcccttccatagctgtctttaagatcttttctttagcattgaccttggatagcttgatgactatgaatatgctttggtgatgttcatcttgtgtagtatctagcaggcgttctctaaatttcctgtatccagatttttacctttgtaactacgtttaaaaaaatacaaaattattctctcaaatatgttttccaagttttttttttttgcttctctcccaggaatgcctataagtcatagatttggttgctttacgtaatcccatatttctcaaaggctttgttctttcaaacaacttttttttttttgtctgactgtgttaatttgcaagaccagtttccaagttctgattttttttcttctgattgttctggtctatttttaaaactttctattgtgttttgcaattcttttagtgaatttttaaactccacagttctattatatatacatacatatccatacatatttatagccatttgatatatatatatggagatatatatgtatatatctatacgtatataaaaaattgctacaataatatatagccttctcatctctcatatcttgaataatttttctggtttcgttgtattggttttcaactttctcttgtatctcattgagtttccttggaacccatattttgaattctttgttatttcagaattttcattcctgttaggatctattgctagagagctactgtgatctttgaaggtgtcaaaacactgtttttgtactgcagaagatcttgcactgattcattctcatgtgaaagagctgttgcttcctatttttgaattcgctttcatttgtacgagacttttaaatgcttcattctttttttccttgagggtatgactgtggtgtatgttgcatatgatcttttggctttatttctggttgctttcagagggccaagtctctgtatgagttccttcattgtgggtagaatttgtgtggtggctttctcaaatgttgcttgttgttcaagtacttttagaaagacgctatgttaaacaagtgtaactgcagatgttagtagcacttttataatataatcacctataggtagaatgagaaagtttctggatttctagcacctaacattaaatttcatgctttctgaaagtaggccgtctaggaaacagttacttttgaattctctggacttttatatttttgaatgcaaaggaaatctgttagctgtttgactgtttttcagtttgctcgagacttaaattgagcacccagtgctatttactgattctcacttggaaagaacttggaaagaaaagttccacagaataaagacagagtaatttccattggttcaccatgaattctctgataatttctttacagaaaaaaacatagaaaatagatgtaattattattatattcccattatgaagtaataatttttgacacatattattttaaattatccagcaatttctttcccagtgaaagaattgaggaactgaaaattatcactttgccacattactcagaatcacaaaattggcttcaaaatggtgttaaaactacactccaagttgcctgaccccgaagcttgtgtttagaccatttttttttactagggtgtctaatagatgggcaactgaaaaggatcattactttttttttcaggacaatgggatgtcatttaaatacccagaaagaaacaacttgcccactgttatactgattccctgaaagacttcaaaggatgaagagtttacagctacagagtattcaatagaccttgggtcagtgtagaatcagagttacctttatgttttaaaataaatttgattttaattaaatttatgtatttgtttttttgttgtctgcttagaagaccaggcaaatcattgtaagtttgtgtcctccactcacttacccacttatctgtaagaattacctagccaggaacactagccgttcacgtgttcggtcctccttagctgactcgccgccctcgctgccgcaccatggacgccccgaggcacgtggtcaacttcgggcctggtcccgccaagctgyctcactcagtgttgttagagataaaaaaggaattattagactacaaaggagttggcattagtgttcttgaaatgagtcacaggccatcagattttgccaagattattaacgatacagagaatcttgtgcgggaattgcyagccrttccagacagctrtaaggtgatttttgtgcaaggaagtggrtctggccagttcggtgctgtccccttaaacctgattggcttgaaagcaggaagatgtgcggactatgtggtgacagggacttggtcagctaaggccgcagaagaagccaagaagtttgggactataaatatcattcaccctaaacttgrgagttatacaaaaattccagatccaagcacctggaacctcaacccggatgcctcctatgtgtattattgcgcaaatgaggtggtgcatggtgtggagtttgactttataccctatgtcaaggkagcagtactggtttgtgacatgtcctcaaacttcctgtccaagccagtggatgtccaagtttggtgtgatttttgctggtgcccagacgaatgttggctttgctggggtcactgtggtgattgtctgtgatgacctgctggggtttgccctctgagagtgccccttggtcctagaatacgaggtacaggctggaaacagctccttgtacaacacgcctccatgtttcagcatctatgtcatgggcttggtcctggagtggattaaaaacaatggaggtgccgcggccatggagaagcttagctccatcaaatctcaaatgatttatgagattattgataattctcaaggattctacgtatgtccggtggagccccaaaatagaagcaagatgaatattccattctgcatttgcaatgccaaaggagatgatgctttagaaaaaagactttttgataaagctcttgaacttaatatgttgcccttgaaagggtataggtctgtgggaggcatccgggcctctctgtataatgctgtcactattgaagatgttcagaagctggccgccttcatgaaaaattttttggagatgcatcagctatgaacacatcctaaccaggatatactctgttcttgaacaacatacaaagtttaaagtaacttgggtatggctacaaaaagttaacaaacacagtattttcctcaaatgaacatgtttattgtagattcttcttttttgaaagaacaacagcaaaacatctacagctctgtaaagctggtgggaactaatgttcaccttaattctgacttgaactggaagcattttaagaaatcttctcattgcttttctaacaaattcccgcttgtttagcctttgctgctactttttctagttagatttccaacttgcctgtggacttcatactgcaagttgcaattaattatttctagagtcatgggaacacacagcatagagggtaggtggggccctctaggtgctgaatctaaacatctgtggggtctcctgtgttcagaggctgttgattcaaggtcaacattgaccactggaggagtggtttaagagtaccaggcaaagggcaaactgaagattgatcattatactgttattacaagagaagtgtcatactttatatatgtttatattagcaaggtctgtttttaataccatatactttatatttctatacttttatatttctaataatacggttatcattgatacatgtagacacttttagaatttattaaatccttgaccttgtgcattatagcattccattagcaacagttgcaccccctccccagtcttcctcttcctctttttaagctgttttatgaaaaacatctcgaagttcttgattcatttttaccgttctttccataggtagaagagaaagttgattggttggttgtttttcaattatgccattaaactaaacatttctgttaaattaccttatcctttgttctcctgactgttttctttgtaatgtttgacgatgagagtgatactttgctcaaaagtctttcccctattgtttatctattgtcagtattttatgttgaatatgtgaagaacattaaagtcctaaaacatctaaaaaaaaaaaaaagaatcacctaggatggaataagatggaaatgatagcaatgaaaaataaagttgcagttacagagttttgagtttttctactttagattacattatgtacctactaatgaagactaagaagtttatttcaatattaaaaacgtctccataaataatgaaataggaatgcctgatagtatagctaatagttagcaggtaaggatatttttatatgtttacttttaaaaatcaaaatgaatatcttaactcagttttggtatcaaatggctcattgcagccatttagattcttgaaggtaaattttactctgtgctgatagaaattttatgcatgatttgctgatagtttaaaaaaaagctgattttttttcttgcatatgacaaaagcaaaaaatacaataaaatgtctttgcatttgttaaaaggctgagaagaatttagaatggcaatattactaagaatacagagtctataattatcacttgctagttccaaaatacaaatttttctagagttttatttgcaaattatatttctctggattcaagaaatatgcaagagaatagaaaagaagaatgagggagagaaaaaagagggagggagagagagtgagagaaaaagaaagagagagtggggaggagggggaggaggacgagtagggtggaggtagaggagatggtaaccagggaaagcacaatgtctcctaatgctacgctctgctgtggctaaaagataagaaagactaagcaaagaattattatgtagtcttaaagaattatttccaatgtactttgcatgtaacacataacatctaactactgttagttgaaggctcgtattccttcctcttcccctccctctctcgtatcactttctctttctcttggtttctctttctgttctttgaatatttccatttccttttttctaatagcatgcagtctattcacctgaattacaatgtcatgctgacttaagtctttttgtttctttatctttcagaaaaaaattcactgtactatagaaaatccaaattaaagtaagaaattcatgaggcattagtgattctgattcttatcaccaatatatagtggactctttttaagctatggaggatcttttgaaggacagtggaatatttatcttgcagacagattgatagtagaactgaaatagtaatgaggacagtttatatcagaacaagtacaattaaatttggttataaaatttgtaggttacatgggaaatatttctttcttgttaaaaggtatatagtatgttaagaacattaaaagtttcttattacagcatttcagatttgggagaagattaaagaatattgacatatctaactttgagaatctaactttcattttcttttgaaattctttcagtattacagcactcttatgtttattatttccctatgaaacatttctgaaacatctgctgagttttaaatattaagagattttaatattacaagaaatgtatggtatactcttgaggtaactttaagagctgcttcttattactaaatatttgtaactgttattatttgtagatattagttcaaatatacaaaatatatgtccccatgaataaaattaatactttctatgtatttgaaaattacattttaagttatttttatgtagcacatttgccaaatgcatttcacttactatgtgcagagaataattgaaagttgtttggtggtgtttttattcagacatgataagtacagagaataaatgtcattcaaattgtttgattcttccattttaactttgagtagaaattgaagttaaaatttttttcttgacaaactgcagctaaagttcttcaacttatgccttttgtttgcaaacattgagggaaattgcccataaatgttcaggtacctgaataaattaagacctaatgtgcttgaagaaagatgttttaagagtatccttttggggtgatgttctcaccaatttacatgcaagagtgaatttgtatcatttaaaccaattttcaaaatgtttgacaaagaccagcattatcttctgctcagaagcctcctctaaaactattcacattgttcacagaaatcaaactgctgagtttcctttagctccttttaagggcttttgatccttatatggatataagaacctgttttgcatatactggtagacaaaaaacatgaatattaagccattattttcacattagcaagttttcccaaggtgggtttttaacattttaaagacattttgttttgtgtgttactctctttttgtctaatcacctctaaaattatgaacactacaagaataatacatactgaataacaaaacagcttgaaatatttataactaagaaagcaactgttaaatgttcataaacaaagttgtttggagactcctttattaatttttaatttatcttcagtcaatttcttattacttccaaattcctgcaggggattctgttaattagtcttgtgtaaaatattcattaaaaccagctttctattttcttcttttattgcaaatttacatttctaatcttataaccaaaataaatgccactgggtagaggaaccatattaatttggatcagccaccaaaaatagaarctcatacagcaaaagatatggtaatataaaatagactaacattgaggtactttgttgattgatcaccattttgcaatagcagatggatatctagtccttgtttgaaaaaatatcaacactacgtaaaatagagtgtatttgaaatctagtaatctaagatgaagtaataatgaattggtacctgtatacttttgcacattaaaaacatttcagaaacaacatatagtttagttagggattcaaatttaatcaacagcgacaatgttgacattaaatttaaatcattgggtagcaaaagttttactgagttttttcagttgttatttgttttaaaatattttacttgtctttccttactatgcattatgtagttttgattctgtgctgcaaatagcaaagtagtataggaaatggaacatcaatgtgagtttagcattactaatatagctgttgactttccctctaacatagtgtatgttagtagaacattcatacaaacatctctaaaagaaatatatgtcagcattgtaagaaaagtttgcaatgccaggcataatattttcagagtgaaattcttggtttcgttgaaaactcttagacttctaagggtttggatacatcttagaaatatgagtttggctacatcttagaagtctaagagtttggatagaccttagaattatcttaacataactcatctcttcttaaagtctatgtccaaattttaagtcttcagtcattaattaaaatatgtaaaatataactaccagattagaaagtttactaaaataaaataatattatttactggaaaaagtggggaaaaatgtattttataggaagaaaaatgtaattacactcaaacaaatagagcacattttgtttactcttatgcggagtgataaatttattgccaaattaaagtcctcatgagtgacaacacatttacagcatagaaacatttagtaacagtaagcacaggtctcaaggttctaactctgtcttctgagattaagtcaaaaaggaggcaaagatttaggtagcacatactgcttcaataacaaaaccaactgaacaggatgtttagaattatacatatcaacattaaaaatatatttgtttaataaacagaaaacctaatagaagactgaattttgggaagacaaaatggcaatattgaaccagatctctaagtaatagatggaaatatattccaagaaatagttaattgtagtacccaatggccaatcattacagtccacgtgccaggttaattttacctatcagtcaacactcttttgaaatagttattctcctaaaatcccacctaacctgattattatctagcctgcattgacttctacatcttgaacacaaaaatattgtcattccatagtaacatacacatctaaagtaatctaacttatctaccagtctaacattgtaataattttttaaatgttgacttaacatgccttgctggcaaagaatttatacttgctctccacacgttggcagtcatgattgcacagctgcatgatttttgagtcttgaagcagtccaattatcaagtattccctaacttatataaagccctttaccatatcttagaatctcttctttgtttgagtctataatttcccttgatcatgtactctgtttctagtttgaaaatcatccttggccgcgcatggtggctcacacctgtaatcctagcattttggaaggccgaggcggatgaatcacgaggtcaggatatcgagaccatcctggctaacacagtgaaaccctgtctccactaacaaaaaattagctgggcatggtggcgggcgcctgtagtcccagctacttgggaggctgaggcaggagaatggcgttaacccaggaggcggagcttgcagtgaaccaagatcgtgtcactgcgctccagcctgggcaacagagggagactctgtttcaaaaaaaaaaaaaaaaaaaatcatcctcatgtcttagatggtggagtgagcagtaacaaaagaagatggaattcaatcctctcttttacaggtgaggactttgaggtcaagcacacgtatactcagtgaactgagggtcagctggacttggagccacttcacatgctcattctccattaaaaaataattgaaagtaaaaaaagaggttggacagtgtgtatgagtgagtgttctatgagaagaaaaataaaaacacgtgggtgtttaagttctacctcaacccttaccctgaggcaaatgtttaaagtttcctcatctgaaaaaggcaaaataatttcctgctttgtttccacagtgctgtgaggccccaataatacatacataagcatactctagtatatcaggataagttataataatatagtcaattacaccatctgtcccttgttctatgagtttttcaaaatagtcaacatagcccatcgtgttgctgaacttctcagttactgaaactcctcagatagttatttttctaaactttatttcagacaagatataatgagtttttgtataaccactaatgttttttccctaacatgtctttgttttacgctcagtatttaaaaagagttttttaaaaaacatgtgcatgtgtgttttacaggaatattgaccagtttagtttcatgtagaattgggatgatagctttcccaaagaatcaataacaacactgtctcagaaatgtaagaattattttttttttctgaaaatatcctcaactgtatctgaaaaacactttcaaattcaatctgtggttcctttttggatacatctccccacaaccagagagtttcccatttaaaatattgccatatgcagcaggctcttgctcctgaaaagattgtgtttcatctttaccaaaatatattcttcatttattttgaaacaaagaaactgtgagcaaaggcagtgtcttttaataaagaacatctaaattttacactattctaaaaatgttttctctcccatctttcaatagctaataggaagctgagtattttgaaaacaaaacaaaaccaaacaaaatggcacaatgtaacttggggaaatcataaaatatattttgttttactgtatgcactatgaaaatcaaagcaaactacagttattattatgaatatatctggttgttccaatagatttacatgaaatagttgctcataaagttatatctcaacagtttcaaaagtatctgctatcttaaatatttttaaggaaacgattagtgatcaaatgcatgtaaaaattattaaaagggcagtttttattaagatattattcatttgtttctgtttttatatttgtaaagaattagcaattatatacactacactaaaacatactc

SEQ ID NO: 93408 - DNA, 51447 bp, Homo sapiens
tggggagccctttaatactcccttgctcagtcctggtcagtggtaaagggggtaacccaataaagaccagacacagaggcttcagatccttccatccatactaactaatgacacacccattcagtgtgttctttgaccactgaaattatgacaattgtgtagcaatacgaaaaacacttccacagagttataacatggcattattacccttctttttttaatagcacctatcactttcaaacactaaaaatatgtctacttacttattatgtttattttttgtttactaacacatctttccctgccctgctagaaagtaagctctgcgaggggcaaaaatcttattttttgttcttttaaatttgtttgttggttgatttagctcaagtgtttagaacagtgtctgaaacatggaagggagcaagagggaaaacaggaattaggggtgggaggtcggggtggatggaagcctggccccttggcagaaccatgatgaggacactcagtaaacatttgttgaatgaataaagtgacatgaagaaagcaaaagacagtaatcccttcactaggttgctataaaggttaaatgagatgggtatgcataaccctagcatagagtggatgctgagtgcacctagtaaaagctaactttacctagataggagaaagcaagcggaagagggaggggctggagcccatggactgaggtctctatctccacttaagtgttcaccccagaaaggagtggcctctattctaggtcttatgtgaagtgaagtaagtccagcacagaaagacaaatattgggtgttctcactcatatgtgggagcttaaaaagtggatctcatggaggtagaaggtagaatgatggttaccagagactgggaatggaagtgggaagaagggaaatgaagaaaaattggttaaagggtacacaaatacagctatgtagaaggaataagttctagtgttcgatactgcagcagagaaattatagttcacagtaatttattatatatttcaaaatagctagagagaagaattttaatgttcccaacacaaagaaaagataaatgtttgaggtgatggatattccagttaccctgacttgatcattacacattgtatccatgagcaaagcccagacctacagtcagccctgccgcttaccagctctgtgcccttggtcaaatcacctaacttctctgggccatactttataaggtgaggataatagtaatgcctgtctccgtgggttgtgtgaatggtgcctagcacagggactggcacacagcagaggttcaaataaactaagggtttctttagtgcttgcccatccttcctcctgggagctgcccccaaccaggtctggagctgtccggagtgctgaagacctctcctctctttctccatccccctctatgtgtctctctttattttattcccttcttcctttctgcttgtggctccccagagcactggggtctgaacagatctaattttccaagtgccttattcaggctcctgagagggacagatagggaatgagccatgtaggaggctcttcccagggagcagggtctgaaagtcacaggcagaggagtggtgagcgtacaggctgttgggggaaaggaccccctcaggccagagtctactctaagagcttgacatctaaggaccctgttgcaggaaccttagggcctaccaacaggcaacaagtcagctccaacaatgcagagttgcaggtccgtctgtggggagcttgctcgggaagaaggtaagaggcaccaggttgaaggacagaaggatgacccttggctgcaggggctgcagggcccctgactatgacaggaatcccccatcccccttccccaggttcctgtcaccttccctattttggtcattcatgtgttagtgcagctaaaggcatcttcaacttttggagattatggggctgtggagttgactaattcgaggagcttggctctatgagtcaagcagtctgtggctaatccttggggcccatctccctgagtctaaaaatacaaatggtctctccccaggagggtggcacattagtctattgtgcccagaggtggaggcactagaggctcacacactcttgggagaagggttgggagaggagatgtggccagcctaagggacaaaaaccacctgtctctggatttttgtaaacatgtagaacatcagacctgaatgatctttggaaacctaaatgtctaagccaagctctccctgtacagctgggaaaactgaggcacagaacgggttgtagactctgtcccataaatcagtggcagaactgggattaaaagcagctcctgccttggcccagtgctggcctgctaagatcttcagccctctgtgagcccctgctggccatccactgcagagttctccggatactgagcatggccagcaagacctcaggccaggggagcctgctgcagctttgtgggactgagggctacccatgctcctttctgtgcctgtctccttatctgtacacagaggaattgatttagaggtttatatctccaaggatccttcagctctgatgttccaggtgtcagtaaaaagaggtgatttttgcctttggctaggaggcaggaagccaagctctggtccaagttcagtcctaacatttgatgagaccttggacaagtcactgtcccacccagagccacagtttcctcctctgtaaaagggggtaaaaagtccttgtcagggcctctgggcgtggctgtgtgtgcctctagtcccagctactcaggaggctgaggcaagagaattgcttacccgggaggtggagattgtggtaagctgagatcgcgccattgcactccagcctgggcaacaagagcgaaactccgtctcaaggaaaaaaagaaaaaaagagagtggaatagaaaaagagaagaacagaattgagcagaataaactaaaatagataggaataacagtagtaactatgagaccgcattgcaggtagcaagggtaagtggttctgagagatgtcctttcagggtactcaagttctatacagtcagtctcgtgagtctaccaaggtaaaatgtatttcttactgcagggcacagtctgcctgaccttggctgtactctggggacacaggcaggatctggctgggccccagccgtgagcagcctgagtctggtgggagacaggtgtgtatgcagggcacaggggagcccagaggctggagctgctgatctgcttggagatgtggagggcttcacagaaggggtgacattggacagggcctgatgatgagaaattgattttggagtggagctgacggggaaaggcattccaggcagagggcactccagcttgtgcaaaggcgtggaggtagcatgccagcaggaccgggagaacgtcaacagtttggctctgcatggccagagcctggcagcagtgggtggggagaccctcagactccttctccacccgtgctgcgggggactgagctccagccacagtgctggctctcaggagccaggaggcagaggggtgaggggcacactctctggagtcagactgcagggagtcccactgccgccccctccaccccatcccgcacccatgtgacctcaggcaagtcactaatcctctctgtgctatggtttcttcactaatggcatgaagctgatccactgcagatagcaggctcaggaccgtgccttcacacagcggcacagcttgcagcccgcgctggcgtttcccgtgaggtggcttagtcctgagctgtgcggagcagctcccccgcgtggccaaatacagaacagcgcttccaaccctcaagagaaagggcgtttgggaagtcggcccagcagagcaaatgggacacaggcccagcttctgtttccactcagtcctcgtgggcctctctttgaggacctcccgcactatctaagacatggagggggtgggcttgtggcccccacagtacgggtccccagaggctcagcggaagccagggctgcaggccctgargtccatgtgatgaggggtcttcaggctccagcaaggagaccctcagccttcctgagttttctgcaaaaagggagtgcagtgagaacccaggccacatcccaaacaagtggtggcccttttgtggctgcgattgccgtgctggtcaggacccaagtggggaagacggaaaagatgcaaaggaaatcaagtgtggaccccgaccttggcaagggctcccttctgtcctggggcctgggggtgaaattggcagctttattattcagggctacttctcttactaaggtagagatgcatgtatctgtgtctacttagaccttaaggatgccacccagggccaaggttaagattacaagccgatgatgataagcaaaatgcggtctatcatacagtgagtattatgcagccacgaaaaggaatgaagtactgacgtatgctgcaataaggacgaacctggaaagcattactctaagtcaaagaagccagacacaggccaggcacggtggctcacccctgtaatcccagcattttgagaggaccggagtgggggcggggtgggtgggtggatcacgaggtcaggagttcgagactaacctgaccaacgtggtaaaaccccatctctactaaaaatacaaaaattaaccagaatacaaaaattagccaggtgtgctggcgggtgcctgtaatcccagctactcaggaggctgaggcaggagaatctcttgaacccagagggtggagtttgcagtgagctgagttcatgtcactgcactccagcctgggtgacagagtgagaccctgtcaaaaaaaaagaagaagaaaaaaaaaaagaagccacacacaaagtaccatgtattatgtgcatttgtatgacatgtccagaataggcaaatccatagagacaaaaagcagattcatggttgactggagttgagggagggaggaatggggagcaactgctaatgggtttatttctggggtgataaaagcgttctataattcaatggtggtgatggttacataacttggtgaatatactaaaaccactttattgtacattttttaaaagaatgaattttatatgtatctcaatttaaaaaaaattctttaaaaaagaaaaaaaaggattataagctgggagccaacctgcctgggttcaaattctagctgtaccactgtggtggttatgagtcctgagcagctccccaactgctcctctaaaaaaatagagataatggtcaacatgcttcttagtgctgttgcaacattgaatgacaaaatgtttgagaaagttctttaggacaacacagagaaagctgtcgacagccaagtgtgtggctcacacctgtaatcccagctctctcagaggccgaagtgggaggattgcttgaacccaggaatgtgagtctgcagtgagccatgattgcaccactgcactccagcctgggcaacagagcaagaccctgtatcggaaaaagaaagaaagaagaaaactatcaatacatattcacaattgtcagggccagtggagttgggtagggcaggacgttggtcaaaatgattgggcagacaggccgggagggccatattaatacaaatctatcctccattaaagggatgtttttcatcagatcaaactcagatttggtggccttggctgttattgttatggggggcagattaaagggaaattctacctttgctaggccagtggggatgggggtggggtggcagcagagcgggtgcccgggagttccgagcagctctccagggctagagaactgtgggcttcagggcaggccacagtggaactgggcctgcaaaggtgaccctgccacctctggccccagttgtggtgctgtggatgcactcggcggtgctggggggcttggagatgaccaccctgctgagccgtgtgcctgggccgagggcctggtggatgggagattagtcttcctgccctatgacatgctgctcttctccctgtcctactgcaaccgctcctacctgtctctcggcactggtggacccctgcaggaggcctatgatgcagtgctcaccatcagccaggagtckggccccatagacaaggcctttgctgctgcccggcctgatggagaggcggctgcccaccttgagccagagcaggtaggtgtgctccttgtgcagaccccgaatgccttgagtrggggtccggggcaggggtgcacgcggtcaggtaggcatgctcctcgtgcagaccccgaatgccttgagtgggggtccggggcaggggtgcatgcggtcaggtaggtatgctcctcgtgcagaccccgaatgccttgagtgggggtccggggcaggggtgcacacgctcaggtaggtgtgctcctcgtgcagaccccgaatgccttgagtgggggtccggggcaggggtgcacgtgctcaggcccatctccaccatgggcacatggcctctttttgacaaagtatctctctgcctagtccctgggtgtggtcaatcgctttctccttcttgtatgtgtatgtgtgtatgtatatgtatatgtatatgtatatgtatatgtatatgtatatgtatacgtatacgtgtacgtgtacgtgtacgtgtacgtgtacgtgtacgtgtacgtgtacgtatacgtatatgtgtacgtgtatgtgtatgtgtatgtgtatgtatatgtgtatgtgtatgtatatgtatatgtgtatgtatatgtatatgtatgtgtatatgtatatgtgtatgtgtatgtatatgtatatgtatgtgtatatgtatatgtgtatgtatatgtatatgtatgtgtatatgtatatgtatatgtgtatgtatatgtatatgtatgtgtatatgtatatgtatatgtgtatgtatatgtatatgtatgtgtatatgtatatgtatatgtgtatgtatatgtatatgtgtatgtatatgtatatgtgtatgtatatgtgtatgtctgcagtagtcccccttatccactggggacatgttcccagacccccagcggatgcctgatgccgtggatggtactaaactctatatatgctgcgtttcctatacctacatacctataataaagtctaatttataaattaggcacggtaagagattaacaacaataactaaataataaaatagaacaattataacaatatattgtaatatgaattagtggatgtggtctttctgcctctttcaaattatcttaatattttgagaccctgattgactgtgggtagctgaaaccatggaaagagaaattgcagataaggggggactcccgcatgtctctgttcttccccatatcactcacctttttggcctgccttgtcagtgttcctctgtgtctcttctgcttctatttatctatctccagctctctcagtccctgaaattctcatttctggcccagctgctctttctcttatacacatttctcctctcctggctctgcatctctctagcaaatgacaaagatcagaaggggaaagtgttgggagcatgggagagtgggagagaggggaagattttctgtagtcattgctgtgattctgaagagagttagtggtgggggacgcagctgctggcctggcttggcttacaggactcagtgaacttgggtctcctggggatgcccgtttcttggtgttaagaagacagcagtgcctggaggtggtgacggatgtggatgctgatggtgggccattcaggcagtcatttatctgacagatgtggactgagtccctctcatgcgccactacgtctggtgtcaggaagacagtggtgaacaagacagacctggcctttaaggagtttctattctgttagggcgagacaggcgataaccaaataaccagatagctaaattcccatagtgataatgccaccgagaaaacagaacaggatacaatgatagaggagcaggatggagtagtggccaacaagagctagatgggcagggaagcccacttggggggtggcacttgagctgagctccaaatagtaaggaagcagctagatgagcatctggatgaagagtgaccagtcaggggaagcagcaagtgcaaagggcctgaggcagaacgagctccaattgatggaggaaaacgaaggaaggagtgtggagtggctgagctgtcatgggtgatgagacaggaatttgagatgagcttggggcctgagcatgtgaggctttgtgggccacgaggagtctgaacttattgtaagtaaaatgggaaaccatcagtggggtytgagtaagaaatgatttgatttaagcctttaaaaatcactttggtggccttatggggagaggcctgcagagggctcctaccccacggggcctcccttctgtgtgctcagccccggcagtctacagggggctttcccagcctccrtctcccaggaccctagggcccccggtgctcytgtccgtcccagagccccagccaggacttgtcaaggccctggctgcctcctgagaaggtccgtttgagacttgaggaagaagcccatgaccctggacgtgctccacaccctgagcttcaggctccccatctgtatagtgatggggttggccagaatgactcccaggggccctccagctttgaaaacaattcyccctggggtctaaattcctgtgtgttcctgaatccaaaccatccctgagtctcaggcgcatctggaagcgggcagccttccaatcccagccctctctgggctgccccacgaggactcttggcaacttgggaacgttgcgactggggaccagcagatgcatcaggcccaggggttccagacccgagcccgaggcagagggcctgtgtgaagacagtgttcagtgccctcctgacccagctgggactgacagtgagacagaaatggaaacggggagaggaaaggtgacggctctgagtcagaggccagactgaggctgggagggggcgttggcatcactcccactgccctgccccttctcttgcctccagtttgggcatccaccagctgcagctggtgtggggcccccaccggatcctgctgacagcccaggagctcaccttcatccatccacccctgaacagacaggtgggtagggcaggggctaagctgagtgggcggacagcagacagaggcccagtctacgctcctgaccacggctgccccctccagaggctgcatgtggatggtgaatggagaagtgtggcggatggtgggagcctgaggtcagtggcccaggggtcagcaaagagtctgccagccccccgggaacccaccaatgtggccctgtaccaagcgagggcctctgccacccctatgcccaggcctaggcagctgcagtccgtttgggagaagccgagggagcccataacctcttgggcctctgtatggcctactcctgttacagactgagaaactgaggcccagataggagcagtgcctttcctgggtcccttggcaagttggcagcagggctaggagtgggaagtagaaccccagctcctggcccagcatggttcatcatctgacctgaaggaacagccagttcccaggcccttggccctcaatgctgccggtgcggctcaccccagggcctttcttagggaccaaggccagcctaggtcaccctcctgcctgcttaggtaaggtgagatcctgggtctcccaggccctgacatgtgggggcagcacccagcccaggatagcctcgggcagagccggggccaccagctggcagggcggctgggcggtcagaggtgagctcagcaagatctcaggacgctgaggatgccgccatttctcaggtgctgtcattctcaagttcaacaattcatggttgctatgattcacctacaccaagactctcacggtagatgagccgggctagttgtttctacagaggcaacatgagctgcttgctccttcttttctacctgtcccctgagggaattccatctttttttcttttctgctgcaaggaggctttaatggtgttcaaagagtgttttgtctgcttctccgagttggctgacgggctgtaggtgaggctgagaggcaaaacccatcagtgatggaagagagaaggccaaggttacagctagctctgggccaggccaaggcaagggcagagcccccacctgggacccctcctctcccacccgcccctctctcctcaccatgaatccccaggtgacagagctccccacccaagcagttcacagggttaggggtgtcatgagggcctgaggcctgcagggcaaagctgtagaccaggggcgagcatacttgatacccaccatctcattaagcccctgagatgtgggtgggtgctatcatcctcactttacagatttggaacctgcagctcagagaactgaagtcacccaccccaggtcacagakttggaaagtggtggtgtcaggactggaactggagtccatcagccaaagcccggcccttggctctgcccggcttatagcaaatgtttccgctcaccaggctgtgcctggctcagaacacacagaaggaatgcgttgatggggaagaaactgagctgagagaggtagaggggttttcctgaggtcccacagctgaggagcagcagcagctaaactcttgctcttccttgaacagggagacygggtgtggctgaagaagtgtgaagtgggctcagaccctgagctgcgcccaagctgcctcagcctcccgaggaaggcagggctgtagagggcgcagaaggtgggtggggagtgaggctgctcaggacacccttactgatccaggttggtctcaaagaggaaattattcttgccatcatgatcctgcccactgccaatgcctcaatcacagtggttcactattgctgtcactgtcccatgccagcatccttaaagccacgtcaccaccccataacccataatccccataaccaccagggcgcagtgtcctccatcaatgccctcgcatggcaactcatcatgaagggacctcatcctgcagccccctccctttacccatcctttcttttattcactgtttactgagcatcacttatgtgccaggcacttatgtgcagtgttctgggctttggggatacagaatggagaagagagaaaaagtcccctccctcagggagatcctaagcacctgttatcactaaccacataagcattttcacccccaagatcattaccatcctgagaggcactgagggatggagacagagcatgagacttgagtcaggaagatctgggtgaaatcttgcctccatggaactcttagctttcctgtaaaatggagctagtgatagccaccttctgggggattatgattgcagagaatgcatgaaataacttagaactcttcctggcaagtggtgtgcttttgatacatggtgaattttattgatatctccaatatcaccacagtctgaaataaagttcagaaggattaagtgactggaagttaagttaggcatttcccagtgggcatcttgcaactatgtgagtagatttttttttttttttttttgagacagggtctcgctctttcacccaggctggagtgcagtggctgaatctcagctcactacaacctccggctcccgggctcaagcggtcctcccacctcagcctcccaagtagctgggattacgggtgtgcaccaccacacccagctaatttttgtatttttagtagagacagggtttcaccatgttggccaggctgatctagaactcctggcttcaagtgatctgccatttatccacctattgactcattcacccattcaccacccacccaccaaccacccatctactcacccatccatccatccacccattcatccacccacccatccacccgttcatccacccacccatccacccatccatctgcccacccactcaccaaccatgcaaacacccatccaccaaccacccatccacctacccaacaactcacccacccaccaaccacccatccacccactgaccaatcgcccaccaacccatccatccacccagccacccacccattcactcatccmtccatccacccacccatctacccaccagcccaccaagtacccactcacccacccattcacccatcatccatccaccctcccacccatcaaccactcacccacccatctacctgcctacccaccagctccccacccacccatccatctatttatccatctaccacccaccaccatctatccatgcatacattcatccatccatcctccatccatccctcaccacccacccattcatccatctgtctgtttttccatccattcattcaacatttctgatgcctctccatgcttagccttgtgcttggtgctaagagcaggtggcctagatgtggattgcacctggtccagccctcgaacggcccctgagggctgctaaggtgccaatttccctgacagatgcgggagctgcggtgtgagaacgtygccacctgcctgggcattttcgtgatctctggggaacctgcttcggaaagaggtcctgcacctagactggaccttcaaggcctccctgctgctggatttgatctgcatgagatccctccctgggcctggcactgcagggaagtggggatggcagggagacaggagatgctcagatttcccacagctgggctctttcagctttgtctaatccagggatatccaaactgcatggccacgggtacagggaggcaggaaggctttctggggcttgtgggaattccgagagaaccaggtttcctctcattcgttacagatccaatggacccccattatgtccatctcagggcatgaggtatctgcaccaccaccatttccctcctggctgcctcaagttccaaaactgtgtggtggacagatgctttgtgctcaaggtcactgaccatggttatgcagagcccctggacacttagcaggatccccaaccctggccagccccagaaggtcagctcagggataggcagggggctgccagtaggtttkggggcctctgtttaaccaggtgcttgtaaggtgyagggagagggagatctccagtcctctggtattggtgaccttgagttgatcgcttctcctctctgaacaagctgtaggctctttacctgtgaattggggagaatacatgcacccagcctggcttgggtggtcagcaggtaatggtggcatggccctgccctatgattgcagagctgctatggacagctcctgagctgctgccggggcctgggcgccctgggcggygcaccctcacaggggacatcttcagcactggcatcatcctgcaggaggtgctgactcgggcccactctactgctcctcgggacttccagtggaaggtaggtatcctcctcccctttcttggctgtccctggctagagtctctgcctagtgggaaattctatggcaatcaggaaatctgggcctgaagaccacatagacacacacacctaaagtctgaccatgagaacttgacttaaaccgggcagccttttaaggggtggcctgcccctccacacctgtgggtatttctagttgggtgggacgagagactgagaaagagataaaacacagagacaaagtatagagaaacaatagtgggcccaggggaccggcgatcagcataccaaggacctgcaccggcaccggtctctgagttccctcagtttttattgattattatsttcattatttcagcaaaaaggaatgtagtaggagggcagggtgataataaggagaaggtcagcaacaaacatgtgagcaatagaatctacgtcataatgaagttcaagggaaggtactatgactggacatgcacgtaagccagatttatgtttctctccacccaaacatctcagtggagtaaagaataacaaggcagcattactgyaaacatgtctcacctcccaccatagggcggtttttctctcatctcagaattgaacaaaggtacaatcgggttttataccaagacattcagttcccagaggcaggcaggagacagtggccttcctctayctcaactgcaagaggctttcctcttactaatccacctcagcacagaccctttacggatgtcgggctgggggacggtcaggtctttctcatcccatgaggccatatttcagactatcacatggggagaaaccttggacagtacccagctttccagggcagaggtccctgcagctttccgcagtgcattgtgcccctggtttattgagactagagaatggcgatgacttttaccaagtatactgcttgtaaacattttgttaacaaggcacgtcctgcacaggcctagatcacttaaaccttgatttcatacaacacatgtttttgtgagctccaggttgggtcaaagtggttgggtcaaagtggctggggcaaagctacaaattaacaacatctcagcaaagaaattatttaaagtacaggtctttttccaaatggagtctcttatgtcttccctttctacatagacacagtaacagtctgatttctctttcttttccctacagccttcagcaactctgccagaatagcagctgacccactccaggggctaaggacgttgtgctctgggtgaaaatccccgcccctgccttcctccccagtgtcactgccatgcctgtaggtgctcatgccccgcctgcacctgccctccatgcccagcacaggctacacagagctcagccctactccagctgtgtcactgtcttactctgtgaccttacacaaaccgcttaccctctctgagcctcagtgttgtcatctataaatgggaatccagtaaccaatgtgccagatccccagccccttggccaacgtggccaggctgctcaataccacggggcttcgttacctgcccaggcaggctccttcagagcatctctgtcctcacacttctggctccccaggataatcacttgcagcttccccatcgtcacctggcctgtacacactttctctcttccagccccagtgccaaggcccaactccaaaaatgtttcctcccctctgtgctctctgtctggctccctggaccccagacttctctttctgtcatcctcctgctgcctcttcccagtcccagggacctggccctccacagacacctggcacctcggcccacagtgcagagcagtgacggtgccgagctcaccatcagctcccaccccagtggataatctttaattcacaggagacccagccccactgcctttctccaccacagccctgtgaataatgagcattccaggcccaaatttatgaggtggaggagtgggaagaaggggggccttataagaccatttgttcaacactcctcggctgcctccccatcatctgcctctgaggagggaaggactggccagatgggatctgcaagccatgccaccagtgcaaggcgctccaggcctggctccatccagctttgggtgcagggacccaggtctggaatgctctggccacccttgaggaggctgtcagcctagggcccactgcttcctgctgtgtgctttcctaggcctcagggagtacagggctcacgccacaggctccagggaacaccatcctaagcccagctccacaccaacatgcctcgtgactttgagtaaatcccttttaggctccaagcctcagtgttctcatctgtaaaatgggaaccatgatgtctgccttccagcgcagctgtgaggattcagtgaaatgctgtagacagagggcctggcatgcagtgggtcctcaataaatatctgcagggtgatgtgaggagcgtgctaaggggggtcccaggctctctcctgactctaacatctctttaggatcctgtgggtgggrggkcactttgcagttcccaaggcactttcatgtgcatgattccatttgacaaccctgggaggtggctaatcgccccccttttagagttmagtgaggctcagagagtggaagggacttctcagaggggaagctgtggacctgggattgggtggacatccctggtccaagctcagtgttctaaaatctcttggtgtcatccgtggggcatcctcttagagcccagccagatcccaccagagctggatgctcagcctcctccccyagccctcagcactgtccatmaatcatggctatgcctggggtgtggacagcatgcctggcgcagtgaggggagcatgagacctagcctggcctggggcaggggttcccagcatgttcacwtatgaagactccattttaatgtcaaaaatggttagagcctcttatgctactatttgacttctaatatccactaactgagaacatacccaatgataaaatcggctgtgaaatcagcaacactttgaaatggatttgtttgtattcgttacagtgccatctgcatacctttgaaaatcagtagtacatgtgtgcatgtggtgtatgactggttccatcagcacacagtcttttgtaagcacataygacttcccagatcccacactcgggggccctcagggtctaacgcctgtaggctgggaacctctgggcagaggagatcgtgcaggctgggtgcaaaccaggccccgttctagtgtctgcttttgactggccctatgtgggtacctgatttcactcccaggagcctcagtttccctgtctgtaaaatggaatggtgactcctgcactatccccaacaagaagccaaaaagggatgggaaggggactgaaacccagaaagaaatttctcctccctggctccaagggctcccacctccctcactcatgagaggaggatcccggccctcctcagaggagattaacctactctgcctcatgacaacccttccaaatatgtagtatggttatacccgtcttccaggtgaggaagctgaggctcagagaggcgatgcgccttgtgcggactgtaaatgggtcgtctaaagtcccgctctgatctgtggactccagagcctgagctcggtgtcagcccctcttccccccagcctactttagaatcgctcggctccccctggctctccagcagcccccccgaggcaggggttatttccatcagttgttaggtggggaaactgaggctcagagtcatagcagaactagagcactgacttagcctggtgtggagacaggatgacatgtggccaggttttcttgaggacagaatcataatgatgatgataatgataagcaggcagtgtcgttcacacctgtggggaacyggcacgccagtgtctgcgtggcaaggctggaggaaagagctgcgctgtcaaggtttcaagatcattggtgggcattgttggcaacagagcagcggcagttgttgcggggcctgagggtgggggagagtctgccaggtgctaacatccgtcgtcttccacctcagcactcctctcaagaaggcagtttatttgagaccagcctgattaacatggagaaaccccatctctatgaaaaatacaaaattatttgggcgtggtggtgcatgcctggaggctgaggcaggagaatcgcttgaacctgggaggcagaggttgtggtgagctgggatcgcgacattwaaaaaaaaaaaagaacagaaaaaaaaaagaaaaaagaaggcagtttatatgctcatttcacagatcgggagactaaggctcagagaggtcattgtcttctccaccatcccatagtattgtggtggcagatccagaattcaaaaccagctcgcggctctcctggcccccagtttgagaccctttccttggccacacccagggtagacccaggagaacaataatgccacatccactggccagccataccctggaaacaggagctgaggaatatcctcaggcccagaacctggcaccgccataagcctactctgcccacgctctcaggatccgaggccaggctcctttcatgaccyttcccaggaccccaggcccgccccatggtgttggttgccgaaatcatcaggagggtggcatctccccctcctctgtgccggccgctggtgacccctgatcacgggccgcctgagtgcgttggctgatgaagaagtgctggracgaggctccagaggacagacctagcatggaccagatctacagccaggtgagtgctccccagaggagcaggtgctcacaaaaaatggcccattcgttcagctcacttagctcartgcaagccctgtgagttccctgggacctggaaagccatgcagtaaggggcaaccacccagcactgtcacccctgaggtccaccttttaaggagaactttcttaggaccacaggttccagggacgtttgtcccatgccttcctgagtgtcaagccccatgctgagggccatgctcccctcctttcatcctcgccacagccctctgaagaaacagtgttagtttcttggcttcgtgggagagaaatgaggcctggagaggtggggggacttgcccaaggtaactgagcaagtgaaagatggggctggagtccaacccaggtctgtctgtctttctgcagagctgtaccaggaaccctgccttgtaccaggccttctggcactagaggagagaggccactgtggctgtggagacagtactacttcctgagtcagtgaggggaaaatgtgaggggccctggggccccccaggactgccttggggatttcagtgggaggggcaaggcaagtctgtgcaagctggcagggcagcagtggagtatgtgaacatgacgaagctggccgatggcttccacggggccaacccatcagacccaagggaacagtgcctcccctccccgtcctccacaccccagccatggtggagagttgccaaggagtggttcagggaacaataaaggggttaggacaggtgatgagagggagagaggcagcaaggcagtccaaggagacgcacacaggtgtcctttgagaagccctgcccatcccctctcttcccacaacccctccccacttagctctggcatcaggggtggtgcccccctccacagatgagaaatctagagctcagagtaaatgacctctaaacagtcaccataatggtgggyagcagagctagggtgagcaaccagtttctaaagcacaagcttggaatctttccaggggatcggaggttgccatggccagtgaggtggggaagggctcttgccttgagtgaggggtgactgtgggattcttgcccaagattcctggccaaggccccatggcaaagaaggctgagatgggcacacatgaattccacctgaagaaggggggaatggcatcasactgtggggaggtgaggggtcagatgcctggattcacatctatgtgagaatccagtggataatcatcccacttacccactgtttgaccttggacaagttaatggtcctcttgggcctcagcctccctgtatgtttcctggaaagataactaaccctggcctaactctccagataggtgtgaccatccagtgagataactaattttttttaaatgtagctctttgagaaggagagagtgagtaaggtacaagagaaagaacactgacattaaagtcaaaaggcctgggtttcgggaggcagaagttgtggtgagccgagattgcgccattgcactccagcctggataacaagagcgaaactctgcctcgaaaaaaaaaaaaaaarggcckgggtttatattcatttcacattgttctaggagtagtagccaatgcaattagatgagaaaattaattttggaaaggaagaagaaatatacataattccaaawgataaaataattcagtggggtgcctggtgataaaattaatataaaagactttagtttgaaactcagatccaccactgtgtgctccttggcaagttattccacctctcagatcctttgtctcttcatttatgaaatggtgaccttccatgcagaggtgaccttggagttggcttcatgtccttgttggtgtctcaaggtcagcagctgtcatgctcaccctgtaaagcttttgttggacaatacaaaataggtgcatttcaggggctgctgccactccctaccttgcagacatttggctgagagatgtggcattaatggaggttggatgtgcatacctacacacacacacaacacacacacacacgtgcacacgcacacacgcacacactcttacacgttcaagatgctggattttggcaagcatggaccccttcactttgaccatcattgatttgcttctcttactgactgcactctgggaaggtgcaaaccacactgggtaaggttctagtaagtcttcctaggaaaactgctgccagatgtcctgtaaggttgttgttgaagatgtagtttatgatcacacataagggttctcatacaaagaactaagaggcttttctctttgcttggcactaggagtagttgtatttcttttgagcaattagtttaatgtttcattgtcttatggaccccatggattgtgtaatctatatttccctctttgctttgttgctaggaagctcatatccaaaatggtgaccaaattctagcatggattttgcatacagatttcactcctagatttacctttttttaaaaaaaggctttactctcctttggtcctaatatcctcacacgtttattattttattgtgtggtactgcttttattcttcttcatcattaaaatttcggaggaacaaagtagaaatagagacagattatacgtataaataatctacatatattctttctatctatccatccatccatcatccacctacccttccatctgtccatccatccatccatccatccaaccatctgttcatccatccatccatccatccatccatctgtctgtccatctgtccaaccatcyatctgtttgtctattatctatctatctatctatctatcatctatctatctatctatctgtctgtctgtctgtctatctttgagaagaacaaagaatctcacagcgttgttgtgagacccagtgcaataggattgtgtttgttaaccataatgctgtgctgggtacaggctcctttgcaaagtcctcttgctgcctgcccaccccacacagaattaacccgttaatctggcacaaagctgactgcacttttcccttgtcagagccaccatccccctgtaatttacatatctattccccacaacaatgcagctccttcaagcsgggattctgtttggtgcatttctgtggccccagactcccagctgaggaccaggtgtgctgaccttcatggatgacttggcatttttgttycattttcagttcaaaagcatcaaccaaggcaagaggaccagtgttgctgactccatgctgtggttgctggagaaatattcccagaacctggaggacctgattcaggagcagactgaggaactggagctgaagagagagaagacagaaaggctgctctgtcagatgattcccccgtgagtggcccctggacttgagtgtgcctctagccttagctctaagcacagggcctggaatatagtgggtgctcagcagatctggattccatgaatttattcaattcactcatccatgtttatgtatctaacatttttcttatgcagcacattattttgtttagttagttagtttagttagttttgtttattactattattttagatacagggtctcactatgttgcccaggctggcctcaaactcctggccttaagtgattctccttcctcagcctcccaaagtgctgggattataggcgtgagccactgcacatggcttatacaacatatttttatagagccctcaccatgtgccaggtactctgttgggcatgtgagtagaatttctgctctctcacatccttgggagcaaggagctgggcacaatgcttcccccaccccaatatcacttcagaggaagtcatgtccagagagggcaagtattcactccagggcagtcagcactgcagcagacttgaaccagayctgctgatgctcaacacagtttcctctcaaatatcccttcctagcctccaaactgtcaaaaatagaccctcataccttatgtgtctggcccctcccatcccttcaggtctgtggctgaagctcggaaaatgggggcaactgtggaaccagggtattttgaccaggttaccatatacttcagtgacattgtgggtttcaccatcatctcagccctgagtgaacccattgaggcggtgggcttgctcaacgatctctacatgctgtttgatgctgttctgggcagccatgacctgtataaggtgagaataccaggaggctggcattccattcctccctttactactgtgccttgatggtacaattacttccattcatttatttatgtatttatatcagctagctattgctgtataataaatacccccaaactcaatagggtaaaatgataagcatttattattgttcacaaacctatggggccaccagaaagttcttctggacacactcatacatctgtggtcagccatgggtgaggtagctgctctgctgatctcagttgggttctctcatgtctctggagccttgtggaactcaattctgttccacagtctatcttcctccagcaggctagtccgggattgtttacatgatgtggcagggttctgagagagaggacagaagtacacaaggctcttgagatctaatctgggatcaggcatwttacaatttctgatgtattctattggtcaaaatgaaagactagctcagattcaagagctgaggaaacaaagtccacctcttgatggaagaagcttcagagtcccattgcaatggggtgaacatagagsgggtggaggatatgggccattttgcatttaatggaccacagtgtttacttgtccattgtccatctatccatccctttacaatcttatcagcaggctcttctgtgcctgaccctgtgctgggcatgagcagacagatgactcagctcccaatcctatgctcaaggagctctcagtcctgtaggtaaaagataatgacccgcagtgaaagtaataatcctgggaggcagaggaggctgagagggccccaacccagctaggggtagatgtgtaaagagcagggaagacttcctggaagaggtgctgtcttcccagcattgtcccgtctgggagtggcagtcctaagcaggcaatgggggaaaaatatgctaaagcctgaggcttcagagggcctggtgagtgtggcaatgctgaataagctgggctggctggacaggaatgggccaggagtggggagttgggggcactggagagaacagcagaggcctcagcagggccttcaaacccctccctgtgcacctctcagtcctgggtttgagccccagcctggccaccagcttctgtgtggctttgggctaacagcttcccctctctgggcctctgtttctttgacagtgaacaggaatggtgagcacagtcctgggggtgttcacggaggatgggaggatcctgtcccccatgcgcaagtgggtgtcaagcatggagtgtgagaggtagtcacctcctgcctgccactcctccactctrcccatgctgtggggaccttccaaccccaacccttctcctcgttctgatccagggggtctaggggcagcttcagacatggtagggaaggtacggaggaaggtcccaggaaacaacacaccaaggctctattggccttagccctaatttgtgactcaccagccctgtccagccacggccctccacaaaggcagaggcaggggagggccaggccctgagggctgaagccagattgaaaaggatgccttgggaggaattttccgaggacacgatgaactctttgagatgccagacaatctgctgatagcattatttatagtaccccaacaacaataatcaccaacacttattgagtgtttagtgtatactggatgctagtattaaatgctttatatgtatcagcccatttattcagcaaaacaattcatgaggtatgaagtggtactgctaatttatatatgaggaaaatgaggcagcagaggctaagtggcttatttgttaacatcatcctagtgggatctgaggccaagatttgaacctgattatgctggtccaaaggcccttcttcagggaggctcaccatccccatgacatagacatcctcaggataaagctgtgggttcataatggcccacaagccctccaggagctgccctacctacctccccagttgtgtctctagccgctccacctctgcaggcctctggatcctcacacatgcctcgctgtctctagccaccaggccttgggacctctgtttctcctcctggagcagcactctccctcctcttcacctagctccctcctggccgtgtgtctggtctcgggttagccttctccccctcctagatacagttaggggcacctgtttgatgctcgcataactccccctacattgcactttatgtttccacactgaattactccccagtggccggcagtgttcagcacatcatagatcctcaggaaatgtgtgttgagggaatgaggaggacattgaggcacagagagggaagtgacccacctaaggtcacacagctggccatcagcagagccaggacaggaacctatggcatccaccatggtgctccatccactgcaccatactgaccgacacacacccacagggacctgcaccactgacacccaagggtgcagcttccctcctgttccccactcaggaccttagatccccgccctggcctgcggttccaaggcgttcctgagtttccctcttgcctccagagccaccctggccccacagccccaggaaaacattcctcatctcatctcgctgagccccacagctttgatctgccctgagtcaccccggccttatgtcttcctccactgctaatctttcctcacacatgtgtcccctggctctgaatcatcccttctcatctgctctgaaccctggccaggaggtctgcatctttctggcagaatgaaatgaaatcaaacaaggcccacacaaccctccagatgtggggaaagaggaggccccttcttcatggtgtgcaagtgtctctcatcactcacgccatccaccttggtttccccttcgtccccaacaggatctggttactgctctttaatccggtctgggttgggaggcagccagacaatcatttcctggttttgcaggggtctgcaattccctcccacgctcgctgagtgtgcactttcatggacatgactccagagcggagccgctggggactgtcacggaggcaaggcctcagccccacctgtggctcagccaggcgtaagtcttgccctggccctactgccaagccaccctgggcacgtcacctctctgagcctcagtactccacttataaaacagggatgaaagtgtctctggtttaggattgctctgcagattaaggaatgtgagagaaagcaccattggtcatttaggcaccaccttaaccttgagcacctgccacatgccagatgctgaaagcacagagggaaagggcagcattagttaatcacctacagagggctaagttggctggggaaatttcacaagtgatctaatctaaccctttcagtgcctgtcaggggtatggattactatccctactgtacagatgaggatgcaggcacagggagggtaaatgactcacccagggtcacacagcaagtcagtggtggggttagaattcacatctgcgtttgatagtatggaccctttgcttgcacctctcccctggctgtttctcccatctgtgaagggaaccactgcctcacttacagctgagagcccactatgataggcagctttgaatacatcacctttacgagtccctggagagcatgcctgtgcctggtcatctttctgtctctaggggtaaggagtgaatgttaatcaccctgcatgttcccttccagctcaggcatcaggcaggtcagcagcttagagatcagctttagcagatcagagaatgtggtctggttgtgtggccactatgaggctttctactcctcccctctagtctggactgtgggggcacacatctgaggcagggctgggtccccagagctggtgcaccgtccctgaatcacagctgcacacccagcaggcagggtgggagcagaacctcctcaaaagagagagagaaagggcccaagccatgtccatcaagaggcagcatagtgcacagactctggagctggactgaccaagttcaaacccacgcactggctacaagtgaccatggcaagtgacttaatgcctctgacccagttttcacctataacatggccttagtaatagtactcacatccccgaattcttgtgacgatctaatgcgttcataattgtaaagggtttgggactgtgtatggcacatagtgagcactatacgagtatttaagaggcactgagtcctttttccgtctcgccaatcaagtaaggcattccacctcctgcggtgaggaagaagagagagaagggaaagccaggagtctctcaaaattttccctcctggggagtggagtggaaaatctcttttgtggaaaggtgcacagcttggggcagccctgccaccacccccgccactcttaccaccagccaatgaatgctgggtggacagcagcaggcaggccgcagggcgagagagcaggccacagcccagaggagggaaacatctttctcacagctggggactgggaagattctgtgccctagatcacgtgtgagcgggaccgatggaggggtgggatttcagcagttagagactgggatagcttttcaggcagagggacctggcagacgtgagcaagcagtaggtgtctcttgaaatggtagaaagggtttctgtctggctgaagcatggggaaccagaagcaactgttagaaaacgtcaggaaatcctgcagatgaaggaggcccttgatagctaggccagggggcctgaattttaagccatggccatagggagcaaattgaagtgcatatcagagcggaatgtgatgtgattagggcagatcactttttggtggtgaggtggaggacagtcggggtgagggagagatcacagggtcgtgggggcgttggtagtggggcacagcccacacttgcatgttgcgtgagaaattttttgaattacagcgccccctaagggctgtggagcatcacgattcttgtgtaccaggcgctaagtgcagaagtgcctggcaagggaggctctgccgcccaggcccagtgaagccaacatgtacttgctgtaggaggaacagtgcaggagccaggaaagactcagagggtagagtcactgtcttcaccctggcaggcttggcctgtggcaggggagaaggctatgcttcattcacatctgtgttccaagcacctagaacagggacttaggaacagaggaaggtgcttaggaaaggtatatgggtccagttcagggggtggagctggaaccagccggtgaaaggcaggttttaactcaactcaagttttgaaaatcagagttgcagctgggggcagtggctcacacctgtaatcccaggactttgggaggctgagccaggcagatcacctgaggtcaggagttcaagaccagcctggccaacgttgtgaaaccccatctatacaaaaaatacaaaaattagccaggcgtggtggctcacgcctgtagtcccagctacttaggaggctgaggcatgagagtcacttgaacccaggaggcggaggttgcagtgagctgagatcacgccactgcactccagcctgggcaaccttggtaaaaagaaagaaagaaagaaagaaggaaagaaagaaagaaagaaggaaagaaagaaagaaagaaggaaagaaagaaagaaagaaggaaagaaagaaagaaagaaggaaagaaagaaagaaagaggaaagaaagaaaatcggagttgcctaaagagagaagtggctactgaagaaggagagactttcctatcgagggatgtgagtgggcaaggacagcaactggggtgggggaaattgggtgggtgaccagcaaagccccttccagttaggagattccaaaaccgtgatgatgaggaggaggacgacagcagcctctgtgtattcagcactggtatgcctgcttctgtaaatacttcacctctaacattcattccacgtaagaggaaactgaggctcgcccaggtgaagtcgtccaggtaaatggcagggccagggcttgaacctacatctgtctcattccaaaacctacattctttccagtaaacctttggaaggccagcagggtttggaaaattggaggcgtcctctaaatatatacggtcctctccaaattaatccctgatgtgccagtatggccttgagcagatggggtacccagctctgccaccaaggagcttgtggactgaggccagagacaaaaaaaaaaaaaaagccactgtcacctggaatacagacaaaggtgatctgaaatgtacagatccaatcgttgctaaagtgcttggcactggaggcctggcaaagatggcactgcgggccagagacccacggggcrggttgggactcccgagaagcagccatgtgtagcagaatgtgtggtgggccagcgaggatatgttctcacgctggattgtgaaggctgtggtttctaggtggagaccaytggggacgcctacatggtggtgtgggggctgcctcagtgcaatggcagtcagcatgcrgccgagatcaataacatggctctggatatccttggctctgtgggtgacttccrgaagaggcatgcacccaacgtgcccatttgcatcagggctggcctgcattcaggtatgggctaggggcctccagggtgagggggccacatccatctcccaatcttccctggggcgctggctgggacgcctccagtggcatgcttctggatgtctgagattcaaaactctatagtaaaaacattttacgtttctttttccttacattattttggggtcctaattatgttataaataagagagtctggccgggcacggtggctcacgcctgtagtctgaacattttgggaggcccaggcagtgggatcacaggaggtcaggagtttgagaccagcctggccaacatggagaaaccctgtctctactaaaaatacaaaaattagttgggcgtggtggtgcatgactgtaatctcagctactcaggaggctgaggcacaagaattgcttgaacccgggaggcggaggttgcagtgagccaagatggagccactgcactccaacctgggcaacagagtaagattctgtctccaaaaaaaaaaaaagagaatatgtgatgctgatagtctgatggaagaggcaggacagaaaccttctgtggtcatgcaaacaaccaaatgattgctgggatggatctgggagagccctcagagtcatgagtatacccttcccatgtccctactccttccaccatggttcccctcgcctgcaggataaagtccattggcrctgccaccaccgccccgccactgccatagcctctccaaccgcatctcccaccacttcctgcatggccctccatccacactctgctgtgtgcagtttcacacacacgggttccctgcctctgtgcctctgcacctgctgttccctgcccactcattctctcatccttcaaaacagagcacatgtatcctcttctccagcaagtcccctgggctgggttagaggccctttttggtgctggcacagtcctggtgcttctttcatcacagccttgattgcaggttacacatctctccccaccaggctgggagctgcscaagagcagggaggggctctgatctatctacrgcccctcacctccagcacagagcctggcacaagcatcagctcctctctggatgtcaytggagactccagttagctttatcctcaccccgcaactggagcccaggaagtgcagtggggaatggcacggagggtagagaagggtgaggctgtcactgrgctctctctctggtccaagacctgctggagctcactgggtacattcgagtttcagggccctgtgcagcaggggtcgtgggtctcacgatgccttggtattgcctctctggggacactgtcaacacggcttcccagatggagtccacagggctgcatgagtatctcacacttctatcctgcccggggagagactctttcaataacctgtgcggcctggctgtttaatatagttcttggtaaccaaatcaccasctggtggcggcgtaccctasttttcaggaaagcaactactatgttggtgcaaaagtaatagccattttggcgttaaaactaatgaccacgccattctcctgcctcagcctcccgagtaactgggattacagacgcatgccaccacacccggctaatattttgtattttcagtagagacagggtttcatcatgttagccaggatggtcttgatctcctgaccttgtgatccacctgccttggcctcccaaagtgctgggattacaggcgtgaaccaccaaacccgggaggcagagcagtgaaccgagatcgcaaaaaaaaaaaaaaaaagaaagaaagaaagaaaaaaaacagctaatggctaaagctgcaattacttttgcaccaacctaatagacggagatgatatacgtcattggctcttttaactttccacacaatatttgtggtgatctcatgagggcattagcagagaaaacaatgactcaaraggcaggaaatctgggtcctagccctggctctgcaactggcttgcttagtgtccttgggcaaaatgttcttcctgtaggccttagtttccccattgtacaaagaggagaccctttaaagtgttttttttttaattggtcacgtgccacctccttttatgctggggcagtcctgacaccaccatgaagacatccccagcgtttttggcccttactggcagcaggagctaccatgatggcttggctagagcagctaagatgttgaagccccaggtcctctgcctctggctgtgtaggtagttgctccttaatgttcagagtacatacatcccgcatagctggacgctatggctctactgggaagtcctgctcttaaaagaaaactaaaaactgtgtatcttctcagactcagccttcacagacttgcttacaagtagaaattatgttcctaggggttctgactccatcgtgagttccccttagcactcaacctatgtaatttgctttgcctctgggtctcttttagtgttccaacaatttagagggacaagaggcccagaagaagggtattgcataaatcatcactatgtgtatgattgattggaactgcagtcgtcgcagcctcttaatgattttaccaaatactaggtatgctgtcaccaggtgatgatctgatgactgcctttcttctcagcatacagaattcatgtcagccaaagcactgtccagatactgctcagccttgatgaaagctaccaaattgatatcagaggtcagactgagctgaaggtgagagaattttgtggtctttktgggaaaagtctccaaggatccagtttctgtgggaagcaggaaagattcttatctgactgatgtggctgcccaagttggggatgtagctggtcacctttacatgccctctatgctctccaaattctaaagaaacattgcttcctgggagccatcttgctccttgtgagaggaaaggccaggacagagaagtcacttctcctgatgacctgtctgtgtagcacgccagtgtacaacacacatcaaaatatttatcactcatagtaataatgaaaggagcatcgttgtccccattttacagttgaaaaaattcaattaaagaggcagagtggcttgtcaaagtcacatagctcgtaattcagatctcatggctccaaagcttgtgccttctccatagcactgctgggctcctgcccatccctcagaatcccagatcagacatcacctctcactgcagcctaccctgacccaggaacactcatcttcctcctccttccccacaaacagtgactgccatgccttctctgtgtacccaccagtcccaaggccagttctctgctgttacagtgtaatgttgggttgttaatgctcatgattacctcaaaggcagagaaaggtctgtaacctgtgcattctctctcaacattaycattctataaaggcaatggtacagcattcctttcagtgacttttcttcctaccccacctcctcttcctcaaattcctaagctgaagccaggtctagcagggagaccggagcaatctagcttaaaggcctgatgcactgggtcccagaaattcggtgccatatgggactcacttcattacactgtggaacgtcggtgcaggagggtgcagcacagagacgggcagcaacttgttcatgatcacacagcccgtgaaggccagcaaatgtggaatcctttgctctgtatggctggggttaggggagagtgagctggaataagtcagggcagatgtgtcttatttaggggggtgaacactgggcgtcctgaggaatggatgacttatgccagaaagggacacagagagttgtggggagggcagcgaggcgtggagagggtagagaggcgtggggagggcagagaggcgtgtggagggcagagaggcgtgtggagggcagagaggtgtgtggagggcagagaggtgtgtggagggcagagaggtgtggggagggcagagaggtgtggggagggcagagagatgtgcggagggcagagaggtatggggagggcagagaggtgtgcagggcagagaggtgtgcggagggcagagaggtgtggggagggcagagaggtgtgcggagggcagagaggtgtgcggagggcagagaggtgtgcggagggcagagaggtgtggggagggcagagaggtgtgtggagggcagagaggtgtgcggagggcagagaggtatggggagggcagcatgccaaccttaggctcttcaggctggcccaagggctccaaggacaatattcatcccatagagccctggcccaggatgggacatggaacctccagcccagccagccccgaccctcatgttctcaagccccctcgctcctgaccttcaggagctgcattcccaccccaggggaggccaccataccaggtccttccattgtgaaggctggagagaatcacagatggtgggatcttagcactctagatccgctgatcacagggctcatgattcttttctctctctctctctcttctttctttctttcccaggctggagagcagtggcgcgatcttggctcactgcaacctccacctcccaggttcaagtgattctcatgcctcggcctcccgaatagctgtgattacaggcatgtgccactgtgcctagctaatttttgtattttttagtagagatggagtttcttcatgttggccaggctggtcttgaactcctgacctcaagtgatccacctgcctcagcttcccaaaaggctaagactataggtgtgagccaccatgcacccagctgggttatttctttaacagagaaatattaacttatttagtctttacaactttgtgaggtactgaggcaatggaggcacagagaagtaaagtaagttggccaaagtcacacagctaggaggcagcagagccaggatttcaatctccaggctctaggctgctctccatggagctgttgaatcacacattttgtccttgctcttcagcttgaggaggtttgcttggggagggaccttcccatccccttccctctctcttccaggggaagggcatcgaagagacctactgggtggggggaaggcaggcttccccaggcccctccccgcacctgtggacatcagacctgggtgagtaagagagatttcccaaaaagcttggacgtttttctgattataaaagtatttcccgcctagtgtggaaaacttggaaaatacagaattcttcgaatattcaataatccccgtctttctactcctgggaggtagctgctgttagcacttcagcagggctcctacacacctgtttctcatgtgcttggcgtgcgtgaggtcatgtggcccagatcacttctcatcctgacctgtgccctcagctcactgtcctgagcaccttcctgtattgttcagagtactttataaacatacccacagtaggccaggcacggtggctcacgcctgtaatcccagcactttgggaggtcgaggcaggtggatcacctgaggtcaggagttcgagaccaacctggccaacatggtgaaaccccgtctctactaaaaatacaaaaagtagctgggcatggtggcgggtgcctatagtcccagctactcaggaggctgaggcaggagaatcgcttgaacccagaaggccaaggttgcagtgagaggagactgcgccattgcactccagcctgggtgacaagaacaaaactctgactcaaaaaacaaaaaacaaaaaacaaaaaccataaacatacccgcagtgactgcatctggattgcaacatgtggacactccaggattgcaacatgtggacactccaggatttgcaaagcctatctctattgcagagaatgcagaatctttccattttgagctgactacaggtcatgatttgctaaacattatcatgcatttattgctattcagactatttctgcagatgacaaatttttagataaaaagagcacccacattttgggggccatgtgaagcagattctcagagagcttgtgcctgtttggtggtttgtctcttccctctgtcctctgtcccctagaayccatgtccctcactgagggcaatatagatggggttggggaagggagaaaagttaataacattttacttcaaagtgctcttccctacccacttccaccccatcagtgggcaggcagtctgcagagggtcggagggcaaggggcacaggtgtcgccaattgccaagaaggtcccagagaccatagaggctgactggctgattgcactggtagggaggctgagcgtggggaagggcagggacccacctggcgtgctacattgccaccacatcagtgcctgggccagagctcaggcttgctgtctccctgcccagaatgcacccttcatcaaaacttccaacgggctctgctcagttcttccaagatagccccccacccaaggccacctcttcccatccctcaaagacaagcaatatgggcttcctgggaagggaccacagttggagcagcccaggctgagcatcctccaaccaggcgggactgatgtgaacagggcaggtcacagcagcctttcccctcctgctgttggggggccaaggccttgggaccccagggagcctggggcacagcggtgcctcagggcaggagttgctgccgttcatctgagttcccccttgccacacacatcagggtccagaggggctcccagcaagggggagagggaaagagagtgagtgsgtgggcagamrccagcataggatggcgagcctcccggggtgcagacacacagggacacccttttcacagggacacgccagcctcttagaggcagagccagcttgcactggtagaaaggccttcacacggctggggcccttctcctttgcagagtgatggatggcctgcgggacaggcagcgtgatgtgaacgcagggctcaggcctggccctgactgttgtgtggcagatcttgctcctgtctgggcccgttgggctctgtggctggactcagtcctcagctcccccgtggccctcttctcccttcccttacgtggagggcctctcctcctgttctcctccctgtgtcctgaggagtgagccctcctctggccttgcctccctaccagcgcccaccccactgctcatctccactcagagctcaacttctcaggagctggcggctgccgctgacttcacttcctcacctcccactccctcctcggcccccgcagtctgacttccaccccctcgggccagagggctcttcggaaggtctccggtgacctccrtccatgtcaccagatccgggggcagtttcagttctcaacctgactgctcagcagcgttcgccctgctgccctccttttcctaaaagctctttcttccctggcctcctcctctggcaccagctcatcctccccttcttggggcctccctstctacccagacactaacgacacccagtacacgtctcgggctcccaccccactgggcaccaggctcccgtagctctggctgctcactcartggttccttctggggcttcacagcaccacggattgcaaagctccagcaacccttgaaacctggtcctccagcatccccagtcagacagcccaacaccatgccaagctcctggcgtctccrcacctacccctatccattagcaagtctggagcctccagagcctctggggaggcaggtgggagtccttgccccctcccaggcctcaggctcagatcctgcacacaggatgtgtgtgtgcctagcagcccccactccatcacacatccctcctccggctggcttctccacctccctgcacccaccctggcccaagccaccacgyctctcaggtggcccgccgcagggctcctagccagttcccttccatccatctctacccggcagccagaattatcttttaaaaatacaaacatgggccgggcgtggtggctcacgcctgtaatcccagcactttgggaggccggggtgggcaggtcacttgaggtcaggagttggagaccagcctggccaacacggagaaatcccatctttactaaaaacacaaaaattagccaggtgtgcggcaggygtctgtaatttcagctacttgggaggctgaggcatgagaatcgcttgaacccaggaggcggaggttgcagtgagcggagatcgtgccactgcactgcagcctgggtgacagagcaagactctgtctcaaaacaacaacaataacaaaagtgacagacatgatggataggacaggttgctgcttctaacccttccgggctgtcccattgccctaagactaagcagcctttcgtgcagcctccaaggccctgcgctgtccagccagtgcctgccccttggcccggcctctcctgccaccttctgctgctcaccacctgctcacaggcctcctcgctgtccctaaagcacaccatgttcttcctacctccggccgcttgctcttgctgttcctctacctggaatgccctttctgtcatcctggtctcagtcaaatgctgcttcagtcaggaggtggcacaggtcacacactctagatgggccctgctgtcaccctgcagctcatttcccagcgtggtggcccccacagcacttgtaactactgacacttcttgtttgccagttgacggagcttgccctgcccatgtaagactcaggagatcccggaccgccaagacatcggcacatccgtccatcggtgctcagcacccagggaatgtgacctcttgagtctcctatgcaccagccgccttccaccaagtcccctgccccagtctgtcccttcaggcactactgaaaatcccagctcccagccctcacccygcccaccctgtctcagaacccggaacctgcagatccggcagccatttgtcatcctgcgccccttcagctgatggcttttctggacagaaactttagaaagtgccagaaatgttttcatcttcttggcttagagggagagaggagagcagaggttagttgcagtgggcaccacctgacgtgggagcctcccagacctccaggcaggcaggggagggtctccgcaccccagtcctgcacataagctcaccaggtgcacacactcgtcatgggtgtggaacaccacgtgcccctctacttgtctggagatgagatcacagacagacagacagacagacagacacacacacacacacacacacacacacacacacacacacacagaatctctgcaggaggggctcaggacaggacaggctggataagaacttgtcttggagccgcatttacaaagcagttaccaaatttttgcttgcactgtatgttataatttgatttttatttttttgaagccaagtttcctaaaaatgtttttatccccactttatgtatttcccatatctgcagaagtgatttatctttctatctggggattttgaggaggctggtggagatcgggggagggaacaaagggcccccccataccccccgcaaccatgtcttggggtagccacaaactcaagcagcagtgcccacagaagcacttttcgtgagacatcacagagacactccacacagtggccccctctctcctctgcccccgcaaaacaggcgcaaaaacctcccctgccagccaggttgctgcgagaccctggctgtccctcagagcctggctttcttctctgggtaacggcagtgacccagctccaccctgttcctggcacctgtgggcagcaagtgagaaaaggaaagtgtgtaggagtccatggtccctaccctggatctgtatattacctgggagtcacagaagccctcaccatggcctcccagccgcccawggtcatgtcctgagtaggggtggaagctggggtagttccccatctcctaggaggccactgtacttgaagccacacctgcagatgaatcagcaacggcatggccttggaaaagacacttcacctttcccagcctcagatccctaaagttcaaggcagggcaggtggcgtgtgcccatggccgggctgctcgcggcccaggagcacgaaggaagtgaaaggagctccccgtcagcagggtggggctgtaaaagctacgactgtggctttcagtggtcgctttgtgattcttgtttctcctttttctccagagacccttagtaagacttcataaaccaagaaatcagggcagactttgccaaagcccatcaggacacggcagggacccagagctccgggaagagcttggccaggccctgagtagaacggtgtggggcaggtgcctgcascagcgcggagcctcttgtggataccccttccccctccctgctccacttccttcaaagacttccttgctgagctccctggtggccaacctggtgcttgttactaagtgcccagagtgatagtaattgatgcattcccataagaatcctagagctgaacttgcctctcaacaccaaaacaataaaaatagaaaccctcccctcctttcacatggtgctttgtcctcggcaaatggttttgatgcagagagctcattaccatgagagccgaccctgaggagccctgtgcccactgctggctgcagggcccaaggcccagggggaggaggtcatttgccccaggtggcacagctgctttgggcagaagcaaggctaggacraggaagagaagccaggcagacgagggctccaggctcagctggcctcccacttgcaacatatctgttttgtcatctctgaaaggggcattgagaggattcagagcttctaacacagggcctggcccataggaaatgctcaaagtgcgctgcctccttccctgcctctcctccccaaaccagcacgttgcctccttccctgcctctcctccccaaggcagcctaaaccttcgggtgtctgtgagcactgtgtcaggagtccaggccttgggacacaggaactcagaaactcaagatggagsagggaaggtgagaattcctcagttttcaggaaactgagatgagakttctgtcttacagaaaaaaaaaaaaarraraaaaaaaaacccaacagccaacttattaaattggcttccaacatcaaagagtgctcaccaaatcctcgcgggtgatttcagagcaggcaagatcaggcacacgtggaattcattyccccaactgaggggagaggggcggggccaagtgggcaggttaagccccaaacaaacttatcctttcctcaaaagaccccttaggagcggggagctggtacgaaaactttgaagtggtggttgttgggaaaatgttctgcctgagggctgctgtgcccacagacgccagggtgcccctgtgtgtgtgtgtgtgtgtgtgtgcgtgtgtgtgtaagagacaagaggtatgtaaggatgtgatggtgattgtagaattggctttgggagatgccactgcctgtccctacttgtgcaactttgggcctaacctttctatgcctcagtttcctgaaaygcaaaacggagccagttactcttacatcccatatcatcatgagagttaaatgagaggactgtggaaacaccacatctgaccctgcgagcctgcaggagtgttgarcagggaggatctgcacgcgtgtatctgtggaatgtgcccatggcttgtgtgtgattgtgtctgtgtgtgtgggacagctgtggggtggggtgggggaaagggacagagatgtggccctggtttctccacaggccctctgggtggccccctttagggctatggattttctctcagggctctagtttcttcatctgtaaaatgagtacatggtctaggtgactcctgaagcccctctgggtgcatagctgtgtgtctgccgtgagcatccatgagcatatgcatgggtttgtgccctggcaccacagctgggcaggaggagactggagctcaaccaggactcccctttcctactgtggactgaaggcctgtgttctccgcccacattcctatgtcgaaaccccagtcccaatgtgatggcttaggaggtgggacctttgagaggtgatcagattataaggctggagccctcacaaatgggattagtgcccttgtgagaagaggccagtgagctagctctttccaccaagggagagcacagcaacaaggggccatctgcgaacctgtaagagaggcctcaccagtgccaggccctgacggcaccttgatctgggacttccaagctccaaaacggtgagaagcaaatatctattgttgaagccctccaatctgtgttattcagttacagcagcccaagctgactaagacacccgccaggagccaagtggcccaggctggtctgttggcgcctctaggccttctgttcctcgctgcacaggagggtccaggcccctgccctaactgccttatgaggctgctgttagatcaaggaggcagtgcgtgtgaacacacgctcagctaagaagtgtggtgcagatgtgacttggggggtggggtgggtgaacagatctgtgtgaccttgtatatttaagtggacaccagagctgaaagggacctttgcaggcaagtgacagtgagcctgtgcctatgcctgtggacatgtgtgggttgtcattgtgtctgtgtctgcatgtatgtgctcatctgtgggcatctgtgcatgttgtctgtgtatatgtgcatttatgtgtccgtgtgtttctgtgtacatgcatttatggccttggtgtgtctacatgtatgtggctttactgtgtatgttatgtgtctgagcgtgtctgagcaccaaaatctggggcagtggtacatcccttcctgtcccaaaatctggggcagtgacacatgtatctgtgtgcataccatgtgtatccatatgtgtgatgtgtgtccaagtacctgttgtgtgcatgtgtgctgtttgtcagggtgtgtctagattcagccatgggtcttcatgctcttgggccctctggaaggctgtatggtgggagcagctcttgcccctctgctcactccctcaactgcccttgctgagaagggctgagtcagctctgttcttagaggctcctaaggactctaggaggaaactctggctccagagctgacatactgcatgtaactagactccctacattggtctgttttcacactgctataaagatactacctgagactgggtaattcataaacaaaagaggtttaattgattcacagttctgcatggttgcggaggcctcaggaaacttacaatcatggcagaaggcaaagggaagcaaggcaactcttatatggtgttgagagagagagagagagagagagagagaagggggaagcgcccgacacttacaaaacaaccagatctcatgagaactcactcactaccatgagaccagcctggggaaaccacccccatgatccaatcacctcccaccagatccctcccttgacacgtcattcagattacaattcgagatgagatttgggtggggacacagccaaaccatatttcccccccacaacacacaccagggttctcacctctctctaaccttcctccatcagctagggacaaaggaagaaggcccatgcccacctggatcctgcatcatgccccagtccggggctggccgtttcctcctgggaggctttatgtctcatttatttccccacttacctgctacctgctgtgggccaggtgtgtgccaggagcttcatgcatattgtctcaaccatgcccactctctaaaatgagagttatttgctcactttacagatgaggaactggaggcttggaggrtgaagtgccttgtatgtgtcagcccatctgtctcctgatctgaggtsgtgatgcagggctacaaaagcccagaaaaacagcaatggtccctggagggttcccaggggaggcagcctcagtgagcacacaacttcctcttctgcagaacaggggtgaggacagcaccttccaggtgagtctgaggaagccctcaggaggagccagcacggcattcgcatgggcttccatgcacatgctcagatgggaccccagagatggagccccaagtcatggctttcatgatgagtcaatgccagctggtgccaatgaaggccccctgccttccccccagcagcctgtgaccattcacctgtcccttggagtacattcccagcaaggggacattctggcatttctagaggttgggttctcactatggcagatggagctatgggcttccagaaggtccttgcagggctgggtgatctggaattgcttggtccctggttctgcaggtgggcacactttgagatggactccttagaaaagcccaaatactttagcctggcattcaaggccctacacatgctggccccacctcatctgccccctacacaaccaactgtttggctatgacacactccttacacttctgcaaacccctcatgatgcggcatctttgctcttgttattttytctacctagatgacttgtccctttttcaacacctggtgaatgcctctacatccttcaaagtccacctaaaatgccaccttctcctgaaacmctttcccagtcctcctcggtatggaattagtagctgccatgcctgatcctcacttgacaggagggaccttatctagttccttcctttagtccaatgcccaggaagaggcatgtacgagaaagctgaattgatgaatgaacaaattaaggaactaactagcccaaaggcatcgaataaataatctcccctcccgcaatgccagctcctgaggtcgccttttggtttctcctctgctgttctctgcatctgagcttggttgatctgatgcttagctgggatcccggcacaccaggcacaggcagcatgtcagctcatggctcccctcgcagccctgcctctgctcaccactgcccttatgctgcagtggatgccctcacctccaacccctgcaccggcctggaggctctttcccagctccctgtttcccactccttctggctaactccttcctctccaaatctctgttcctctgccactgcctccaggaatccttccctgacacactccctttcatcccaacgtgctgtgggagggggacctcctctggcccctcagccctgggccaccctgtccatcactgactacactctaggtatggtcttgtgtcagcctctccctgcagaagggggcttctggagggcaaaggtggatctgaaccctgtttgtgtgaccccagggtctggccagtaaagttcagtggggaagaaatatgacagatcaggggaggtgaaggaggctactgtggtggcaggtgagcctccctttaaggaaatccacgtgcatgacaatcaagatttgctcaaaagacagagtggagtctacactctcatagaatgggaggtgaagtgacacagagaaggagggaaaggccacacatgtactgagcacctgctgtgtgcaccgtctcaggaccctgcatcttcattgagtggtgaggacacgaggctctgagaggagactgacaaaccaaatgggctgctgcgttccccggggctgtgggacacccaagcccggctccttctcaagggctggccatgccacctcccatgtaggctctgacctggccttccctgcacaagtccctcttgctggaggccccagtctctccatcaggaccagcgcaggtttccgcggcctgagagactctttgagcaatccactagggggcaggcaagttgttccagagtgaaccaggagcccctctggcaacccaggagactcgtgggcccctccccagcccgcaggctcccggggctccgctgcccagcagggagagggaggagggggatacatggagtgatggggcaccccacggaggagtcccacgtrggaaacttccctgaatgactgaagcacaaagagagttcttcaacaactctccatttctcactggcgcactggggagctggatgtggtttttggctctgtcaagtgcagagtgtgggctccaggatatggaacctggcccctgtgcatcgtgaaacagcagatctcagggtcctgtccccaccggaaaggcctggcccaagttggcgtgtgtccaggatgtgtccagcctccagacactaacattttctatgacataacgcataggcgatcatcgtataccattcttgcctggatgctggctcctgtggcctatcacactctctcctgggaggcagttgtgactgccccatctacagacaggagaagcatctctgatctgtggacatttccccgtgagccacaaattaccctgactgctctgcctggtctcctggtgcagaaatgggtgatggccctctcttccctgtccttctcatgacagctctccaccacctccacaatcagtcatcaagtcctgtgcggcctgccacgatggtctccgacttcggtccacaacaagggcaccaggcttcatgctgctctcttgcctctattcccacccctaatctacctgcaacgcagaccttgcgacgtcacttttcgacttakcaagtgtgcactactgatgaccaagggcctttgctgaggagctcctgccagctggccctgccagctctctcccctggctgcccagcccctttctatccctatgccctggcccgtcttgtccttccaaatccctctgacccccagtttcaacctagagagtttttattctaaaaagtattccttttagtagttatatttacccattaaggcctggagccagtggcctggagataaccttccccatcactattgtgtccgggtacaaaatccttccagcttgaggaacatcacaatatcgtctcagcatattttcagaattgttattacagacatgggctggtgggagctggccatgagggcagtctctgttcttcccatgtgttcaccttgagcccacactcttcactttgacagaaactaaaaccacatccaactccccagtgcaactatgagaaatggagagttggtgaagaattcctgggagccagagaagacaacgcatcatggctcaccacgcagccaaacttcatgaactttttaaagcctcagttctccttcccggagtcccttccctggcagctgcttcacctttctccatccttttcccatcacccctcatccccaaatctccgtgttgtccccagcccaccagcacccagcctcagcttccttgttcattggtggttacccaaagaacaactacaagactggtccaaggtccaggaaccctttaaaggggtggctcaggtctccccaggcactgactccaaggcttcccctgtgggcagcccatgggagggtctttatttcactagaaagaaggaactaatgtggatggaatatctgcaatgtacctctcacttccatcatgcaaggcaaagattattctctattttcgatgcagctactgagactcagtccaaggtcacccagcaagccagtggcagaactggacctcaactccaaagcccccaccacctgcaccaccctggtggccttatgggccccagccaaatactatatggaaaaaggtgactcagacaaggtcaccagctgcaaggtagggcccagcgaatggagctggagtagggtgcagaggacggggcaggtgaggccaggtgaagccaaggccagcagccaggtctctggatgtggatggaagagttgagggggcagatgccagagtgtgctatgggcccaggtcaaggtcagaacttgcagggtaggtgggacacggaagaatgaaaaggcggagaaactaatgaactctggccacccgcctggggaagcccactggagggctgtttcttcccacagccaccatgccctctcacttggcctcttggacttatgtagcagggaaatgaagagctttttgaactggaggctcggctttttttttccttttaatggcatggaaaccccacaaggtagtttctgcagccctcacctctggtaactctaaatcaggtgaaagagggagagatagatgggaaggaagagagagagggggagggagaggcaggagaaagagagagggagagggactttgatagagctaactgggcacagctagggagagcaagaaaggggagaggagatggtggaggatgtatgtgggttcgtgatatagaacctggccccaatgtgtggtgaaagagacaggaaaacgggaagtgtgacgtggactcagacgccctgggccatcaaaggcttttaagcaggagggtgacctggtcaaacctgtgttttggagagactccatcttgctgccatgtggggcctgagtggatgagcgggaaaagagatcctgggccaggaagcagccctggggaaagggccaggggagaaaacgccaggccgaagagggagtgagagccgggagcttccacctttagaaatcaggtggaggaggaagagaagggcccgcagcaggatcctgaaggagatgcaagagaggagagaggagggccaggagggggtgttccaaggtgccacgggaagaaggccattaaaggaggaggggaagctgtgaagaacatagccaagggacgtggacactgtccctcggtccggccacagcagttctgccatggatgtgcttgctggaatgaggggctggagacaggtggagagtggaggcaatggaggcagcaagagtggctttcttgcaggtagctcccttgtgggtctggctaggaggagatgagaggagggggccacagctgaagggaacctggaagacccagaaggggcttgtgaaacaggggcgtgtacaagagggcttgcccagaatgttccccaggaggcaggtgctgcctctgccagcaggaagcacagcccatccaccaggaggccaggtggtcactgatgccagcagaggcaagtttggttttgggagtcaggttcaggcctcaaatccgggtctcctgaccccagcaccacaggagagaaaaaccagcaagcaggctgaagtcacacagcctagaagaggtcagggagtggcagccctgaggccacataacccctttttaagcttccagaccttcagagggattggcttggggacaaggcctggcatccatccctcaggagacaggatgcagtactctgcattctgaagccccagcccagctcccagggcctgaagctcacagcatcccagctggattaattatgagattcctgggaggccaaaggagtctgtctgactaatttagcccaaactatgtcctttcccctcctttcctttttcacttcaggaaaccagccctagtggaagccacttgacttatgtgtggtctgcttctgagaaaaatcagagtcacaagccacgcgagatgacagcctagttcccatgaccatgtgcacctgtgcctgtgtgtacaggcatgctcacgtgtgtgcgtgtgtgcacgtccatgcacacagacgagaggcttatctgtgctctctgctgtgtgtgcactgggtttggggagccttggtattttaagtctttattgtacatactggatgtgagctgtgtttgtgtgcaatgtgtctggtatgtttgtgagtgtggtgttcgtgtaggatgtatggatatagtgtgtgtacacggtgtatgctcaatgtacatgtttgtgttgtgttttgcacatgtgtttaattgagagttggatttgtgcaggatgtatgtaaccatgtgtggtgactgtgtgacttttgagggcgtctctgaaatgtctgaatgtttgtgaatcgtgtgtgtgcctacgtgaaattcgtgtatgaggtcgatgcatgcttgttgctttcgtgagtcgtggccctgtgcatctcatgttgcctctgagggtgcatatgaaggatgtgtgtgtggctgtggctgggctgttgttgcaggtgcactatgtctgtggggcgagtgcatgtggctctcatcagcaggtggaaaaatgtcataggggaagggggtgaaaatccaatgtagcagagagggcagccccctcttgcctcctccttgcccctgtagagcctcagcttcccctcaatggataatacttgaaggactctaggaagatcctatggtcatgaggaagctggcaacatgactaggacaagatgggggctctgtgacctgtgcctaagaagaccctgtcccagtgacaactgggtgtgcccaggccttcgccccctcacttgccccttgagggcttccacctgcccccctgaggaacgctgtaccctcatgctgcctacccatactgtccctgaggggcagccacagctacattctaggcaggtttcctccctacatcccctgaccacagccagggaaagcttgaaaaccacttctctctccctgaaacaaaccagcacaaagaccatagctgctgccaaaaccctcaaatgctgaccggggcagggagcaccgcaagctgtgccattgactggtgaggaacagcttaatacaaacgcactcacccttcaaactgccctagtggtccattgtccatggctgccctcactctactgggttcagaggtgaggccaccagcccaaagttacacagcagtgagtggcgcagcgaggatgggaatgcgggtgggtctctctcctaaacccaggttgcttctcttcctccgttctgcccttctcagtcccctcctcaccccacctaagatgggagggggaacacaactacacacagaatgtttagataatttgctctttgggctcattaatgctccttcaagtgacgaaatgatcgagtattcagtgggtaggcgctggagccccactgcctggactcacctgtactggctgtgcaagcttaagttaattactcatccttgctgcatttcctcatgtgtcatctgcaaaatggagctgctgctaataataataataataataataatatctaccttcttgggtgtagttaaggattgaatggcttgcaatatgacagctgcattagaaagctgcctggcccagcctatacccttcccgacttgaaattactcacagtaagaaagattaataatcctgttaaccataacctttacatttcattccttcatttctgcgatgcagtgagggaggggctggcgttatctccacttcataggtgaaagctgggcaactatgacagcaggggccagggcctgccccgagccccaccgcagagcctgcctgcccctcatcatcacggtacttccctggagcagtgcgtctcaaagggtggtctgaggactggcagcatcagcgccactgagggtttgctggaggtgcagattccgggccccacctctgacctactgaaccagactctctgggatggggcctggcaatctatttagccagtcctcagggattctgatgcttgccaaagcttgagaagaactgggctagacctctgaagaggttgctgtgtgaacccaggagcaccccacgtgaggcctgtggaagaaagtggaggaggagaataagaccttcggcccactgtgtgacctcgggccacgtcctcaccctctctgggcctagaatctgtcatatttcttggcatgggattagaggaggctgggaagattctctgaaatttatggccacctctcctcctctatgccagcacccggctcctgtgagtggtgcttttaggagctcatgtgtttgcagccacctcatcctggccttggctcgttgctgtttttagtaccttggagatgacactttgtgacctcacagaccataaccaaagcccaaagtgataaacactggatcatcaagaaaagggtacatcaggtttaacctttaagcagttaaaacagaggaaaaagttgcatggctcaaaggcacaagacctcgggttcccagcagcctggtgctgcagaaagctgcggtttcatggtccacagctcagcacagcatcaggttgtggagacacttctgatcctgccctgcctggtccatccccccaactcccttggggcctctgggagcctccagtcccttcagtcacagtagtcactgacgggactctgaaccaggagcctttcgtgtggtggctgcggggtatatggggtctcaccagcacctgcttcccctgccttggtaacgctaagtgctgccatgagggggtgccttgtgcctccatcaagaacagaaaacccgcagagtaagtcctcattctctggccacgaatgaggacttggagcctgaggacttggatgggcatgcccactgtgtctgctgtgtgaccaccagcaagtcatagagtccctgcaggcttcatctctcttctgtaaaaggggggcagagataggcctcccctcgtcagatggctatgggcaggggataagtaaagaacctggccccaggcctggtcctgcaagcccttgatattcccactcaagagaccagctactccccaccactgggccattcataacatcctcctgcccctccaggaggtggcctagagctggtgtggcctgagtccatttgccctagggagaaagggaggggagtcaggggaagaactgggga

SEQ ID NO: 93409 - DNA, 14305 bp, Homo sapiens
ctgaggcaggagaactgcttgaacccgggaggtggaggttgaggttgcggtgagccgagatcacaccagtgcactccagcctggatgagagagtgagactctgtctcgaagaaaaaaaaaagagcctatgtatttaaccagtattcaatatatcagtacgtatcattatgttcacaggatctagtgttaccctggacataaataatcaatcagtattgaaacacattttctgaacacaggttaagtcaagtaaccaattccagtgcagaagtgtttggcctctccaggtctctgccaattcctggcagatgactgagaaacaaatctttaaagtcaggaaattacttgtcttttcaattcagaatcacaatttcagagactgaagggagtgtagtttttaacccattcccctcagtagagtagcaaccagaatgggatgcccacaaaagatactggcaactaattttatatagttatctaaatacaagatcttaatagaagacttaatacaagaccctgaaatcgtctgctgaactgaagaggattacattgtcacttccaccacacatttcccctgagcctctcattctcattcccaagttcccaaccttctctcaggtcctatttttcctactccatgcctaccctcactcactccaacaccttcagtccagctatatattacttgctgccttaactaaatttactagcgagcttccccgacttcttcaaccttctgtgaatgctgaaacccctccacctaggcctctttcagcagctggggtggggaggtggatgggaggggagtaactgctcagctttaactctgccctgcaaaaaccgtcactgcacttcagacctagaagcagcacttctttcaagaggaccctccttccttccaaacttcccctatagacactgcttgtaactgcagcatgacggcatagaaagggaacgatttaggaggcaggcaatctgagttccaattttagatctaccccttactgtttacctttttgaatccgtttcttcatctgtcaaagagatagcacaactacgcattctcaaagggttatgacgaggcttggaagcggggggcgtacatgaaatgttggtcttcatccctccacattatgcaacctggtattattcactgcgctgttattacggaactcctctggatcgttaatggaggtcagagaacctgaattacaacctgtctgtccctgtgccccctcccccccaacgtttatggcgcagacagaaagcagtcaggggatgcgtgttgcctccaggttgatgcgaacctagggcaggagcctgggcgatcgatcggccagggagtggggggtcgtgcgggcggccgaacagccgcggcttggccccagaccgcactccgctgtggcgggcttcgatttcctcttgcgtaaaagtaggtggtgaccaaatgcttagtcctctcccggccagcctcagctcagcgatccgacccgcacctccgatcccgagagcttccattttactcgtcctcgaccacacttctcccccgacaactgtcaccctgaccggcgccgcccaccccyaggcccctccgagcgccgggctgccggcagtccccccgggaaccgccctgggagcccgcctcaggcccgtactcacgcccgctttggctgtggtcgccgcgggtttcttctgcgccgcgccggccgagcggagccgcctccggccgatgtgctccagactgaggaagtcactggacaggtccaaggagcccgtggccgaggccgcggagtggttgtgcagctccaagctgctgcggagaaccaccatcttctctccctactggcctcggcgtgcgcgaccggagagagatccagctccaggcgctcgcagctctggctcttccgcgctccgaattctggcgccacaagctccgcgccagcggccgcagcgcgcgcgcccagaatccctccgccgtctgtcccgcccacgccaccaccatagaacagcaggctcgaaactctcctcccatttgtagagcgaaggaggccgggccaacgtggagaggaacacaggccgacagtatagaggacctgagcggagagtcctggggaaaacgctgacttctttttcttcacatagttccggctcgctgagctcggcggaaggagacggtgggagcggtgcgtagcccgtttggaattttggcgcgggacggcggcgggggaagggaggcctctgcgcgctctgattggctggtggggtccggcgtctcctccccacccctgttgacacctgcttgctgcttcccgccatccaggattcaaatgcaaaatgcccagtccttgactggagggaaataaagcacttggcctttgacaggttttgactttgagccttaagaactttttttttttttaaataattgagggcttgacgaaaacaagttaaccaccaaaaagaaagaaaacacaaggagctaaaagcgagccagcagagtgccatcgtttagttaaggacgcgggttctgtacccatctttgccattgatcatcccacatagaagatctcgaacaaattattcacctccctgcattctaatttcctcacacgctgaggcaggagaatcgcttgaagccgggaggcacaggttgcagtgagccragatcgtgccactgcactccagcctgggcaacagagcaagactctgtctcaaaaaaaaaaaaaaaaaaaaaaaagaacctgtttcaaaaaaaagagcaggactcccagttaaatgtgaagttcagataaagaacaaatactttttatacgtatctcggaatgtacatataatcggaaagtaactccgattgtaatacctaaggccctaaagtactattatgataccttggagccgtgcttgcacataataagtgctcaataagcgttcgctattatcacagaatacaagaagatggcttctctaagatggcagttacttgactactttgaaataggtaacacgctgaatgatcagaatgtccgagggctcttagcgaaataaacgaaagctatttattgatttggataactacagttcattaatttaatatttgttaaatacatattgagcctctattatgtaccaggcattattctaagcactggggatgcagcagtgaataaaaagaacaaaaatgccctaatggaacttaaactctagtggaaggtgaaagacaataaactaaatgtaaaagttttaaagtggcaagcattacagagaaatataaagtagggaagggggagggaagagtgcaatttaaaatagggtgattagggaaggtctggctgagaagtctgacaaaggcctaaaggttagatggttctggaagaagagagaggcgggaagcaggaaggggagagtggcgaggccaatgagaacagagccactgggagcaggtcctacgggactctgggtcttagtttgaaacttttgagggcttttattatagcccccaaattcccatccaaaccctgagatgaaaagacatctcagggttttgaacagaggtttgacttattccgactttaaaaataatctgcgtggctgctgaatgaagaatgcaatgtctggggacatataaaaagtatttgttgtttatctgaacttcgcatttaactgggagtcctgctttttttttgagagaggttcttgttcttttttttttttttttttttttgagacagaatcttgctctgttgcccaggctggagtgcagtggcatgatctcagctaactgcaacctctgcctcccgggttcaagcgattgtcctgcctaagcctccagagtagctggtattacaggcgtgcaccaccatgcccagctaatttttgtatttttagtagagatggggtcttaccatgctggccaggctggtctcgaactactgacctcaggtgatccacctgccttggcctcccaaagttctaggattacaggcgtgagctaccgtccccaggaagacagattattgttctgtcacccaggctggagtgcagtggcgcagccacggttcactgcagctttgacctccagggctcaagcaatccttccacctcagcctccctagtagctgggaccacaggtgtgtgccatcacacctggctaatttgtttttagagacggggtctcactctgttgcccaggctggtctcaaactcctggcctcaagcaatcctcccaccacagcctcccaaagcctgggattacaggtgtgagccaccatgcccaaacaatttttctgatttttcttgcatgaatatgcttcacttttacaatagaaaaaaactttaaaataattgtttaaccaacataggtgaaaaagaaaggaacaatatttaaagtagtacagtttaaaaaatttaaaaagtagcagagtttactattacttggttttaaaatactatttatggctgggcacggtggctcacgcctgtaatccccccactttgggaggccgaggtgggcagatcacgaggtcaagagattgagaccatcttggtcaacatggtgaaaccccgtctctactgaaaatacaaaaaattagctgggcgtggtggtgcacgcctgtagccccagctactcaggaggctgaggcagggggattgcttgaacctgggaggcagaggttgcagtgagccgagatggcaccactgcactccaacctggcgacacagcaagactccgtctcaaaaaaaaaaaaaaccacacgactatatactgtatataccatctcatttgatttgtttattcaggaaattttaattgagcccccatcttattctaagcatagttagaggtgcagggagtaaagcagtgaaccaggaaccctaggttcatggagcttacattctaagaggtactcagtggataaacaaggaagtaaataaacaaggtaacttcattatagcaagtggtataaagaaaatgaaacagggtcatgtgatacagagtggttgaaggaagaggagagaaacatacagtggacttgaaaggtcaatctgaggccaggcggggcggctcacacctgtaatcccagcactttgggaggccgaggtgggtatcacctgaggtcgggagttctagagcagcctgaccaacatggagaaaccccatctctaccaaaaatacaaaattagccgggcatggtggcgggcacctgtaatcccagctactcaggaggctgaggcagaagaatttcttgaacctgggaggcagaggttgcggtgagccgagattacgccattgcactccagcttgggcaacaagagcgaaactccatctcaaaaaaagaaggaaagaaagaaaggtctgaggccaggcatgtgtcacacctgtaatcccagcactttgggagggcgaggcaggcagattgcttgaggtcaggagttcgagactagcctggccaacatggcaaaaccttgtctctactagaaatacaaaaattagccaggcatggtggcacacacttgtaatcccagctacttgggaggctgaggcaggagaactgcttgaacccgtgaggcagaggttgcagtgagccaagatcatgccactgcactccagccttggcgacagagtgggactccagctcaaaaataaataaataaaaaagaaagatcagtctgaggaggcgacattttagatgacacgtaaaatatgagaaggaatcagccgatcaaaaaattggcagggttttccagagaatgggaagaacaagtgcaaaggccctgaggtaggaagtccaaaatagttgaaaatgcttccagaacttcaaagatagaattccccagggagcttattaaacacactacacaaagccaggtgtggtggtgcgggcctgtagtaccagctacttgggaggctgaggtgggaggatcgcttgagcccagcagttccaaaccattcgggggaacatagtgagacccagtctcaaaaaaatagcctgccctggcaggctggcagccgagcgggtgtttatgttgggtcgccgggtctctggcagcctgacagactacctgatgagccagggcaccggctgcgtgcccgaggacgggctcaccacgcagcagctcttcgccagagccgacagcctcacctacaacgagttcctgattctcccaggattcatagacttcatagctgatgaggcggacctcacctcagcccttacctggaagatcacgctgaagacgccgctgatctcctcctccatggacactgtgacagagggcaacatggccatcacgatggctctggtgggaggtattggtttcattcaccacaactgcaccccagagttccaggccaaggaggtgcggaaggtcaagaagtttgaacatggcttcatcacggaccccatggtgctgagcccctcgcaccctgtgggtgatgtgctggaggccacgatgcggcatggcttctctggtatccccatcactgagacaggcaccatgggcagcaagccggtgggcatcgtcacttcccgagacatcgactttcttgctgagaaggaccacaccaccctcctcagtgaggtgatgatgccaaggattgagctggtggtggctccagcaggagtgatgttgaaagaggcaaatgagatcctgcagcaaagcaagaaagtgaagctgcctatcgtcaatgacgatgatgagctggtggccatcattgccctcaccgacctgaagaaccgagactaccctgtggcctccaaggattcccatgagcagctgctgtgtggggcagctgtgggcacctgtgaggatgacaaataccgcctggacctgctcacccaggcgggtgtcgacgtcatagtcttggacttgtccgaagggaacttgctgtatcaactgccatggtgtattacgtcaaacagaagtactcccacctccaggtgattggrgggaacgtggtgacagcagcccaggccaagaacctgattgatgctggtgtggacgggctgtgtgtgggcataggctgcggctccctctgcatcacccaggaagtgatggcatgtggttgcccccagggcactgtgtgtacaaggtggctgagtatgcccggcactttggtgtgcccatcatagccgatggtggcatcctgactgtggggcacatcaaggtgccggcccttggtgcctccatagtgatgatgggctccctgctggctgccacctcggaggcccccagcgaatagttctcagatggggtgcggctcaagaaatactggggcacaggcttgctggatgccatggagaagagcagcagcagccaggcacgatacttcagtgaggaggataaggtgaagatcacacagggtgtctcgggctccatccaggacaaagggtccattcagaagtttgtgccctacctcatagtgggcatccagcatggctgccaggatatcagggcccgcagcctgtctgtcctttggtccatgatgtactcaggagagctcaagtttgagaagcgtaccatgtcggcccagattgagggtggcgtccatggcctgcactcttaggagaagcggctgtactgacagcagtggaggccgaggtggtggagggggcaccccccagtgtccaccttcgggcatagcctccctccatcactgagtggtccacagatttgcactacgggttccccagctcctttccagggagagaggaggcgaagttgtgaggggtctgtgacccctcgctgggcatcccctgcagagtcaggactgctccctgggccaggctgccctgggaggcccccagagcccagccagctgggctttcaggccctacgcctgcttcaggtcttgctgcagcctgctgcagcctggcccccaccccaggggcaggcagcccctcctggcttctcctgtagggcacttccctgcccccagtcccccaggaaatggtgctctcctggccctgcctctggcctactgccccctcagccatgtggcacttctgagctcctgacctaggctaaggggaggtctctgcccccttccccggccctgggctacccttgggtcctgctcctcaggccactcccctgtccctggccctggggagaaggctgctctggtcatggctgcctgcccctcattcctgactcaccaccgtccccaggtgtaccattcctgccctctcctcagctgtagttgaaggctttaactttgcacactttgggatcatagttgcgtcattgtgtattaaataatcagaataaatcaagcaggtctcaatgccaataataataataataataaaaataaaaatcaacacactacacacagcttcaggtgcctcctctaaagatcctgatttcatgcgtctgagataaggcctggaaacttggatttctttcaggaagtctcctggtgattcttatccacagagtgatttgtgtcgcgctgttctggaatgtgacgaggaaagagttgattgctagagaagtagctactgagaatagaagggtatgcatgggcaagatggcgcgcttcaagagcacaatagagaggggttttgttgttgttttgagaaagggtctcactctgtcacccaggctggagtgcagtggtgggattttagctcactgcaacctccacctcccaggctcaagagattctcccacctcaacctccaagtagctgggagtagctgggactacaggggtacacctctgctcccagctaattttttgtatttttcgtggagacggggttttgccatgttgcccaggctggtctcgaactcctgagctcaggtgatctgcccacttaggcctcccaaagtggtgggattacaggcgtgagccactgcgcccagccaggagggtttttttttttttttaaacatttattgatttattttagagacagggtctccctatgttgcccaggctgcagtgcagtggctattcacaggcgcaatcacagcttgctacaacctcgaactcctggattcaaccaatcctcccacctcagcctcctgagtagctgggactacaggcatgcaccaccacgccaggatgggagtttggttttgatccatttgcaaagagcagctgtgaaaggacagcaaaggaaagaagtcacatgattggctctttggtgagaatgattggaagtagcaagaacagatgtagaatgaaaaactaggaggttactgcactgtcctggtgagagaagatggtggcctggactagtggcagtgagcagatgcgaaatggacatagatgggggatctatttcagatcacagcctacagaagatcctgtctgccttcaacagaaggactttgtctaggtgtgctgttgacataaagtgaccttgtgaggccatccacaggaagccacaccagcaggaggggaggctattttagctggtcagagctgagcagactaaaaaggcaacatgctttacagtgattattttagacacctgctacaatcagaggtaactctcttctctgggctaaaccaattaggagttattaacttttctacttacattgtatttatttttcaagatgtagtatattcatatggttaaattttaagttacaaaggagcatatggattaaaagtctccttcatatgcccgtttcctagccatcttgtcacccttcccatcagcaaccaaagttattcatttcttgggtatccttccagagttatctatatcaggtatgttcatttcctgaggctgctgcaacaacttaccaaaaacttggtggcttaaaacaacagaaatttattctctgatggttaaggaggcaagaaatccaaaatcaaggtgttggccatgttgcttccttctgggggctctgagtgagaatctattccatgcctgtctcccagctgctggtgtctgctgacaaccttcggagtttcttggcttgtaggagtgtaagtccacactctgctttcacatcatatgtccttctttcctgtctttttgtgcttgtactcaagtctctccccactttctctctcttttttttttttttcttttgagatggagtctcgctctgtcgcccaggctggagtgcagtggcgcgatcttggctcactgcaacctctgcctcccgggttcaagtgattctcctgcctcagcctccagagtagctgggattacaggcgcccgccaccacgcctggctaatttttgtatttttggccaggctggtcttgaactcctgacctcatgatccacccacctcggcctcccaaagtgctgggattacaggcgtgagccaccgcgcccagccccccctttctctcataaggacgtcagtcattgaactatttagagcacaccctgaatccagaatgatctcattttgagatcttagttatatctgcaaagaccctgtttccaaatcagatcacattcacacataagaggggggttgggacttgaatatctttttggagccactatttaacccactaccctaggggctggcaaactttttctgtaaatggccagagagtaaatattctaggttttgtggatggtatgatatttgtagcaattactcaatcccatggtagtgaaaaagtggccacatacaatatagacacaaatgggcatgattgtgtttcaataacactttatttacaaaaacagatctcaggctgtatttgtcccaaggaggtcatagttttctttttcattttctttctttctttttttttttttttgagacgcagttttgctcttgttgcccaggctggagtgcaatggtgcgacctcagctcactgcaacctctgcttcccaggctcaagtgattcttctgcctcagcctcccgagtagctgggattacaggcaagcaccatgaagcctggcttttttttttttctttgtatttttagtagagatggggtttcaccatatcggccaagctagtctccaactcctgagctcagatgatctgcccacctcggccttccgaagtgctgggattacagacatgaaccaccacacctggctagttttctaacctctgatttatactatacaagtaagtatgagcatgtgtttgcatgggtattaattttcaccctgtttacacaaatgtagcatactgtacactctgttctgtactgtgcttctttatctaggtcttagtgatctttccctgtgagtacataaagaacttcctctctttgttcagcaacatcatagtccactctgtggacacaccgtattttatttaagtagacctttcttgctgaacatttgtttccattctcttgctattgcataactgctatgaataaataggttcaaatatcacttctacattgtatctgtagaataaatttctagaagtgcaatggctaggtcaaaaactatgtacaacaactagatgcaataatatgaataaatcttacaaacagaatattaagcaaaagaagcctgaataattccttttatattaagcagaaacacagacaaaactaacttttgctgttagaagtcagaatattgatattcttggggttataaaacatgaaggcagcctgggcatagtggcttatgcctataatcccagcactttggaaggccgaggcaggcggatcacttgacaccaggagttcgagactagcctggccaacatagtgaaactgtgtctctactaaaaatacaaaaattagttgggtgtggtggcacatgcctataatcccagctacttgggaggctgagacaggagaattgtttgaaactgggaggcagaggttgcagtgagcccagaagatcacaccactgcactccagcctgggggacagagcgggacactgtctcaccaaaaaaaaaaaaaaaaaaaatagttttaataaaattaaaaaaaaaactaagcaaagaaatcaaaattccagaacactaacagatggccagccaaaagcttttctctattcctttattctctctttataatattaaacattaaggaattaccacactggagccgggtgtggtggctttagccctcccaacattttgggaggccaaggcaggaggatcctttgaggccagagattcaagaccagcctgggcaacatggtgaagccccatctctacccaaaatacagaaattagccgggcgttgtggtgcacgccagtactcttggctgcttgggagactgagtcaggaggatcacttgagcctgggaggtggaggctgcagtgagccgagatctcgccactgcactttagcctgggtgatagagtgagaccctgtctcaaaaaaaaaaaaaaaaaaaattaccacactggctttagcttttggttggattagtgagttgaactgtgcccccataaaggatataaacctccccttgtgaatgtgatctgatttggaaataggatctttgcagatgtaattaaaatctcgacatgagattattctcgtttatggtgaaccctaaatccaatgactagtgttcttataagggaaagcatagagagattggtgcatacagacacagagaaggcagtgatgtgaagacaggcagagattgcagtgatgtgtttataagccaagaaatgccaaggtttgccagcaaccactgcaagccaggagagaagcatggaacagattcttcctccaaatctccagaaagaatcaacctggctgacgctttgatttcagacttccagactcttgaactgtgagagaatacattcctggtttttaaaggttaccaagtttgtggtaatttgttacatatagcacccctgggaaatgtatatagtacagttggtctgggattggtcttctcttggtgaccagttctatcttttctaatcttaactattctagttaggagtgacttgatttaggaaaaaaataataataaggcagtagaggctgggtgtggtggctcacacctgcaatcccagcacttcgggaggctgaggcaggtggatcatctgaggtcaggagttcaagtccagctgggccaacatggtaaaaccccatctctactaaaaatacaaaaattagctgggtgtggtggcgggcgcctgtagtcccagcactttgggaggctgaggcaggtggatcacttgagatcaagagttcaacctggccaacatggcaaaactccatctctactaaaaatacaaaaattagctgggtgtggtggcacacgactgtaatcccagctactcgggaggctgaggcagaagaattgcttgaacctaggaggcggaggttgcagtgagccaagattgcgtcactgcactccagcttgggtgacggagtgagactccgtctcaaaaaaaaaaaaaagaaacggaggttcttgttggtaacccctaattgcttcagaaagactcaagtgttcttacttcatgtgctacagaaacgaggctcaggtaagagctaatcatgattccactacctcatttgggatgaggtcataggtgggtccctttctgttctttggtagcaaaattagaaagtaaacattaatttggactgggatttcttttaggaatgttgcaaatgtgagcttacttaaattgtataccaaatcttattgatttcccacaaaagaagaaaaaaaattaattgaatggaggtggggagacattttgacatttgccatatattagctattctattccatgttttaactatatcccagattccccttctgtctgggagatttttctctttgggtgggtttggtttaggcagggcccagcctccttctgtggaaatcctacagggaaatacacttcatttccctggaaacctggcaataaggattcaggcatgtgaacttggaccagccaatgggctgctcctatctgaggcatttatttcctctgggaggaatgacccaaagatgcggggcagagattattcatggtggcagagcaaaggatacagagccatggcattaatggtggtctcccctcccgtcccctcccctccctttcctttcctttttgaggcagagtttcactcttgtcgcccaggctggagtgcaatggcacgttctcggctcactgaaccctccgcctctggggttcaagctattctcctgcctcagcctcccaagtagctgagattacaggcacctgccaccatgcccggctactttttgtatttttagtagagacagggtttcaccatgttggccaggctggtctcaaactcctgacctcaggtgattcactcgcctcggcctcccaaagtgttgggattacaggcgtgagccaccgtgcccggcctggaagatatattc

SEQ ID NO: 93410 - DNA, 54858 bp, Homo sapiens
atggaatttttgtattttttgtagagacaaggttgcgtcatgttgcccaggctggtctcgaactcctagactcaagcgatcctcccgccttggcctcccaaagtgattacaagcatgaaccatgcctggccagaaattaaaactattatcaatgttaataaccattattccaacaatcatttttgacataaagacaaatagcaagtcagatgaatgtatggatggctagacgaaaataattttcctaaaataggaaaattcactaatatggtaattaaaagtcttagaacaaatttttgtacaaattaacagaaggaatgttaagtataagtgaagcagttactggatttttttttttttccttcttttttcttgagacggagtcttgctctgtcgcccaggctggagtgcagtggcataatctcagctcactgcaagctccgcctcccgggttcatgccattctcctgcctcagcctcccaaggagctgggactacaggcgcccgcaaccaagcccagctaatttttttttgtatttttagtagagacggggtttcactgtgttagccaggatggtgttgatctcctgaccttgtgatccgcccacctcagcctcccaaagtgctgggattacaggcgtgagctgccacgcctggcctggacttttggtaataggttctttacctaagaggcccaagtttctgaaaggtgcttctgctattaacagaaaataacattctttctgtgtttcagttttagatagtatgcatctggctccttaccatagtagataaggaaatttataccctattcctaccttgaaatatttcagtatcttttttgttttttgagacggagtttcacccaggttggagtgcaatggtgctatctcggctcactgcaacctctgcctcccaggttcaagtgattctcctgcctcagcctcctgagtagctgggattacaggtgcccaccaccacacccagctaattttttatatttttggtagaaacaggtttcactgttgttggccaggctggtctcaaactcctgacctcaagctcccgacctgcctcggcatcccaaagtgcttggattataggcatgagccaccgtgcctggacccagtatctttttttttttttttttttttgagatggagcctcactctgtcgcccagcctggagtacagtggcactatctcggctcattgcaacctctgcctcccaggttcaagcgattctcctgcctcagcctcttgagtagctgggattacaggcgcccaccaccacgccctgctaatgttgtatttttaatagagacggggtttcgccatgttggctggtcttgaactcctgacctcaagtgatccgtccacctcgacctcccaaagtgctgggatttacaggcatgagccaccgcgcctggccagtatcataattatcacagctatttggatagccttagttctatgtgtaaatggattcagtgtttatcaccactcttagagtgagcttttttattcctgttttattttgattctttttgcagtagctggattttctcaagtaatagctttaaggagggctcagaggtatcttgcttcagattgtgcatggtaatgtggcttcatatttgaggggcaacccatgtataaaatttttaaatcccactttctcttttcagaaccttgtatagacccctgtgttgtcttctgacagtgaaagccctgccagccctttgccctggtgcctcctgtcatttcttggtggttcagtctcactgggaaatatatttttctggaagggcttatgggcattctagtctctgagatttttcactcatatagaaatgtcttttgcatggaatgtagctttgtagaggtatgagggtggtctgattttttccccctttgtgactaacatttttgccacaatactgttagcagcggtgaatctgtaggggtctgtagcaacctcagttcttgcctcctccgaagaaagaatttgaccgaggcacataagacagaggagagaccgaagcaaattttagagcaggagtgaaaacttactaaaaagttttagagcaagaacgaaaggaagtaaatatagttggaagagggccaagcaggcaacctgagagattcaagtgtccatttgacctttgacttggggttttatacttcccgggtcttgggttacttctcttgtttcttcccttggggtgggctgtccacatgcatagtggccctccagcacttgggagaggccgcatgcgcagtgtgtttactggagttgtagacttgctcacttgaggcgcttttcccttaccagtcagatgctcctagaggaatgtcatataccagttaaactctgccattttttcatttttttttttttttttttgagacagagtctcactctgttgcccaggctggagtgcagtggcacaatctcttctcactgcaacctgtgcctcccaggttcaagcaattctcctgcctcagcctcccaagtagctgggattacaggtgcctaccaccacgcccagctaattttttgtattgttagtagagacggggtttcaccatgttggccaggctggtcttgaactcctgacctcaggtgatccatataccacagcctcccaatgtgctgggattacaagcatgagccaatgtgctgtgcccagccaatgcatacatttttaaacaatgtatttctcctttgctgctgcaaatcattgcctccgtcatcctcttgactcctgcttttctgttctaatatcaggagttcttattgcttatgttttcttggtatctttttttaatggctttattcattgataattttctgtaaactcttagggtttattttatattttttgcctgaatccttatcctttctcggcagtagtgtgtcctatgatatatatttctctcttctttttttttttttttttaagacagggtctcgctctatcacccgggccagagtacggtggtgcaatcatagcttattgcagcctttatctcctgggctcaagtgatccttctgccttagtctcctctgagtagctgggactacaggtgtgcaccgttacacccagtgaatttttttttttttagtaaagtctcactgtgttgcccaggctatatgagatatatatatattttgtttgtttgtttgtttgttttgttttttgtagagacaggtgtctcactatgttgcctaggctgggctcaagctgtccttccccgtcggcctcccaaagtgcagggatcacagttgtgagccaccgcacctagccaaaagctatgtatatcacatgaaccatgtagattaatatagattttcaacatcagatagctagacagttataatgaacacttgctgaaatttttgtttatttttaaagtatattttcctgccactttaaattaattttgcttttttgttatcaatattcacttattataggatagactgtgattctgttatagctgaaagcagtaagcactgtttttgctttacctaattactttttcagcttataaggtaaaatcattccttttagtaacatcagtctcataactctttttgctggaagcctgaatatgtggtatttttcaggtctttctgtggaatttggaacaattctagtttacacatgtgagaagagttgctggcccccaaatcatcagactcccatggaagaattttgtattatacaagaagacccagatgaattattgtttaagtagagcatttccttttattaatataaattaaaacaaatgtttacatccaaatatgtttgtatgtaccttattttaactcacaagttattaacctctgtttttctgagttgcctttttgcctttgggtgctggtgccggggccggggccgggccaggacctcctgactgtgggttggtctgcccttccagggtccagggccagctgtcacagtggcagctaggaaggtagctcctctctagtccagagggctggtgttgtctgcacagccgttctggtgggcattctaggggggaggagagcagcgaaagagccaagagcagtggtcagcctcttgtgtacacctctgacacgtgcactccagtgcttcctatgctgtttctggcacctgatcaagccactgaacctgctctagctgctggaggtttttgctctgtgaccctggctgtttagacctgcccatgttcatcagcccaggtccccgccctcacccactcccatcttctgctcctgcagtatcccaggaaggggtctttactccgttctggagactgtccctttatccagctgccttccagtcttcccctttctttatttttaacatgatcaaccccttcccttcagccccataacagcagtataaaaacactcccagccatgttcagacatgctctgcctacgtagatgaggataatgaggcctaggtgatcatggggtgggcttgtttcttgcatttaacattatatttggagcattttcccattaatatttttcccacaacataatttataattgctctattttttaaatatacatcaaaagctttatacaatttttagccacttgtattttccaatttttattcccatgatggccatccctgtaactaaatttatatatattttaaatcaatgataactgctacaggacagtttcctagaattggaatgaatgagtcaaaagttgtgcacaattttagggtttttttttcttttttttcgagacagggtcttgctctgtctctcaggctggagtgcagtggtaagggcatagctcactgcagcctcgacctctcaggcttaagtgatcctcctgcctcagcctcctgagtagctgggactacaggtgcaagccaccacgccctctagagaagctttgctttggaatctttacctggagtgtgttggagtgcttgtttcccaatcccttgataagtgttacttattttttctttctaccagtttagtaggtgaaaaacttttttttttttttgagacagagtctcgctgtattgctcaggctggagtgcagtggtgcaacctccgcctcctgggttcaagcaattctcctgcctcagcctcctgagtagctggggctacaggcttgtgccaccacccccagctgtttcggtgtttttttttgtttgtttgtttgtttgtttttttgagacggagtctgttgcccaggctggagtgcagtggcgcgatctcggctcactgcaacctctgcctcctgggttcaaacgattctcctgcctcagcctcccgagtagctgggattacaggcgcacgccaccacgcccggctaatttttgtatttttagtagagatgggggtttcaccatgttagtcaggctggtttcagaactcctgacctcgtgatccacccgcctcggcctcccaaagtgctgggattacaggcgtaagccaccgcgcccggcaggtgaaaatcttaccattttgcatggtttacatttttttcttttttgagacggagtcttgctctgttacccagcctggagtgaagtggtgcgatcttggttcactgcaacctccacctccagggttcaagcgattcttttatggtttacattttaatacgcttattgatcatattgtccaattttttgtgagtttcctgttcacatcctttgcctatatttttttgggggtgacacttgttaatttgtaagagctctttacgtatagggacatcagttttctaacctgtaaggaagtcttggctgggagttgaaaccccaggctagaaggcgacccttagactttttaggtctgatggcgggcctatgctggtgtgggaataacaccgccggtctcagctggaggtcgccagccctttgcaagagcctgccggtccccgcgggctgcagcacaccccggcgcgatgtgccctgcctgtgtctgccggaggctgtagtgcgcaggagcggaaaccaggccgcccttcccccacccgcttccggccgcggctcggttctmccgcctccgcctccgccgcggctcgtggttgtcccgccatggcactgtcgcgggggctgccccgggagctggctgaggcggtggccgrgggccgggtgctggtggtgggggcgggcggcatcggctgcgagctcctcaagaatctcgtgctcaccggtttctcccacatcgacctggtgagggccgggcgcgcgcgcgtgaatggcgggctgtggtgcgggggctgggattcgggggttccggggctccaggggctctgaggctcagggcccggagcccgggaccggagttgcggagcgggggcaggctgagaggctcgggttgtgccccccccgcgggaggagactgttctttgggcacggggcgggcctccgctcgctgggccggctccggacgccgaggaggccgcgggcccccgcctccccggcagcgccaatgtgtggcgcttcgtgggcgtgaagccgcctcttatcctcccttcaaaacaaattcccggctgttaggagatgcgggagaggattgagtccctcgcggatgttgtgactttaatttkgaggtccctgtcgtaactccgaagtaacgacgcggggcggaggatggcaatgatagcgaccaacgcgtcccgagcgctggtcacgagygggtttacacacggaacgcgcaccatcttcataccacccgaggagtgcaaacgctatttccaccctgctttatttttaacagatgaggaaagggagacgcaatggggttgagtaacttaccctgggtcacggagcgagtggcagggctcccgcaggctgcgtgactgtcattgctctcacagtagacggtacactcgcttgtttcattaaagacgttaggactgtgccttttgcattggtgtacgttgacaagccagtgctattttgaatcgttatttctactaatgcaaactttttagagattggagatgttactggcccttcggtgtgagtttaaagtgtcttaagggctagtggaaacatggaatgaacaaaaaagtacgggtggccgactgagtcattgtttctttcctttatgtattatatatttaagcaaaaattagataaaacttaaaacatgatacttttttaaccatgtgtaaaagtttcctttcacagttctcaggttaatagtaaatgaaattgtgtatggatgaaggcttgaattaagggaggcagcaaaaattcaataaacgtttgccatgtatcatttaagaaaaagaacagaacctgggcaacatagagaaaccccgtctctacaaaaaaagaaaattagcggggcgtggtggtgtgcgcctgtggtcccagctacccgggaggctgtgtcaggaggatcgcttgagcctgggaggtcgaggctgcagtgagctgtgtttgcaccactgcactccagcctgggcaacagagggagaccctgtctcaaaaaacaaagaaaaagaacagggcatagttaaatttaatattttgtacttgaaagagtaattcgattgaaagagaaatactttagtattttttgagacagggtctggccctgtcaccctggctagagtgcagtggcccgatctcggctcactgcaacctccgcctcccaggctccagtgatcctccacctcagcctcccgagtagctgtgactacaggcatgtgccacctaattttattttttctatttcttgtagccaccagggtctcactattttgcttaggctggtcttgaaggtctgggctcaagcgattctctcactttgtcctcccaaagtgttgggattacaggtatgagccaccactcccggtgtagagaaatatgttaatatattttcagttagtgtttacctcgacagcrcatatagttttaatgaattcacatatttttatggcatccagggagtttcctgaaatattttccaggatgattaaacaaacaaaatataccattctttcaaagtatttttgagaagtttatctctgacattaaatctagattcttacatgcattaaattattctttatcagtttaacaattttggtatggcgattcgaaaaacgctttctccactaatgtagcagatatcaaaagttctggattacaggtgctgagagtagtgatacagctcaaacatacgtaaacgtttgtcatttatctggggtttatgcatttgtagattgatctggatactattgatgtaagcaacctcaacagacagtttttgtttcaaaagaaacatgttggaagatcaaaggcacaggtaactatatttctcataccatttctataacttgatggagcttctatttgtgataccagattaatcctgcctgtcatataggagggaaaaaatgggtgaagctctcatttcagctgagagattgtgaaggataaagatatatcaagtaaaggactaaagattaagccctccttttttgttctaaaaaggaaataatcccgtgatggtgtaactttcatggcctctttatatttaagtttctgatgctttgcttaggatgcaccttgtgttcctacaccccctagaggttgactactgctatgtttgggggctagaggagcgttatgctgctgtcctagttgaaacaagacagttcccccgatctttgtttagtttttttagtgttccttggtgattcagagtcttaaaacatcttttccctttgcctgtctcccaacctgtttggcaaacccccacttgtttctctttttctttcatattttggcttcctcctccaggagtactttcctaaaccttttagactaagtcaggttggtttttctctcataacaacctttactttacttttcctatcattttcttttcttttttttttttttttttttttttagagatagggtctcactctgtcgccccaggctggagtggagtgatgcggtcatggcttactgcagcctagaactcctggcctcaagggatcctcctacactggcctcccaagtgctgggattacaggcatgagccaccatgcctggccttttcctgtcattctcatggcatttatcagagtctgtagttgaacttaatctggattgttatttgattaatgtctctcttgcttgacatgtacgttgtatagttcctggtacatgcaagatgctcagtaaatacttgttaagtgaatgaatgaatgacacttggttacttcatgttgtatttttgctgaagcttgccattcatgtagaagtgtgtttggtggtacgtgggtcagggggggctctccggttattttataagtrtaaaagtataattttataagtgtagcttaaccctaatgcaattttctcacatttttggacttctttggtgtttaatataaataaggtactatgtaagtagataacagcattgtggcttccagaagcagatttcagataggaacagaaatattgtagtaattcagtgttgtttatttttccaggttgccaaggaaagtgtactgcagttttacccgaaagctaatatcgttgcctaccatgacagcatcatgaagtatgctatagtgattacattgcaaagttgtataaagagggttttgtaagccaaatatataagctcaaagtcattcagcttttttaaaaaaaatgatttttctagaattattaaacagtggtggtttctgcttacagagtggcattctttttaccagttcataaatacatggtttgaatgatttagaatggtgagatagtttaatacttttaataaataagttacttggaaatttataaagaccttatatgcttgccttaagtaagaagatattttaaactatgaaatatccttatttatgatgattcagacttttctaaagtgtttgcctttttttgtttaaaagtttccctcccaaaataatctgtagtatgactctgacttctgtaatataacacttggaattgtggtagggcagtagtattgacagtacataaatatatttatctcagtaaagatagagtaaatatataattttggaggagttggagcaaaggaactgtgggccgaaattgtcctttatctatggtggtttagcttgcaagtaaatagtgttaaaaatagtccttgtttgaggtactggaattgaggtacttaacactttctcagggcatttgtatctccggattgtgttttttttgtgtgtgagatagggttttgcgcttattgcccaggctggagtacagtggcatgatcttggctcactgcaacctccgcctcctgggttcaagcgattctcctgtctcagcctcctgagtagttgggattacaggcgcacgccaccacactcagctaatttttgtattttagtaggcggggtttcatcatgttggccaggctggtctcaaactcccgacctcaggtgatccacccgccttggcctcccaaagtgcagggattacaggcgtgagccactgcacccggcctgtatctccggcttgttttttagttttttactctgtgaacctgcctgtagccctataacctccttaccctgtgttgctttcccagtgctgctaaaaacagagaccctaggggcctgaaccctgcctgatcctgatcatgtgaggtgaagtcagaggccaggcagatcctgggaatgtgttctttatgcgttcccaggcacttgctgcccaaagaaggcctagtgggactagtgaagtcatgccatctttctgccagtttgagatctttctcttgtgccctagctggccaaaaagrataggaatttgaaggaaataatttctttaaaatctgcttatgtttggaaagagtcaaaccttactatctatatgacatataatcctgatatcagttttgtttacagttactatgtttttttcagaactgtttattatactgcaaagatcatgtggaaggctagttattttggtgacctttttttattttgttttgtagccctgactataatgtggaatttttccgacrgtttatactggttatgaatgctttagataacagaggtgaggttattttaatacttttaatttctcagtatttcctctctcccatatcaaatttgtttacaaatttaatatttattagactattgtgatttagaacttaaaagacttaagagaaatgatcgagtttaaagcatgcccattgattgcagttttatatagaaatgacttattccaggcgggaatttagctatcatattctctgcatttctaccaaaaggtataaatagaagtgaagtgaaaagctctcaaaaagtgtgactgtggctcagcacagtggctcacgcctgtaatcccagcactttgagagaccaaggcaggaggatcacttgaggtcaggagttcgagaccaacctagtcaacatggtgaaaccgtctctaccaaaaaacacaaaaattagccggtgtggtggcatgtgcctgtagtcccagcttctccggaggctgaggtgggagaatcgcttgaagccaggaggcagaggttgcagtgagcctagatcacaccactacactccagccttggtgacagagtgcgaccctgtctcaaaaaaagaaaaagtgtgactggagggtggggtgggggatgcttgagtgatattctttgtctgtaattacttccacatgtaaaagtatatctactaagtgagtttacaacaagttgggccagaaatatctaaataaaaaacacaaggaaaagtcaaaattacgtttattttttaaggcttggggggtctcactgttgcccagactagagtgcactggtgtgatcataactcactgaagccttcaaatgggctcaggtgatactcttacctcaacctctgcagtagctactctgcagacaggtaccaccatacccggctaatttttttatgtttatttttgtagggatgaagtcttgctttgttgcccaggctggcctcgaactcctggcttcaagcagtcctcccacctcagcctcccagaatgctgagattatgggcatgagccagtgctcctggcgtgaaattactctcttaacctgactcatcttttttccctagccttaaactactttaatagttccaagttgatatkccacattctgccttcatttctatcatgtattatctgctagttatattagaatagtggtgagtttaggaacaccttgaaacagtgttttgtgtaaggtacagcaatagaagagaaatatggcacgttggatttttaagattatgtgtttctgtgggtacttctcctggagtaaatttgtgatataaattctatttgatattttgctaagtgaatgtctcttaaatgtctgtaattaacagttgtattattctggccatagctataagaaaattgtacaaaaaatgaagccagtaagatagttttgagtctgtgtcatcctaattaaagataactaattttttttttcccaaaaactcatactgtttgttttacttccagctgcccgaaaccatgttaatagaatgtgcctggcagctgatgttcctcttattgaaagtggaacagctgggtatcttggacaagtaactactatcaaaaaggtaaagaaaagttttatttttttaacttcccaaatatttatttgagaccttggagcaggaggaaataaactttgtatttatataaaatgaacaggtgaacatccaaaatgtaaggacttttatgcttatataaaacttaaaatgcggggccaggtgcagtggctcatacctgtaatcccagcacttcgggaggccgaggtgggcggatcacctgaggtcaggagtttgagaccagcctggcaagcatggtgaaaccccatctctactaaaaatacaaaaattagctggacatggtggccggcgcctgtaatcccagctacttgggaggctgagccaggcgaatcacttgaacctgagaggcagaggttgcagtaagctgagattgcaccactgccctccagcctgggctacagatcaagcctctgtctcaaaaaacaaacttaaaatgctataaacgtgctcaaaagactatgggcaaggaaatctttcagctctgccattttgtttcatttgacttttgtattaaaatccttagagtggtaagcatgatataccaggcatcaaaaatttctttgtgtcggctgcgtgcagtggctcatgcctgtaatcccagcactttgggaggctgaggtaggcagatgacttgaggtcaggagttcgagaccagcctctccaatgtagtgaaaccacgtctctacaaaaaatacaaaaattagctgggtgtggaggcgtgtacctgtaatcccagctagttgggagactgaagcatgagaattgcttgaacctcggaggtggaggttacagtgagccaagatggcaccacactccagcctgggcaacagagtgagactccatctcaaaaaaaaaaagccaggcgtgatggctcatgcctgtaatcccagcactttttgggaacccgaagcgagcggatcacctgaggtcaggattttgagaccagcctgtccaacatggtgaaaccctgtctctactaaaaatacaaaaatcagcgggcgtggtggtgtgcacctgtaatcccagctacttgggaggctgaggcaggagaatcccttgaaccggggaagcggaggttgcggtgagctgagatcacgccattgcactccagcctgggcaacgagcgaaactctgtctcaaaaaaaaaaaaaccaaaaaattctgttgtctaagagtctgggcttataatgtggaagggaactttgaaaactttttaggggtgtatttgtgaagtacttcaaacatttaaatacaactagagaataatagaacaaaatacctgtgtgctcatacctcagttttgttttggtttatttatttatttgtttatttttttgagacagaatttcgctcttgttgcccaggctgcagtgcagtggcgcgatctcagctcgccgcaacctccgtctccctggttcaagcgattctcctgcctcagtctcccgagtagctgggattacaggcgtgcgccaccacgcctggctaattttgtatttttagtagagacggggtttctctatgttggtcaggctggtcttcaactcctgacctcaggtgatccacctgcctcggcctcccaaagtgctgggattataggtgtgagccgccatgcctggcacatatctcagtttttaaaacctcaacacrgcttcatttgctattcagatattttttctttcagttcttttaagaagttaaatattgtagttacatttgaagagtcgttttccatgttttgaaactatagaaaraattataatgtacttaacatttgctggttgcgtctaattttttttggcagcttattcatgttagaaattgtgtctttgtttcttttaactgttaaatgttattcttggaaccttattgaataccattctacaaaagactgttgtgtatgtcagtgcgtattaagttgttgaataagtggaggccttcagtatctgttgacagatcaagacggaagttctctgtctgcattgcagtatgagtctcatgactgcttgccatgtggctaccctcaagaaagcatattggaaggctgagggcatcagaaatggtgtttcagagaaaactctaaatctgctgcaatttatattaaaacagtatttgagagttttgattcttgaacaattagcctggctaatttttgcatttttggtagagatgaggttttgccatgttagccaggctggtctcaaactcctgacctcaggtgatccgcctgccttggcctcccaaagtgctgggattacaggtatgagccaccacgcccggccagacattgctttttatatccttgttactgtgattctgacacaccactgtgtattaagactgaaggtggctgggcatggtggcttacgcctgtaatcccagcactttgggaggccaaggcgggcggatcacctgaggtaaggagttcgagaccagcctggccaacatggtgaaaccccatctctactaaaaatacaaaatttagctgggtgtggtggcacgcacctgtaatcccagctacttgggaggctgaggcaaaagaatcacttgaacccgggaggcagaggttgtggtgagcctagatcacgccattgcactccaacctgggcaacgagcgaaattccgtctcagacaaaaagaaaaaaagaagagactgaggttaggaatatctgagataatgaaagatgattcatttgatagttttgaaaagttgtctcaggtgtcatgtacttcttccaaggcataaattccttaaattgtaattttaaacttgaatgtgtatcaataaaatgggctgggcgcagtggctcacgcctgtaatcccagcacttttgggaagccaaggcgggcgaatcacatgaagtcaggagttcaagaccaagctggccaacatggaaaaaccccgtctctactaaaaatatgaaaattagctgggagtggtgggagatgcctgtaatcccagctctttgggagcctgaggcaggagaattgcttgaacctgggaggcggagattgcagccaagattatgccactgtactccagccagggtgacagagcaagactccgtctccccaccgccaaaaagaaacgtatatcaataaaatgaagagtatttggtttagtaacacctaagatttttctgtgtagggagatatatcttgaaattaatcttgtagtttacttaatttcaggagattataaggatatggctgtattccccagacccacttagttttgctcaaaaaaaaaaaaaaaacacatataagaaaatggctgcgaataatatttagataacatttacaactttgagaaataatttcttggaaagctgctgtttgtctttccagtagtttttctgtttagtgtgatcaaggtaaactcatatttgacactcaggtgtagtaatttttatttgggcttgtaagtcatgttcactgaaccaggagtcggcgtcctggcacagccttagctatgactggtagattcagttagcttttgtgttagtttatcataaagtaagcattttggagtcactaatattttaaaatttccttgacaacgtaaaacgtagttggaatatagatgaatgaagtgtttatattaccttataatgttgagaaactgccatcatggagtaaatttttctcatatcctgacttcatagggtgtgaccgagtgttatgagtktcatcctaagccgacccagagaacctttcctggctgtacaattcgtaacacaccttcagaacctatacattgcatcgtttgggcaaagtacttgttcaagtaagagtgtatatttcttggcatgcttttcggtactgatgatggaaaatggagtcatttttatttaattaccttgaagagattgaactcaggatgtttaaatatggtgaagggatgctttagtagctttcttgcagtatttcttaggttaaatgtagctggccgggtgcggtggctcacacctgtaatcccggcactttgggaaactgaggtggtcggatcacctgagcgcaggagtttgagaccagcgtggccagcatggtgaaacacatctctactaaaaatacaaaaattagttggccgtgatggcgagtgcctgtaatcccagctactcgggaggctgaggcaagagaattgcttgaacccaggaggtggaggttggagtgagccgagatcgcgccactgcactccagcttggcaacagagtgagaatttgtctcaaaaaaaaaaaaaaaaaatgtggccatgactgttcaggaaacttagtcttatattggagacagccatgtaactaagcgataaaaatctttatatttggaaatgtgaacatttacttacaaataacccattggttataaaagaaatcacaatggaagttaaaaatactctgtactgataatgatgaaaatgctataccagaatgtattgaatgtggtggttggcaaaaagttacagatttacatacatgaagaaaggctgaacattaattactaaatctttactaagaatccaatttaagttagaaaatgaaccacagaatacactttaagaaatgagaatggtgtgggcatggtggctcatgcctctaatcccagcactgtgggagggtgagatgggaggatcccttgagcccaggagtttgagaccagcctgggaaacatggcaaaaccgtgtctctacaaaaaatagaaaaatgagccaggtgtacctgtactcccagctacttgggaggccgaggtaggaggatcagttgagcctgggaggttgaggctgcagtgaaccgagatagtgccactgcactccagcctgggtgatagtgagatcctgtcttaaaatgaagaaagaaagaaaaaaagaatgagaaggaaggatattaattgaagtaagagcacatttgattacaaaatagaagaggagtaagtgagaactaaacggggaatacagatagcagagattaaataggctataagaaaaaaaagggatgataataagaccatggtagtacataaaaaatttaaatgatctgggtaaatacatttttaaaaacttactaagtgcccagtgcggtggctcaggcctgcaatcccagcactttgggaggctgaggtgggtgggtcacttgaggccaggagtttgagaacagcctggccaacatggcgaaaccccgtctctactataaatacaaaaattaaccaggcgtggtggtgggcayctgtagtcccagctacttgggagactgagccatgagaatcacttgaacccagtgggtggagattgggccactgcactccagcctgggggacagcatgagatgatgtttcaaaaaaaaaaaaaaaatgaaaggaaaatagaatgcctgaatttagcagtataccttagagcaatgtaagtagtttaaattattctaaataatgcaccgaacctatgttatttttacagattcatttcacaaaacttgcaaggagtatattgtaatattagctaaactctccctgagaaatttttaaaagggaatactacttagcttgtgttattaggctagcaatgtctttgatagcaaaacctgtcaaggccattatggcataagaaacaattgctagtcagtctcacacctaaataatagatgcaaaaatcctatgtaaaatattagcatatcctgggaatgggcgcagtgtatcatgcctgtaatctcagcacttggaagctgaagcgggtggatcacctgaggtcaggagttcaagaccaacttggccaatatggcgaaatcctgtctctattaaaaatacaaaattagccrgacatggtggtgggcgcctataatcccagctacttgggaggctgaggcaggagaattgcttgaacccgggaggtggaggctgcagtgagccgagatcgctctgctgcgctccagcctgggcaacagagcaagactccatctcaaaaaaaaaaaaaaaaaaattaccatatggatctagaatcatataaaataaaaagtgtgtcttgaccacgtgtytattcaggaatacaagcatggtttaaactagaaaatctgtaaatgtcattcactcattaggaaattaaagataaactatatagttttcatagatacagagaaagcatttggtaaaatttagcaaatggcctttcatgatgaaagtttctactaaaacagaataaaaacttactaggccgggcgaggtggctcacgcctgtaatcccagcactttgggaggctgaggcgagcggatcacgaggtcaggagatcgagaccatcctggctaacacggtgaaaccccatctctactacaaataaaaaaaattagccggatgtggtggtgggtgcctgtagtcccagctgctcaggaggctgaggcaggagaatggcgtgaacccgggaggcggaggttgcagtgagctgagattgcaccactgcactccagcctgggcgacagagcgatactccgtctcaaaaaaataaaaaataaataaatagataaaattaaaaataaaaaaacttcttactaaaatgagaatgttctcaacccgataaagggtattttgtagaaaccttcagcaaacattgtctttaatttttgcactcagaaaagtatacataacagtgtcaacttgataaatgttcacaaaaactacacttggaagctttatttatttggcaaacattttttttctttgggaggctgaggtgggtgaatcacttgaggccaggagtttgagaactgcctgggcaacatggcgaaaccctgtctctactaaaaatacaaaaattagtggggtgtggtggcacacgcctgtagtcccacctactcgggaggctgagccatgagagccgcttgaacctgggaggcggaggttgaagtgaatggagatcatgctactgcactccaacctgggggacagagcgagactgtgtctcagaaaaagacaaaaaaaaaaaaaaagataatgtggccaggtgcagtgacacacacctgtaatcccggctctttaggaggccaaggcaggaggattgcttgagcccagcagtttgagagcagtgtgggcaacatagtgaaaccccatcactacaaaaaatttaaaaattagcaaggcatggtggcacatgcctgtggtcccagctacttgggaggctgaggtgagaggatcacttgagcctaggaggtcgaggctgcagtgagctgtgatcacaccactgcacactagccttggggacagtaagaccctgtcacacacacaaaaaagataatctggcaaaattaatatgagcagcatttttcactcgaagggaaacctaaataagcaataagcaagttatgttttaatcataagacttacttggaaaattaagtataagaccatagtaagctacagatgcttctcagatacttcccgataaactcatcataaataaaaaataccattaagtaaaaaatgatgctttttttgttgttgtttttttgagatggagtttcgctcttgttgcccaggctggagtgcagtgcaactgcaatctctgcctcctgggttcaagcgattctcctgctcagcctctcgagtggctgggattacaggcgtctgccaccacgcccagctaatatttgtattttagtagatacagggtttcaccttgttggccaggctggtctcaaactcctgacttcggttgatccacccgcctcggcctcccaaagtgttgggattacacatgtgagccaccacgcccagccaaaaatgcattttaatataacctcaataaacctgttgtaaaggtgaaaaatcattggtggaccattttaaattagcggctgtctactattttgcactcactagttggcaaagcgttaattttaggaagtgttaacatgccattgttgggagtgactatcagagctttgaaattatagttgggtggggggttgtacaaaggatttctgtaagataactttcattaatcatatacttgaggaaatactggaaacttttatatccatgagttattaaacagtttttaggataactttattaataaaagagaatctcagcttaatactttcaaattgtttgttaacactctgttcagcagtaaagagccattctaccatgaaaaaaagttaatcttgttcattgctgaatttctatcccctagatggggactctgcacctgaggtatataataatgtttgttgaacaggtagctgcaggtgtaaacacaaacattattctggtgttagaatgttatccaggttgtaagtgaaaaccactcacctgtttcttgagcagaggttttaacattgaaatgtgcagagcctcgctgataggaatggatgtaggtctgctaaaatttaaccttgcttacattgctgttgaaattgggatgcaagctgtccaagcacattgtgttaaacttttaagtttatagtcatttatccgttattcacttttttttttttttttttgagacggagtcttgctctgttgcccaggccggagtgcagttgtgcagtctcggctcactgcaacctccatctcctgggttcaagcgattctcctgcctcagcttcccgagtagctgggattacaggcgtgcgctaccacgcctggctaatttttatatttttggtagagacgaggtttcaccatgttggtcaggctggtctcgaactcctgactttgtgatctgcctgcctcagcctcccaaaatgttgggattaaaggtgtgagccactgcgcccagccagttgttcagtctttatctctgctaaatatttggaatattctaaattacatgtttgtttagaatgctttgttatacagaagtatttactattcttaaattatagccagttgtttggggaagaagatgctgatcaagaagtatctcctgacagagctgaccctgaagctgcctgtgagtaaattatttggcatatgttttatcagatactattatctttattttgttgatttaattttggtagcttaagggaaaaaaattgctatatgtgctaggtaatgtgtgtttaacatgtgttttttttttgktttttttttttttttttttttttgtctcagaggtggagtttctctcttattgcccaggctggagtacaatggtataatctcggctcactgcaacctccgccttctgggttcaaatgattctcctgcctcaggctcctgagtagctgggattacaggcacctgccaccgcgcccagctaatttttgtatatttagtagagacagggtttcaccatgttagccaggctggtctcgaactcttgacctgaggtgatccacccgccttggcctcccaaagtgctgggacaggcgtaagcaaccgtgcctatccaaaacaatgttttacaaaaaaaatatgattccgttttactgatgaggaaatcaaggttaagagaaatttcacaagtctagtaaatagagctgcgagttgttcctagatctcatgactggtctgtgctttgaactgttatatgtgtagctttcagaaactaagttacaacaggccaggcaaggtggctcacgcccgtagtcccagcattttgggaggctgaagcagctggattgcatgaggtcaggagtttgagaccagcctggccaacatggcaaaaccctgtctctacaaaaaatataaaaattagccaggcatggtggtgcatacctgtagtcccaactacttgtgaggttgagacgggaagatggcttgagcccaagaggtagaagctacagtgagccgagatcttaacactgcactccagcctgggcaacagagtgagactttgtctccaaaaacaagaaagaaagaaactgggatacaaaaagatgctgatgaatgtgttattttcttattccttgaactcagaatgtgttgcatttggggatttccatgagtgactttctttttattcccaaaggtgagtgaaaagagttcagttctacatttattacggttgaaaataaaataatgatcgttttataggggaaccaacggaagccgaagccagagctagagcatctaatgaagatggtgacattaaacgtatttctactaaggaatgggctaaatcaactggatatgatccagttaaactttttaccaaggttagatttactttttttataatcatggatagatgtattgttgtgcatagatgtattgttctagttctgcttgttttaaaatagtccataaaattgaattaagcttctatgtatatgccttgtgatgtcctaataaaatgattgatgcagtcaggatatgcaagttttaaaatgttaccatctacactaaatctatcagtataacatctaaatargaggtaaaatgagaggtggcttgtataccttcttggttgtctttccttctctcactttttacagaacttcttcgttttcctgctgcttctcatcttcacttttttttttttttttttttgagatggagtctcactcttgtcgcccaggctggagtgcagtggcacgatctcggctcactgcagccccgcctcctgggttcaagtgattctcctgcctcagccttccgagtagctgggattacaggtgtgtaccatcaggcctggctaattttgtatttttagtagaagcggggtctcaccatgttggccaggtaggtcatgaactcctgactgcaagtgatctgcccaccttggcttcccaaagtgatgggattataggcgtgagccactgctcctggcttcatgttcacttttatttcttgctcatatctgctattagcagtttgactgacatgtgtcctaaattgcccttgaaccccataagcccctttttcttggtgaaatccctcttcatcagtagtatatactatttgcctgttaaatatttctagagaaatctgtgaaattgtttttattgggtctacctaattattgttcatctagacccgtaggtccgtgttttaaaagtttttttgttctgtcttgactccctagcaagttgtacgtgtgtggggtttttttgactctttttttcctttttgtggagaatggggtctcaccatgttgcccaggcagatctcaaactcctggtttcaagtctcaaactcctgggttcaagcgatcctccagcctctgcctccctaagtgctgggattacaggcatgaaccactgagcctagcccctagcaagtttatcacagagcttaaaactttctcagctcttatcaaactgcctcagtattcttgcaactctcactaagcagatgaccttaaggatataataacaggtttgaaaccattggacataatttacctgttgagagactgttccacataaccgaaaactctttttctttctgctggagagaatccactttcggtaaaggctaacttttgcatgtggtgttttgctttccttttgtaccattcttcagacaggattttcgtctctgtcctgtgtctcggatcttttttttcttggtttcttttgtctgctttccaacacgcacaggttctgctgtcttaatcaaatgacatactgctctccccagcttgtatttcgtcttatttcctcagtggtaacagatgtcacatgttgacttttttttttctttttttgagagagaatcctgctctgtcgcccaggctagagtgcagtggcatgatctcagcttgctgcaacctctgcctcctggttcaggctattctcctgcctcagcctcctgagtagctgggattacaggtccgccactatgcctggctaatttttgtatttttagtagatagggggtttcaccatattggccaggctggtctcgaactcctacctcaggtgatctgcctgcctcggcctcccaaagtgctgggattacaggcatgagccgtcgtgcccagcccacaggttgactttcttatccctattgcatttatttcctcactacagcccttttctaaaacatggttgtattagggttctctagagggacagagctaataggatagatatatacaaaggggagttgatagagtattaattcacacgatcacaaggcccaacaataggcccatctgcaagctgaggagcaaggagagccagtctgagtctcaaaactgragaatttggagtctgatgtttgagggcaggaagcatccaacatgggagaaagatgtaggctgggaggctaggccagtctagtcttttcatgtttttctggctgctgtatattctggcctcaatggcagctgattagatggtgcccacccagattaagagagggtttgcttttcccagtccactgactcaaatattaatgtcttttggcaacaccctcacacacacacccaagaccagtactttgcatctttcaatccaatcaagttgacactcagtattaagcatcataatggtttttattttgattatacttaagatgcmgtaaacttcgatatggtcaacagcagtatcttccaaaccagtatccttatttccattccaatctgagcaagacttgaaagccagaaaaatctgaagtgcatctccaatctgttatttagcagataattttaaacatctgctgtgtgccagacacctctttaagtacaggggatttagttgtgaacaagacagaagacagagtccttgctctttagagggagttcacagtctagatgagaagtcaaactttgaacaataaatttcagcttcagagtcttaatgacattaagttcagatgctttgcagcccttgaataataagtttcatctaaaggactcatctcctggcctgcatacccatttcagatgttgttagggagaggcttcagaagaggctttctagagcaggtgacatttaagcccaaggcttgaaagaataagagtcagaatagggtacagtatgtacaaggaaactctgaatagggtacagtatgtacaaggaaactctcagttggaaaactgacataaatcccattaagggggagagtggaaaaagatgactggagagagaagttgaggtcagatcaggcagactttctaggccttcttaaggatgttatagcaagacagtgggaatccattgaaaggtggtcttacaggatcactataaggggatagaggggatgcacatactaccctaggatctgatattcatattataaccaatctgggacagtgcccctggagttgtgcagtgccagaataatctggagtacagccatctgtactcccactggaacatggaggagtagactaaacaggactttgcatgtatatggtgaagatcagtggaataaaaaatggtacctggctgggcactgtggcttacacttgtaatcctagcactttggaaggctgaggcgggaggatcacttgaggccaggagcacaagaccagcctgggcaatatagcaagaccccatctctaaaaacgaaaaaaaaatagccagccatggtggcctgagcctgcggtccccagctactcaggaggctgggacaggaatatcacttgagcccaagaggttgagacttcagtgagctatggtcacaccactgcacttcagcctgggcaggtcaaagaacagaggtgctgttctccgatataagtgagctgggaggcagwtgtgtgtagaggggttgggggagggtaggagaaggtgataataatcaattttgaactcatttgagattcttttggaacattagagaagtggttttgtagataagtagagaggtttcaactagggatatggttgggattcctaggtttatagatgtggttaactactggaaatggacatgatacaccacagaggacagaatgaaaagatggttcagtacagaaatctgaggggctcctgatatttagtaatagttgaatagaagagatggagcttaggcttagaaaactgttggttcaagccttcaagatcctctacaaaatgtttccagccacatttgttacccaagtcatagtggattcatctccttgcctttgtacccatttcacatgttgctgtcataaggagactctttccttatttcttagataaaatataaatctttttttttttttttttttttttgagactgagtctcactctgttgccaggctggagtgcagtggtgcgatctcagctgactgcactctccgcctcccaggttcaagcgattctcctgcctcagcctcccgagtagctgggattacaggcacgcgccacgacgcccagctgatttttgtatttttagtagagatggggtttcaccatgttggccaggatggtctcgatctcttgacttcgtgatccacctaccttggtctcccaaagtgctgggattacaggtgtgagccaccaygcctggccagaaatccttactcaaggctttgtgatattcacactaaattgtattctgattatttgtatgtttggcttattctctaaagattaaggatgctcagttaktattgatggattaagtatattttgatagaaatggctgtgatttttaaatatagccaaatttctgttcttacctggtaccagcaataaatgtgttgaataaattaatcaacaatagaaaatgcagataaggaaaaagaaaaaaatattaaaatcacttgaagttctaacacatcttttcatatgatagtttctcaatctacttgtaatgtttttgtttttgtaataattgtgtgggggtttttacattttatttttgttcatgtttctgtgggttatttttggaggggagggcacattttaaagatatcgcagttcagaagttctgttgtgaagcactttagtttaaaaatctgtatactttgtgtgcatgtccccatgagcttggaggcattgctgactggcatccctaggctcagtgattgtctgtagttgtacatttatttacaactacataatgtacatttatttgtatgattgtgcttcagactgatctttggagctaaatttagggaagcttttggagaggtgacttaggaaggcaggggcagtcggcagttcagggctcctttactctgcattcctcagagcacttctgcatttcgctgttttcaatgtagagattctgttagaacttccttttacaaatgtttttccttttgaaaattgttatgctgctggtatatgacatgtatctttaaatcagatttcatagtgtaatatagatcagcaatgacgttttcttgtatcttatcaattagggattatggggttcatgggatctgtctttcttttgtaagctttttaaagatgacatcaggtatctgttgacaatggacaaactatggcggaaaaggaaacctccagttccgttggactgggctgaagtacaaagtcaaggtaaagaatacattttagtcttggaacacctaagctggaaatatcctcgcgtaaagtctttgtatagccctgttgttgcttgaaaatgatatgtcttcatatattcaaacagtgcaaaaaaatatgaagaacaaaagtcactgaagtcccacacttcagaaatagccactaataacattttcaggagtgttctggtggtccgccctatgtacacagatgcaggcattcgttatacactgcgtaaatggaatcatactattgataaactctcacttgcttttgtcagtcagtatagttaactagtctcttattaacatgtagtgtttttgtattttccctgaaataaagttttgaaattgctatatatttatgtatatcttttttttttttttttttttttttgagaccgtgtctcgctctgttgccaaggctggagcgcagtggcacgatctcagctcaccgcaacctgggttcaagcgattctcccrcctcagcctcccgagtagctgggataacaggtgtgagccactgcgcctagcctatttatgtacacctttgtacccttgtgattatctctttaagatttaatctagaaacacatttttaatgtaaaatttttttaatgtttagaaatgaaaagttttttgaggcatagtcttgctrtgttgcccagattagagtgcagtggctgttcacaggctgtcatagcacaaggcatccctggactcctgggctcaagccatcctcctccctcagtctcctgagtagctgggactgtatgcaactgtgcccagcatattttaaaattttaaatgtaggaaaactattgtagtggctgctttctcatcccactcccctttaacactccttgtctctcctttatctgaactgtattaggattaatttatgcacagcagtatagcacccattgaaacttaaaagatcccgggagacttgggatatcattttggagcagttctcaacaatcagggatagttatcaaacagatttaattatgactctagtagtgtccgcttactgagttctcattctcactaggtgctgggcctaatgcttatttatcatcttatctacattatatcttcaaatctcccagtaatcctatgaggtactgaggtggtcttgtacctttcctatctcaggtttaacagtttttttttttttttttttttttttttttgagacagagtcttgctctgtcgcccaggctggagtgcagtggcgcgatcttggctcactgcaagctccgcctcccgggttcgcgccattctcctgcctcagcctcctgagtagctgggactacaggcgcccgccaccatgcctgcatattttttgtatttttagtagagacggggtttcaccatgttagccaggatggtctcgatctcctgacctcatgatccgtctgcctcggcctcccaaagtgctgggattacaggcgtgagccaccgtgcctggccccatgataattattttaatggaatttatttcatatttgatttcttaatggtcggggattgaacttgttaaacagagcacagtagaggaatgatgttaattagtgaaatttctaatatatatwtttttttctttaggagaagaaacgaatgcatcagatcaacagaatgaaccccagttaggcckgaaagaccagcaggttctagatgtaaagagctatgcacgtcttttttcaaagagcatcgagactttgagagttcatttagcagaaaagggggatggagctgagctcatatgggataaggttcgttttgacaatgtgtggcaagtacttacatgtcaaaagtgtgttttagttcttgagatgtaatagaagctagtcattttttgaatatttactagattttgaggaaatatattgatttggcttggatattttcagctctaattgctgtatggagctgaattttctgtacatgaattcaagcaatatcataaaacttcatttgggattctagtgatgtgttcagggtttataattatgttgactagaaaaataacgtgaatatattaaagtgaaatgtttcttgtgtagagtagatgtattcatagaagtcataaaatcatttggagaaaacatctcattggcctgatttgcccttgaaaatagtaagattgtctttgaattgaaatagttattactatttcagaggtctgaaagacagagctcttgatacaaaaatgagatgtaattattcttagaagttaaaatcatatttaatagtactctgcagttatgtcatcttttgagatttgatattatgaactaattttacttaattttaattgtaatcagtattttctatggctaaaagtgttttatctcatgaagcttgtatgttcctgtggtgttgaagattagtcatgggtcttaaggcataaaggccaattttagaaacctaagaaaaatttgtgtgtacatattttgaaactttggttgaatcagacatctaaatacactaaaatgaagctagtatatttagattcttgggattcttataaacattagtctcttgggttttgtgatatttaaagggtaacttttcatattttcattgttattgttatgctagtgatttgggaagtttgattagtgcacagaggctaaataaagagcccttggaatgggaattgttatcctcttgagtaaagtccacatgtaatgggtgtgataagacagctgcttagggaagacactgtgttgagtattcagtattcttagtcctcaccacaccttatgagatggggatataatttcccctatttaatagattaagagattttgactcaaggaatttgacttgcctgaggattcacagccagccaataaatacataaagaactatgctctcagtattttttcttctgttctgtgatgcctctgaattttagaccagggtgatatcttctcagttcaaagcaggaagccttgctgaaatctagagactaggatatagtctcaggaaaaatacaaatcgtaacaggaaaaacttggattgtattgccttatttgaagaaacagcatatgtgagagagtggtgcatatgaagagagtttggcaaaggggagtgaaaaagagtcatccaggtttttctgaagtgttaatgaaacagcttttttttttttttttttttaattgaracagggtctcactctgtcaccaaggctggagtgcagtggcatgatcttggcttactgcagcctctgcgtcccgggttcaagtgatcccgccacctcaggctcccgagtacctgggacgactttaggtgtgcgccaccatgcctggctaattttttgtgtttttggtggagatggggttttgccacgttgcccgggctggtcacaaactcctgagctcaggcaatctgcttgcctcaacctactaaattgcttgagactacaggcatgagccaccatgcccagcctaaaacagttttcttaaattgctcgtcttttggcctggattctgtgtttgtccagcaaccttctctttactgatgaatggaaccaggaaagggttgccattgtcagtgagtggaattgagattccggtgtatacaactgagtctccggtgcctttgtttaggctggagtgagttcctagaagctggtgattcttggtgttcttgtcagactcattactggaccagaggagctgatgatgagaccccaccccctacttaacccacctccatgctactgtgaggtcctagctgactggtctttccctcagcaacctcttgttctagtcgaaagtctatagtattataaacacgtgaaagtattgttctgaaagtaatgcttcaaaatagtcaatttgtggagaaacttgttaaattgtttaaattattggcaggatgacccatctgcaatggattttgtcacctctgctgcaaacctcaggatgcatattttcagtatgaatatgaagagtagatttgatatcaaatgtaagttatttgtactaaagttgtatcactaaaaccttgaagttgttttttaaacagtgaaacatactcatccttttttttttttcccagcaatggcagggaacattattcctgctattgctactactaatgcagtaattgctgggttgatagtattggaaggattgaagattttatcaggaaaaatagaccagtgcagaacagtgagtatttctgtttgcatttttatgcaaccccccttaaaaaaatcattaattaaaagtacattaaacagataatttttaaaatgaaaacaataaaattggtttaaagcaatggaaaagtaatttttctggttaccaagtgagtgtgtgtttaagcttcctggaaattgcaacaaaaaggaaaaattaagaagttgcttttgcttttaacatttccaattttactgaattcttcgaagaattcattgtgcggtccttatactaagaagatgtttcaactgtttttcaattctgagagtgctatatgggttttaaaatttgcttggtcattttatagtcccctgttcagtcattctcctattgagtcattcttttcaattttattgtatagtttttgataatgttaatgtctgagatctttatgggtgagtctgctgtcatttctgctatttctcgtagtgatttgcttgtatggtttatgattttttaaaaactgaatgtgtattagaattgtgtctggtaattctttagggacccattgtagatgtatttcttcaaagagcatttgtggttattatatttgggtgcttggggcactgccartacaggaccacttttaaattaggattttcaatacctatgtattcagaccacaaacctgcacgtgccctatgttattgtcatgaattatatgggaagatactcctccccctccactaagcaccaagtttaakatcatttttatggagaaagtatttttctcctctcttttcaggtccttgctttgtgtaagggtctcctgttttaagagttcctaccttagtggtgggtggggtaggtgtatctcttaaggctaacactacttggatgttctctttggattccttccttcgatgttgtgtctgcagacacttcgctttcttaccagctcaagaaggcttcctaggaaatactagccaatactttgactgttgtttaggttctcctttttatcattgaaataaaaagacctgtttaccttcagaaatttcaaaaaatatctagtttgcaatggtactgttattttgcagtgtcattgatgcacacttacttttttttatcttttgagacggagtctagctctgttgcccaggctggagtgcagtggcacaatcttggctcactgcaacctccacctcccaggatcaagcgattctcctgtctcagcctcctcagtagctaggattacaggtgcatgccaccatgccggctaatttttgtatttttagtagagacgggtttcactatgttggttaggctggtctcgaactcctgacctcatgatccgcccacctcggcctcccaaagtgctgggattacaggcatacaggcatgagccactgcgcccggccttttttttttaaactgatggggtcttgctatgttgtccaggttggtcctgaactcctgggctcaagcagtcctcccaccttggccccccaaagtgctgggattacaggtgtgagccactgcacttggcccgatgcgctctttttttccttttctttttttttttttttttttttttttgaggtggaatcttgctctcacccaggctggagtacagtggagtacagtgatgtgatctcggctcactgcaacctccacctgctgggttctagcgattctcctgcctcagcctctcaagtagctgggattactggcacatgccaccacacctggctaatttttgtattattagtagagacggtgtttcacctgttgcccagattggtctcaaactcctggcctgaagtgatccgcccttctcagcctcccagagtactgggatttcaggcgtgagctattgcgcccagcctcgatgcactcttaaaatattttattttcatgaaatttcagtttgaaggaacagaatcaaattgcccagtctgccatcttgatttagttttctatttaaacttttattgtatatgttatatttttaatttctaagaactttattttttggtatcttttttttgagatggagtcttgctctgtcacccaggctagagtgcagtggcgcgatctcagctcactgcaacctccacctcccaagtagaagtgattctcctgcctcagcctccccagtagctgggattacaggcgggtgccaccacgcctggctaatttttgtagttttaggagagacagggttttaccatgttagccaggctggtcatgaactcctgacctcaggtgatctgcccaccttggcctcccaaagtgctagaattacaggagtgagccaccgttcctggccgataccagtttttaaattatttaaaaaaaattttttatagcagcctgaagctgtagtatccctttgagctcaccaacagtactaattactgaacttattaaaatgtctgttatttcccatcacatccttccggtttctttgcctgcttagctccatgccactcttggactattaatagtaatatatctggccgggcacgatggctcacacgtgtaatcccagctctttgggaggccgaggcaggcagatcacctgagattggaagttcgagactagcctgactaacgtggagaaacctggtctctactaaaaaaaaaaatatatatatatatatatataaaattagctgggcatggtggtgcatgtttgtaatcccagctactcaggaggctgaggcaggagaatcacttgaacctgggaggcggaagttgcattaagccgagatcgcgccattgcactccagcctggcaacaagagcgaaactctgcctcaagaaaaaatatagtaatatatctggatttcatttttttacatttgcaaatgaattccagcctggattaatgttagcccaggtattaatagtggtagcaattgcttttattattgtcagtttcccttagcacacttaccttcccggtgaagcccaaaatcaaacaaatctttctccctctgtagcctgcttggcctgggcagtttgcttctagcccttccacctaccagtattcattgtayggagaagctattttacagaggasggctttagtgtctcttgagggatttagttctgtattctcaggggaatccgtagagtactcctttagaattcattcctcttagcagactcaacactacattgtagtcacaagatraaggtttgtgtctcagcttcttgtcttctgacatttgttgtttctgttggatcttgctagtgttttctaaactttagtagaagcaggagcttggagcttttcttaatttcagtgtaatttgtatatttgccttggttcttaattatttttttgtttagtattagagaaatggtaaataggtacatatactgccagaaatacatttttttccctcattatataaatgttattctaatcagaaaatttgggaaggcagtgatgttgattctagacaactgtgaaaggcactatcgttaactggagaaattaatgtgttggtcttgtcaggagattgcttgcttgataagaatagcctcagggagggacaccagctgctgatacartgatggcaccacagattaacatgcctgtgcccttactcttgccaaatcaggttgcagaagaacgcggagtcttatataatacaaggagatgtcttttcagcaagcctagctagcctagcctttagctgattagaaaagaaggttgaggccgggcgcggtggctcacgcctgtaatcccagcactttgggaggccgaggcgggcggatcacgaggtcaggagatcgagaccatcctggctaacacggtgaaaccccgtctctactaaaaaaaaaatacaaaaaattagccgggcgaggtggcgggcgcctgtagtcccagctactcgggaggctgaggcaggagaatggcgtgaaccccagggggcggagcctgcagtgagccgagattgcgccactgcactccagcctgggcgacagcaagactccgtctcaaaaaaaaaaaaaaaaaaaaaaaaaaaaaaagaaggttgaaaaaccaggttcctaaaaaggtcatgattttcctgatccattttgccatctggacgggaatttttaagtcattttttattggatatctggtaaacgagattttagattgtatggcgtataaaattacagcacgtttccgatttctgcctgttatttctcctccaaagatttttttgaataaacaaccaaacccaagaaagaagcttcttgtgccttgtgcactggatcctcccaaccccaattgttatgtatgtgccagcaagccagaggtgactgtgcggctgaatgtccataaagtgactgttctcaccttacaagacaaggtcagtgcaaggcctgggtctcttttccttttgcttttacagtattactgtgatgacaaacaaacactagctgctgattctgaaaaggtccaactgcagagatgtgtggctgtgatttcctgggttattttgccttctggattcctgcaggcttttctgtctgtggttccagaataagtgcctcacattcccagaatggagtaggagtatttgactggaatctgcagcacagtggtggcacagtatcacagcaagcagaggacttctttgctctttgcttcccaggcagtgggtaaattctgtattttttgacaaataacaggtatccttgaatggtcctcactgtggcagtgagcagataagtatttgcatgcagtgcaaagtttgcatttccagtagagcaaagccccagttaccagctttgtattaaagggtataagtaacttgcagagttttggtttctctgcgtgttggacagtgcccactcccagcaaattagggggcttttgttatttctgaggtctgagttgaggctaagtggtggtacacacttatctaatatgacctgattctgatatggtaagttagtccctgaggacatagggcatttgcacacctggattcacctctggagctgaagcgagggaagaaatgggggtttaggacatggtctggtccttaagttcctgttaaattggctagatttgtgtattaggggagattttctttttttatgacccaaaagtgtcactttccactttgggatcacttcctattgttctctggttgtgaccatcataatgctacatatttacatgcctcttgagagaggaggaagtggcccttctcaaatagcagtgctgcctgatagggaatggcctttcttccagaaactggttaggcaggacggattgatttgagcttatgttttggtcaaggaagtggcaggtacagcagcgggtggttgccccagtttcttttctaggaaataattatctttggtatctcctgattcttgagcttcaaggttattcctctatttgtaggattcttagacctatagagagttcctccttttttccttctttcttttttaggagctggtaggatttaacagaatattatcacttctctaaatgcatggaacggggagacttatctgagagtcaggttaatgagaactgattccatctrtgaaacccctgccattacagggttggcacagagactgaaatgaaatatgtcaagtgtgtagctcactacctaacctgcagggaaagacaaagtagcaagagccagccagggagttcctagtcccctgttgagatgaagttggatctgatctgcatcagtggtcagatgtggggatggaactcaggtgaatccccayggctttcctgcttgctctaagggatcttgaagagtgacttcgccggtttccaataaatagaaggggaaagtaagagcctttatagaagtctaggatttcttatgatctttaattacctacgttaatattttgaatccttttttttttttttgtagatagtgaaagaaaaatttgctatggtagcaccagatgtccaaattgaagatgggaaaggaacaatcctaatatcttccgaagagggagagacggaaggtatcatacattgtatttattcattcctctcattgaggagactgcttgaagagtgcacattagttgattcatttactgtatgtgatactcagtattgcagagagtggcagtgtttggtcatgaaggtgctctttcaaggtgacattgctgggggtcatcacacttccatgtttgggaactccatgtcagacattttcagggactgcagtgctcttgtccacttccaaggaacctccttgccgatatcatggatcctgggagctaaccttgtgatgagaagactattctgtctgtcagatcacagtgggtagggttctaaggcatttggagatttttctccaagagtggggaagccttggtagcctgttcctactatatagcagaaagattattgaaattcagtgcccggttttggctttctgatctttcctttcaaaagttcaagcagttcatcccttttgctaacacatttgctatacaaggtacaatacatttgattctgttgaagctttcatagtaaggattgcatcgtagttattcctccttcagactgtactcgttgatcctatacctccttggtcacttttgcagctcatttcttgagttgctgttctcgttttttccatgtcccagtttttgccagtgtactgttattttcgaaggtttctaggccctgtgtttccctgtatattgacttaattcatacctatttgtccattggtcatttattcatactttgtgaggtcctgatggcgattcagatgttaagccttctttaaattcaggtttagtgtcaaggttcttcttggttgtagttgcttgttgagaaattttttgggctattaggtcatgtgtaattggaggccatgttttggctgtgtggtgctctattttaggagtctacttgagtattcaagcctcattctagccagctgacttttaaaaaaatgtttgtttgtgattatatgctgtcccttagttgtagccagctctttcaaatgctagcttaaaaatggaaactggtcaggaatytcagtggcttcagcgtgacccttctgtacggaatacatgtggtatggagggtgagacagcacttaccagaatatgtgtggagtcctgtatgacaggcatagttttgggtattcataagtcaaggatgaataagacaacagaccttggcttgaagtgccttgcagcctggaagaagggagattgtcaacagctggattgagcatcgtccaaggaaaactagaaagagtgtgtacacagtatgaatctaaggaaagtatattcagctttgtgaaacggagggggagtaataggagagggagtactcttgggtcagtttttgaagtagtagtgaggactccctggacaaagaagagagcatttagacagaatgaacatctgtctacaaaggtgtgaacttgtgaaacaacctaaactgccttgggagtggcccattatttggtttcgctggaagttggggtgctgaggggttggcagcagtggtgaggttgaagtctttcttgtcacatgtgcagtgtgtgtcttcctcctctcccttgacccctaccctccagaggaaggggcagtatttcactgccacctgccaccagggtttaaacaggggagtagcagggagctattagggaggaggggattgagggatttttactaaggcagaggcaggtgatagatttgagatttgcaaagtcagaacttggagcccagttgaggaatagcattacaatgttagcagcgttgttaggcgagcacaagacttcacaggtgatgctagttcaccaaaatgtgaacccacattaactggttttccttttgaatgtgatggttccaagaggtttgcagtcagtggagatgtgtgaaagggcttggaggtggaaatctgggtaagaatgccaagggcattcctggtagattaaaatggtaaagcaagcaacagatctggaaaagaactaggagaaactgttagtattttctgggtgtcaacgtagggaaaggcgttctaagcgttttccttataaataatgaaaaaatgttaaaaagccaaaaaaaaagtggggggagactgaaaattgagattatatagaaaattgggcttggtgcactggctcacacctctaatcctagcactttgaggggccgaggcgggcagatcacttgaggccaggagtttgagaccagcctggccaacatggcaaaacctcatctcttgtaaaaatacaaaaattaggccgggcgttgtagctgtaatgccagcactttgggaggccgaggtgggtggatcacctgaggtcaggagttggagaccagcttggccaatatggcaaaaccctgtctctactaaaaatacaaaaattagccaggcatggtggagggggtgcatttaatcccagctattcgggaggctaaggcaggagaatcgcctgaacctgggaggtggaggttgcagtgagccaagatggtgccactgcactccagcctggacaacagagtgagactctgtctcaaaaaaaaaaaaaagaaagaaaattagttaggcatggtggtgcacacctgtagtcccagctattctggaggctgaggtaggaagactgctcaagtctgggatgcactctggcctgtgtgacacggtgagaccctgtctttaaaaaaaattgatttgaatggggaaaagttttcagaatttctcagtttggtccccctgaagtagtttcggtagttaagtgttttaagactgaattcccagcgttttaatgttttagggtactagggcctccataacaaataccacaacccaggtggcttaaacaacagaaatttatattctcacagttctggaggctggaacaccaagatgaaggtgctggcaggtttgttttattttaaaacctctctcctttgcttgcagatagctgcctttctgttgtgtcacatagcctttcctctaggggtgcacatccctgatgtctctgtccagattttgggattgattgattgattgattgattgactggagacagagtcctaaaaattttttttgctgctctgttgcctagcaggctggagtgcagtggtacagtcacacgcctcactgtgtaactcctgggcttcaggaatcaatccttccctggcctcccaaagtgctgagattatagatgtgagctactgtgcctgccttcctcctcctataaggacatcagtcagatcagattagagcccaccctacttgccccatttaaatttaatcattcctttaaaaagtcttatctccaaatacaatcagattctgagatactggggattagggtttcaacctttggattttggtgaacgggacacaaatcagcccataacagaggtttagctttttaaaaaatsaacctgactgctctatgaagatgtaactgaagtatctaaattattcacgtttcctagctaataatcacaagaagttgtcagaatttggaattagaaatggcagccggcttcaagcagatgacttcctccaggactatactttattgatcaacatccttcataggtaagagctattagtattttaattgtaagaaattatttgaatatataaactttagacaaaatgaaggaaaagtgttttcttatccttaaaccctgctgttcatttgaaactgtatagtatatttggttgagttggtcactgagttccgtgatgyttgacctacagaaaaatttgaggattcagaaattggcggggtgtggcggatcacctgaggtcaggagttcgagaccaacctggccaacacggtgaaaccccgtctctgctaaaaatgcaaaaattagccgggcatagtggcaggcgcctgtagtcccagctacttgggaggctaaggtaggagaatcccttgaacccgagaggtggaggttgcagtcagccgggatcgcgccattgcactccaacctgggagacagagtgagactccaacttaaaaaaaaaaaaagaaaaccagaaataaaagaaataagcaaaaaatgttttaagagtaactgtcatcagtggtggcttatcagaaagacctagagtccaggtgtttgaacagtttaaacagaggcaaattcattgtagtaattaaactggaataaaattattaattatttttcaaggttctctagaaaaaaatatttcttccataaaacaaatcatttcgtttgtgattttgtggcaataacaaaagaatattgggaattgtctgtactggctgggcatggtggctcacacctgtaatcccagcattttgggaggtcgaggcgggtggatcacctgagatcaggagtttgagaccagcctggccaaaggctggtggtggcgcatgcctgtaatcccagaaacttaggaggcagaggttgcagtgagccaagattgcgtcattgcactccaggctgggtgacaagagcaaaactccatctcaaaaaaaaaggaattgtctgtacagattcctgagtctatagcacagttaagatagacatggccccctattctgatatattcatgtgttgaccagggtgcatttttgttcatgctcattgacatggtggaactgtgcctgacttgagatttatgggtagcatctaacaaacataaagggtttagtggtgctgccacctgcgtccagttattttgtcaatattttcatgagtatacaaacatgcatagtgttggtgtggttatttggagagaactacatttcatactttgtttataaaaagcataaaatgacaggaaggaggccaggtgcgatggctcatgtctgtgatcccagcactttgggaggctgaggcgggtggatcacgaggtcaggagttcaagaccagcctgaccaacatggtgaaaccccgtctctactaaaaatacaaaaattagctgggtgtggtggcatgtgcctgcagtcccagctactcaggaggctgaggcgggagaattgtttgaaccggggagccgagtttgcagtgagccgagattgcgccrttgcactccagcctgggcgacagagggggactccatgtcagaaaaaaaaaaaaaaaatgacaggaaggactgaatgtgagttattagtaagtagtgtatttcacagttagataatggagtcaaagtggtcctgcttcagttggacactagatataagtggcatgcttgttttcacttgtgaaagaaaagacagtggaaggacatgtacaataaagtggaaataccacaaggtatctaaaagaggaggcataattagggtttttaatcatattttttagctctctgggaacagaaccccaccccttaaaacgtgtgtcttttgtttgacttaaatgtttctgatgtttttgggagttcatgtacagaagcatggtgtagcttgtaaagatggggggacccagaaatcatgtagttctgcccataagacaccacattactatagttaagatcacattgtaggccaggcgtgacggctcacacctgtaatcccagcactttgggaggctgaggcgggcggatcacaggctcaggggttcaaaaccagcctagccaatatggtgaaaccctgtctctactaaaaatacaaaaaaattagccaggtgtggtggcgcgcctatagtcccagctgcttgggaggctgaggcagaagaatagcttgaaaacctgggaggtagaggttgcagtgaaccgagatcacgctactgcactctagcctgggtgacagagtgagactccgtctcgaaaaaaagaaaaagatcacattgtaagtagaggatgtagaaatctttttttggcattgtagctaaagaaataatgtccaagagttgctttaggccaccaagctttggacccagttttatgcttyagcaataaaagttatttactgttttaaagaaacaaaaaaccaaaaccttgccctgatttgaaagtgcatgtagagtttttgattatcacagaaatttgttgtgtaccgtcttttttattataagttcagtgctttgaaaattagaatccaaggtgggtatggttggctcacgcctgtaatcccagcactttaggagaccaaggtgggaggatggcttgagcccaagatttcaagaccagcctgggcaacattatgagaccctatctctcatttttttttaaataaaaattaaaaaaaaaattagaatccacatatttggtgtatacatagtgtatgctttgaggaacaacaggatttctctggtgctcctttgctttctaaatagtcatagcagtgacctgtgtgattctcctacagtgaagacctaggaaaggacgttgaatttgaagttgttggtgatgccccggaaaaagtggggcccaaacaagctgaagatgctgccaaaagcataaccaatggcagtgatgatggagctcarccctccacctccacaggtgagtatggccccagccagcaggttgttaaatacccacaaagcagaagtaaaaacaaactgattattaggaacattgaccataaatccataaaactactagaggtgtgtattggtttggtattgattgttgtaatggagctttgaatttatgaaccatgaagacatttaaggctgggtgtggtggcttacacctgtaatcccagcactttgagaggccaagatgggagtattacttgaggccaggagttggagaacagcctgggcaacacaatgagagacccccatctctacaaagaaaaaaaaaaattaaccacgcatggtagcgtgtacctgtagtctccgctactcaggaggctgaagtggttcacttgaacccaggagttcgacactgcagtgagccatgattgcaccactgcactgcagcctgggcaacagcaagaccatgtctcaaaaaaaaaaaaaaaaaagtcatttaaggcctggcatggtggctcacacctgtaaccccaacgctttgggaggccgaggcgggcagatcgcctgagctcaggagtttgacactaacctgggcaacacagggaaatcccatctgtactaaaaatacaaaaaattagcygggcgtggcagcatgcgtctgtagtcccagctactcgggaggctgaggcaggaggcggaggttgcagtgagctgggatcgcgccactgcactccatccagcctgggtgacagagcgaggcttccggctccaaacaaacaagtcatttaagactgggggaaattcttatggaaatttcttacagaaaataagaacactttgttattttttgttaattggtttttaacagtttgaaatgatagtttactagtgtgcaaagtcagcctatgtagtagcaggttggggttttgtatgcttgttttaaggagcaataaatccatgcatctgactattttgagtgaacaggtgcttgttaagtatggaatttaggcatgttagagtttccttgtcaccartatgayttgggtatagtcctttcccctggattttcagtgctggtgcttggtatttttccaaataactgattgtttactgtattctgatttgaatatttactcctctccctttcttcctttagttaggaaactaaaggttaccagattttgacttctttgttttcatttctttgaccctatgtctgtggcattctttggaatatgtttactcttggctctaatgttctcttgagaattttggagacgaacattcagattatggcctgggtcattggttcataacctgttttttyccccctcactgaaattagaaaggtccgtcatcttcctttgaggaagagactatctggtagattttccaaaatcataatttgaaatgtacatttattgattctctactgtgggtaggtttccaaggttacagccatgagtaagataggtattctgcctttgattttgttggacgaggagataaaaccacctttagtatcagttctgcattggggatggttcctggcttcatcctctgctactatgtaagcttgggaagtcattcactgagtttcctttcctggaaagcagatactcatgtgatcttctttatagggttgtgatgattaaatgagttgtcatatgcacagtgctcagaacagttcctggcacattgtaagtgctgtattgttgttgctattgttaccactactaccattattagaatatgtaccctctgcttttctattggagaatgtggaggtagaatcaaggatgtgtaatgagtactttgagttacataatgcttgtcacaattttttgttttgattagaaaataaataggttcttatataaaacatttaaaacagtatggaaatacgtaatgtgtraagtgaaaatgcagccattcttaagtctggtgtgtattagaagagtcagctttcaattatagaaaatacaggtgagcacaggtaactcccacgcttttacccattttctttttcccttttttctgaaataagctcaagagcaagatgacgttctcatagttgattcrgatgaagaagattcttcaaataatgccgacgtcagtgaagaagagagaagccgcaagaggaaattagatgagaaagagaatctcagtgcaaagaggtcacgtatagaacagaaggaagagcttgatgatgtcatagcattagattgaacagaaatgcctctaaacagaaccctcttactatttagtttatctgggcagaaccagattgttatgtcctttgttccaaagggaaaaaattgacagcagtgacttgaaaatgattctgctccctttgaaagcattcattttgctagaactgttagacacattgcagtatgctgtattgaaagtaggaatatagttttaaaaaccctttgaacaaagtgtgtgcataaccagtcatgagataaaacaacacaatgcatgttgcctttttaatgtaaatacccktaggtatcattaatagtttcaaaatattgtggtttagtaaagttgatacctggttataaatattatgcctttatttttggctagaagaagaattatttttagcctagatctaaccattttcatactcttaactgattgaaacagattcaaagaagtatcgagtgctatgcattgaaacttgtttttaaatgttagatggcactatgtatattaatgtaaaacaatgttaatttactcaagttttcagtttgtaccgcctggtatgtctgtgtaagaagccaatttttgtgtattgttacagtttcaggttatttatattcgatgttttgtaaaactcaaataacgactatacttatggacmaaataaatggcatctgcattcttgttacacatgcctgcacagttcctgtttctgctgccttatatctactgcaggaatgtcaaattcttttcattaaaaaaagaactcggtcgggcacggtggctcatgcctgtaatcccagcactttggaaggctgaggcaggtggatcacctgaggtcagtagttcaagaccaacctggtcaacatggtgaaaccccatctctactaaaaaaaaaaaaaaaaattagccgggcctggtggcaggcacctgtaattccagctactcaggaggctaaggcagcagaattgcttgaacccgggaggcagaggttgcagtgagccaagattgtgctattgctactccagccagggcgatgagtgaaactccatctcaaaaaaggttcagaagatctccactgtttgccaaagacgagtactttcttttctttattcttggagacttcacatgtaggaagagtactttctaaaataaagctcttcctgcgtgtggtggtggtgcacatctgtgttccagctactcaggaggctgaggcaggaggatggctggagcccakaagttcaaggccagcctgggtaacatagcaagaccctgtctctaaaaaataagtaaataaaataaagcttttaatggcagtgggttttttgttcgtttttgagatgaagcctcacactgtcatctggcctggagtgcagtggcgcgatcctggctcactgcagcctccgccttccaggtgcaagcgattctcctgtctcagcctcccctgtagctgggattacaggcgccctccaccacgctcagctaattttttgtatttttagtagagatggggtttcactatgttggccaggctggtctggaactcctgacctcgtgatccacctgcctcagcctcccaaagtgctgggattacaggcgtgagccactgcgcctggcctaatggcagtgtttttaaaatttggattgtcagcagttggcctttgttgagaaaatgtgtgactttgcccaagcccagtaacttggagccttgaatttgagatgctggaaagggagtccttcctcctttctgcagtgtttgtctgggttgtcccctagtttaccaaagtccattttgaatgtaccatccccagcccaactccagcctacagatagtgccagaccgccagtaggtggagtagcactgtcttcctggtcccggacctcagagggctttgcctgttagggtactcttatcactcagagatgggccttgagttttcagagaacagaaasccattaagctgtttcccctattgtattcatgtgccctttgtgtttctggcaataatttattttatatttcaactaaattttaaatttctaattcatgtattgttccttgtgtaatttgtactgtaccattcagcttattaaccattactccttgttttccaccatttgtaaattcagcatgtaatcagagctttcagaaaaaccatgtagaagactgggtgtggtggctcacacccataagccttgcactttgagaggctgaggcaggaggatcgtttgagcccaggagtttgagaccagcctgagcaacatggcaaaaccccatctctacaaaaaatacaaaaagtagctgagcctggtggcacttgcctgtagccccagctattcgggaggctgatggaggaggatcgcttgagcctgggaggcggggtgtgcagtgagccaagattgtaccactgtacttcagactgggtgacagaatgagaccctgtctctgaaaagaaaaaaaaagtcatgttgactaagactcagccttctggagccccagagtggagtgactttcacctgtgagcttcatctgcctttaggtttttagaaggtgtttaattttcctccagaaaataatttgaaacttaactatgtaatataaaatgaaatatcttaggatgccgtctcactcttcaaactttttattctgaaaagctctctagaaatttgattttgaaattctgtccattcttacacatcatcctgcctgcctttatttttgcagtggtgccgtcataggtcactgcagccttgacctcctggcttcaagcaattctccctccccagcctcctaagtccctggaactacaggagctcaccaccatgcccagctaatttttaaaacttcttttgtggagacggtctcacgttgcccaggcttgtctccaactcctggcctcaagcgatcctcccaccttggccttgccaagtactgggattataggccctgagccgcgtgccctgtcctcaccctgctttgtagacacagttaacaatgtgttcccgatattttgtgtatgttcttttgttctttcctatttgaatgtatagtgcatgatgataagtgccagttaggtctgcggagttgtttctaatttggcagaccagtgtttttcatctttgcattaactattactacctttttcagcaggtttgttaggaaggcaggtctgactactagttgcagggatcctgtacaactagacagtgtaccaaagcaaatccaagctttccctaggtgcctagagggtggagacacttcagatcttgtgttgtattcatggtttttccatgtaaattgtctcaccagctgggagctgggagtagggcttgcaaagggagtttcctcaacagcttctttccacctccagcctgaaatatggtgttgacaaactgtcttccagcctcacttggaacagtgtggtgacaagtttacctagagaatccattgtcctgaagactactggctgctcagcatgtgccatgagaggttccaacattttaacccattaatgagataactgaccaggcaaagatcactggatgccaaaacctttcaggtaaaaggctgctgaggaacagaattttagcacaacactcaaatgttgctgcacaggtcacttgcaaaaggaaaacatcaatctttacttattttagagaggggcgtctcgctttgtcccccaggccggagtgcagtgatgtgatcacagctcactgcagcctcgacttctcaggctcaagtgatcttcccacctcagcacccctgagtagctgggactgcagatgtgagccaccacgcctaatttggaaaacaccaatcttcacaattgacagatctgactgccgccaccataatcaagtgatcaaacctagtgtcacttatgggacggcctgatgtttctgtgcttcctaagatgataccaagaacacagcagtatctcaccaagaaattgttgactggaatctaaccaagcatctagacctccagctgacaggaaatggagagggggtagaggcacaagttaacatttagaaacaatcaggtgagcagaatatctgtgatattccgtaactgccagggctcttcagtaagtgtcatttcaaaaaaggaaggagtaggcattctggggttaaaagacatttaagagacaacccaatacaatgtatgaataattttttttgcatcctagttcaacaaaaatgactataacaattcttgtaacaattggaaatttgaaaatgaaacgaatataggtaatatagaattgttttcttcagtacgataatgtgattgtaattatgttctttttagtgtattatgggcaaatcttcaataccagcaactttttttttttttgagacgtacttgctctggtgcccaggctggagtaaagtggtataatcatagctcattgcagcctcaaactcctgggctcgagcgatcctcctccctcagcctcccacgtagctgggactgcaggtgttacgccaccacgcctggctaattttttcaattttttgtagaaggggttttgctctgttgcccaggctggtctgaaagtcctgggctaaagcgatcttccctccttggcctcccccaaagtgctgggattacagttgtgagccactgcacctttctcaggctatatggggaggaaaacagcaaaattaacatttattgaacctaggtactgtgtgtgtttcattgtaccattcagctttgaaaactttcataatagaagtgaatatatgtatatatatgcacacacgcacaaatgcatatatacatacacaggcagtctattttccttttgtgcctatttgacttttccaagttttatattgagtatgtcctatgattaaagtcagaaaggcaataaaggttattaaacatataaggtggaaagagaaagtgttagtgggattctgggctcaacactgttgaagtcagctttacccatccttcttgttgctaggctgtgacttaggaaggattctctttcatttgagcctccagagaactaagccaggtggttcccactagatgaatggcccactcagaggctgccagacagcatttagttgataatagatgttcctgaaaattgtccatcagtggcatacatgtctgacgtggacttggcctacacccaaggaacatggccaaatgtaagccacttaccagccttttgtaatatacaaaaaccaaaaatgtgggccaggtgaggtggcccatgcctgtaatcccagcactttgggaggctgaggcagatagatcgcttgaggccaggagttcgagaccagtctggccaacatgatgaaaccccatctctactaaaaaaatagaaaaattagctgggtgtggtggtgcacacctgtaatcccagctacttgggaggctgaggcatgtgagttgcttgaacccgggaggcagaggttgcagtcagctgagatggtgtcattgtgctccagcctgggtgacagagtgagactgtctaaaaaaaaaataaatacatgaataaataaataaaataaaaatgtgaaaagtaaagaaaacccaaaaagatcagagaagaaaaaatgtcagcagatgtttctagtcattgtgacatgtagaggtagggaggacctcctgtttctttgcattttaaagcaatattcctgaggtccatttgaccattttgagggaggatatatttagagaagtatttttatttcacactgggagcacattatttgcattgtgctcacagaaggaacattttctttttcctgcatccaattcaaaacacattgcatccaaaagcttatttgaaaaattttagaactcaaactaaaaaaattaaaaatcaacagttgaactacggggctacaacgccactgtgtagtttggctatgttttgaagacaattatctcctggtaaagtaacattttaggaagttttgctaaatgtctctgactcatgccagttttaaaaattttaagtctagcaacaagtgatgactcacagattgggaaagattctgagcaaaagctttaccagaacgtacagcgtctgagaaggtcctcaggctttgcactttagagtctttcaatggtttactttgattctcagatcaaccagtctcaggaaatttaggcactgtgcagacgatgtcattcagccattctgtcaacacaaattgcagtgctgcactcggtggaaaacgttaccactgttgccagcctgggtggaaacctttgaaagcacaatgaactaaagactggcgtgaatgaaaacccaactcctcatgtcattttgacagcagtaggtggtgagttggagatctgagcacccacaccctgtgtgctgccacactgagaggcagatgtcccagttggttatagcagcagcttccgggaggtttggaagtcataaacaccaacctcatactgaaaagcctaatgccaggttgggcatggtggctcatgcctgtaatcctagcaccttgggaggctgaggcaggaggatcatctgagcccaggagttcaagaccagcctgggcaacatagtgagaccctatcactacaataaataaaaaattagccaggcatggtggcatgtgtctgtggtcccagctacttgagaggctcaggtgggaggatcacttaagccaggaagttgaggctgaggtgtgatcacagcactgcagcctggccaagagagtgagaccctgtctcaaaaaataataataccaaaagctccattaatctgggcatccccaaataggtcctccccattgagctgtagattggctggggttttttaccatggtacaaagttagggcagaaattcccattcctgcgtgcatggtaaggcttcaagacaagaaaagagggcctttgccagatgcagtggtttgtacctggaatcccagcacttggggaggtcaaggcaggaggattgcttgagtccaggaatttgggcaacatggtgaaacctcactctacgaaaaacaacaacaacaacaacaaaaattagtttggcatggtggcatgcgcctatagtcctagctaacctggaggctgaggtgggaggatcactggagaccaggagctcgaagctgcagggagctgagccatgatcgcatcactgcactccagcctggatgacagggtgggatcatgttacagacacacacacacacacaccaaacaaacagcaacaacaaaaaacaaaaacccccatggaaacaggaagcaagctgcaagtatcatgtcttagccttaattcttagattggttccccaatctatccatggcttcagtgatcaatgctttgaatcttcttgcatcctcaggcctaaaggggataacaggaccaggagagattgaagttaggctcaatctggcagaaagagtggggcctcagagaagaggggttgaaaaaattcccttgggtgcccagcctggtattatatttttgagtatgaggttggtttctatgactcttagagctcctggaagctgcctctcagcgtggcagcacacaggatgggtgctcagagaagaggggatggaaaaagccctcccagtggataggacagaacgtgcatcttgagcctggtgctgtgtgtgggaggagtggcccccaggagctgagctggaaaggtgtgtgtgcttcaggtgagagactggtgctggaaatttgacaagggtaaaaactgtcataggctaaggagaaagaagtgtgggtcccagaaacttcctgtggagtttggctgccattccccttccctcataacccgttatccagtcacagctgattgataagtggcctaggactccatgagaaaacccctgaattctgtcaatacctggggtccatacagtacagacaattaaggaggtctaatggaagctagattacaaggaggggcatgaggggctccttaaaaaatcaccattgtaggctgggcttggtggctcacgcctgtaatcccagcactctgggaggccgaggcgggtggatcacctgaggtcaggagtttgagaccagcctg

SEQ ID NO: 93411 - DNA, 52099 bp, Homo sapiens
accgtttataccaaaccaaaatcacgaaattcaaaatccgagtaccaaaaaattcaagccaagtcaaaaccaaaaccacagtatccagcaattcaagtcaagtcaaaaccagaacaaaagtgccaatgcaggcacaccgtgggtgatcaggccacgcttccactcagatggagtggggcaagttccaaagactagttttaccaagtcaagccaagtcaaaaccagaacaaaagtgccaatacaggcacaccatgggtgatcaggccacgcttccactcagatggagtggggcaagttccaaaaactagtcttaccaagtttcagatgtctggactccaagtgccagttccttcccggttcccggtgttcagccactgtgttaatcctccgcaggggcctgctatgtgctgctctggcgaggcgttccaccggggcaactgcctacccaggagcactctttggatggcatcactcaggctggccggagtcccccgcagggacgctccacggggcaggcctaagttgcctaaggggctgtctcagccgtccgtcagtcacctcgtttcctggtcagggaaccaagaaatgtagcaggacgagccgcagacaaaacctctcagagttgtagaaggaagggctttattcagctgggagcatcggcaagctacagccttaaaatctgagctcctcaagtgcacaatttctgtcccttttaagggctcacaacactaaagatttcacatgaaagggtcgtgattgattgagcaatctaggggatatgtgacaggggtttcatgcactggtacagaacacaacagggagtttcacaatttttttatacaatgcttggaatctacggataacatcaggttctaagtcgtaagttgatttttaactactaggtttaggccaggcaggcccagggctggtttcaggcctggtgccgggctgcctgtctttgatttcacttccttgtttttttcttaaaacaggtactgagtataaaacaatataaaacaatatgagaaggtctctctcttccctcaagagtgtatgactttgctgcccaggatgatcttgaactcctggcctcaagctattaatttcttcccaactcagcctcccaaagtgctgggattacaggcatgaaccacagcgcccagcttaacaggatttttcagagagaaaaagttttttaattttaatgaaatccaccaatttatctattttttcttttacggcatgtgcttttggtgtaatgtctaaaaactatacctacgcctaggttgtaaagatagtctgttttcagttttatagctttccattttacatttagatatatgatccattttgagttaagtttgtattacatgtaaggttggggttcctttgttttggtctttgacaaatggaagtccacaacatttattgaaactcttcttcctccattggttttaagataaatccgttggccatacttctgaatgtctatttatggattccctatcttattttattgatgtgtatttttgtctctcctccatggatacatgaaggaaagggccttggacacaaggcagtggggaaaggggctggggggccacacagagaaaggagaaggcactaagatcaggctcagcagcttctggatctgaggcgccggagattatttatgggtcaatctggcagcccctgggcctcaggtaggactgcttagcagtgaaaagggcgtcctgggtgcagccaacagggtacagctgcaagccattgttgaaggtgtcttgacgtatcagagaaggcaggtaaccaggccacatccctgggcgcccgcgctgtcccactcccttcctggtgcgccccgcctcgcggtcacaaggaccccaccgcccggggagagctgcccaccccgcgcctgacgcccagggcctggaatcgcgctgcaaccgcggcctctttccctggttctggccaggtgagcgaggcctagcaatctctcccgcatcacaaaggattgggtcagttaaggctcatccgaaagcatctgttgagcccctgggaacagcttagccaaatactgactgcagctacacgttaggaaacactggtacaaaccaacaggcagcctttccgcccttgcggagggagagactagcatcatcatcaagagataaaccgaagtgtgctggaaaacacacgagctctttagtaagagcaggcgacatgcaaggaaccatagtaacaggaacagaggtcctgaggctggatatggaacccaagtttgaggatgaccaactgagaccagtgttgctggagcacaaagtgccaaggagagaaatggcaggctaaggctggaatatgcaggtatgaagcgcaacctgggttcttctgtgccatgtgaaaggttctgctcttgatcctacggaaagtgggcaaccaaaccaattgttttccaaagatcctaaacaatgtaaagctaggctttgatcaaagggctaattaacccatacttactatttgttaacaggagtttcttacatcagatttaaagcagaaggctcacagcttcatttcaaccatgccactgtatccatgaaaactctgaaacaagtatttgtggacagcaaaatccacatgtactcaatacctagcttaaattatcaaaacacaaccaatcttgtctctacactaaaccacttcatttgctgactagtctttgaagacatgaaggtctctgacaacctcatgagaagtactgaaaacatcagtcttgtcgtataccttatctcccttgcctggcatatacttccatcaactaaatgatccaatgcctgtattctcctaaacacattaatgtagacacattacaacacagatcctgacacctttaaataataaacagagtggggagcaattttgagtttactatttatcatcttgggcccctgtaagatggatacaagaatgtgcatttccaagggtacctaagataatctatgtgcaatgaaatttggtaactgaagtgttgcacccgatatggaaaataccaagaataaaaaagaaagtatctcactagaatttcagtgagtttttgaagttcccttaaagttcttaaagtaatactacaatactgcacatttattccagatctatctcattttcttattccacaggatgagggaaactgtgccaggttacaaatgttattaactctagagaatcctgaaacaaccctgtcttattgtctcctaaaattggtacaggtcctgcgtttgctggtttaggataaaaaaaataagggggggtggtggtggtaatgaacatgatcttcatggtgagaacaggggacagtaagatacaaacattttttggcatatgaaartttattactacagtgttttcaccattaatatttatgatcttggtctttccttcttgcctttgtatagggccaaaagagaaacattggctactttgacaaccttaaagcggactccaggaatatcaccaacagcatgacctttgcgaccaaatccagcaaccagaacttcatcattttcctggaataaaataagaagtttatttctggtgttggtggcgatcacaaaaatactttcatgtgaggaaactcccttgcatcagataaaaatgtgagggaggccaccccaacaacagaaggtacgatagagttgaaatactcacctcaataaagttcaagcaaccgtcattgggtacaaaggctgtgattttcttgccattcttgatcagctggacccttacacacttcctaatggcagaatttggctgtttggcttcaactcctctgaaatacaaaaggcacagcactgtgagctggctttctgaaaaagattatcttttcatattaactagagaactaatgagaaactgtttctatcttttcaatctaacctcaaatggctgagctgaactcctgtgatgtcaacctagttttctgccagtcttaatttcattagcacaatgggggaaatttctagaccttttacagttataaaagtagactggagtggcagcgtgggcctgtagtcccaactacttgcgaggctgacgtgggaggatctatgcctagaacgtcaagatggccagcctgtgtgacaagggaccctatctcaaaaaaaaaaaaaaaaagaaaaaagaaaaaaggtatctgaggtaagaattagaaagtctgggccggacacagtggctcacgcctgtaattccagcactttcggaggccgaagcaggcattatcacctgaggtcaggagtttgagactagcctggtcaacatggtgaaaccccatcactactgaaaatacaaaatattagctggtgtggtagtgggcgcctgtaatcccagctacctgggaggctgaggcaggagaaatgcttgaacctgggaggctaaggttgcagggagtcttgcgctactgcacaccagcctgggtgacagagctagactgtctcaaaaaaaaaaaaaaaaaaaaaagtctgggttaaaatggctctaccatcaaatatgatagaactatatgaaattattattttaaaaagtcaaaaccagtcaaatactggcagtttcatgtctcaatcttaggtgtatgacctcaattaattctgatgcaagtcacttctcttcaccttagttttatcaagtcgataaagttcaatagctgacacgtgccatttacttataacaactcccacagtaaaggtgtttgtgtcctttacttcatcattgctagtatcttctccaattccttccaggccaacgttaaattaaaaccttaactacctaattcccaaaaactaattttaccaacttttaaatagaacaaacgctttgcaattttaccccacaatgcccaaatgaatactactacacaaaaacctgcaattactttcaaaacaagaattcgtaagttcatgtctcgaattcctataataaactaaaacttgacgggagcaatggacttacactttttccagcacgattccttttgcatgagaagcacctccaaaagggttggcctttagggctgtgcccaaatgagctttcttatactgtttatcatgccacttctggtctcgtcggtgactacggagcttcctagcagtacgaagtccacgacacttgcctaaaaattaaatattttagttcttccgtaaaaacacgccatctacgtgtttcccatcttctaagacactcgcctcacctggaataaacccttaagccgattggctctcgtactatttattggcctgtgggccaaacatttggccttcaagttgccctgaaccgactaataaacgttcgaagagggctccggagaatgtgttctcccgaaggacgaggccccgctcgaatgcccgggaggaagcgctggcctccctgcgtccctcggtaccccgacctcggcggcctccacgcctcatgggccccttccgcgccggaccatgtgcctcctggagcggcgcttccccggccctcccccatggagcctctccatggcatcccccgccctactctattcgcatccgcccgcccgtccccaagaccccaagtcccgcttgcagcgcccttaaaccggccacaacagctcacccatcctgtcggcgccacgggcctgagcgaaagagagaagcaccgcaggaaggagccacaagccaccgcgagcaagccccgcccagccaaggaccccgcgccgctgtctgcgccgcgcctgacccgaggctggggtctctcctttgaaaacgacgcgtttgcatcactttcctgagccagaatctgcgtcttatttaatttgcaagaaattcagagatatctaatttgcatggtttttttccccctttttcttttgaatgctggagaccggaggaacatggactaccaatcccagaatgcgttttatgggacccgctcaccgcgcaggcgctcttgcccaagccactgagagcgggacgcggggctaggtcagagtaggaaggagtcgctgagctgaatctttgtggagtggagtggggcgagagtcctccgagtagtctggaaaattagacttctgagccttaattcatacttataagcagctagtaaattgtaaaatatagtgaagcaatgtagtgtagtaactaaaaccccaagctttggagccagattgggcctttaaccctaaagttgccgtttattttgactggcgagtcatttacttatagatttatttatttttatttttatttttttctgagacagggtctcactctgtcttctaggctgttgtgcagtggtgcgatcttggctcactacaacctccgcctcccgggttcaagcgattgtcccacctcagcctcctgagtagctgggattacaggcttccaccatcacgcctggctratgtttgtattttcagtagagagggggtttcaccatgttggccaggctggtgtcgatctcctgacctcgagtgatccgcccgcctcggcctcccaatgtgctgggattacaggcgtgagccacsgcgcctggccatttaattaactctttaatactgtttctcctgtaagatgaactagctgtgagaggtttctgggatattggttcactcagcaaggatgtttaaaaatgccttctatgtgccagacgctgttgtaggtaccgggaatatggcggttaaattaagagggtgaaggtttctgctctgatacagtttatattctaaatgtgagaggacagaccagttagatagatgtaaattaaataattaaatagatgatttttacatactgtagagctatagagaaaatatagctggatgggtgatagtgacttggggatgggggtggctactctggatagggtagtttaaggtgacatctctgtgcagatgtagaatgggctagtgctttctaagaactgaaagatcagtgaagaaggggagcatagtgactgaggagtagtgtggcattagatggggtctgagagttacacaggaacatgtggagcctgtaggccatggtaaagcctttttctactcttctggtgatttaaagccattgtaaagttttgagcwtgggagtaggtagcaaaataagatttatatttttatggggttactctggctgttgagaggagaaaaagacatgaatctgggaggccacttgggaaggtattgcaatagttcagatgagagatggtgatagcttggaccctcagtggagacagtaaaaagtggttgggtcagatacactgtttggtggtagaatgaacagaatttgctcaggactgtaggatgtgagagaggagttaattacagcactatgatttttgacctcagcacttgggtgagttgtagagttgtgagttgtgagttgggtgagttccaaagtgggaaatacgaggagaggagcaaatttcaaaggaggaaatgaagagttctggtttggatgtgttaagtttgaactgtcaaacatccagggatgtgaagtggacagttggatatatgataagaagctgaggagtaatcaatgaataaatagtattaaaactgtggctctagttgagatagcttaggtgatgactgtaggtagaacagagattagagtcctgagcacaccaaagtttagtggtacagaagagaaggcaggtgaagcaaaacagatgaagaaagagtggccaatgttacactctgttcaaagccaagtgaagaagggagtgagaaagtgtgaaaagagataagatgaggactgagaattgccttttggacttgaaaatgtggagattactggtcactttgtcaaatggggactccatggagtactgaaagtgaaaggcgatgggatcggagtgaagagaatatgggagggaaggaagtctagacagcaactatagacaatttttgaaagacattttttatgtgcagagaaatggcaccctatttggaggggaatgtggagttggagggttttatttttaagatggcaacttttatgacatttttgtatgctgatcaggttgagaaaattaaaaatgggttattcagcagagaagggataattgcaggagcaactccttaagtagactagaagggtacccaagtggaggagttaactgtaggaacaataacagtttatgtatggtagtagagtgacaggtacagctgcaagtaaattggaagatttgatgataggaagttgtggaacttcttcacttttgacttactttttcaattttttcaatgaaataaaaagcaaggccatcagtgaagagaaagagtgggagaaaaaggtttgaggagagaaggtaagatgtgaaatcatcatcaatgataacaatataagcattagatagtatttactatgtgccagattctatttttggcttatatttattaactcattttattctcataaggaattttactgagggacagataamgataattttactgagggatagatatacaaaaactgaggctttggtgagtttaacttccccaagatcacgtatttagtaagtggtagaagtaagattttaacccaggtaatctggttttagaatcttgtatttgacccctcttatactgcctcctaatctagaatggtaggaaaatgcattgacaagaaaataggttttttgagcagttctgagagcccatttgaaatctgtgtttatgaagtgacatcagtgagttatgtgtatttcttcagattcacaaatactgcatgtttacacttatatgtggaatctaaaaattttgaacggatagaagcagtgagtagaatggtgggcgtgggagtttgggggatctggggagctgttggtcaaaggatacaaaggtttagtttgacaggaggagaaaattttcgagagacttgttgaataacatggtgactccagttgacccacaaacaatatgggtttgaattgtgtgggtccacatacaggcagattttcttctgcctctgacaccccgagaaagcaaaaactcctcttcctcttcctcctcctcagcctactcaatgtgatgacctttatgatgatccatttccatttaatgagtagtaaataaattttctcttctttctaattttgttattaacattcatttctgtggcttaatttattgtaagaatatggtatgtaatacacgtaacatgaaatatgtgttaataggctgtttatgttatcagtaagagttccagtcaacagtaggctattagtagttaagttttcggaaagtcggaagttatacacagattttctactgtgtggggaggtcagcatccctaacccccatgttgttcaagggtcaactgtataaataacaaagtttatattgaaaattgctaaaagaatagattttaagtgttctcaccacagaaaaatgatacaaaagtatttgaggtaatgcatatgttagttagctctatttaaccattgtacaatgtacatatatatttaaaatatgttgtaaaccataaatatacacagattttgttaaagaataaataatttaaaaataatatttaaaaaagatggagccacacaaaaagtgattactcaatgaaattgtgtcactgtcttacactgaaagcataaatcaactctggataaattaagggcttaaatatcaacaagaaaactttgaaattcttaatagagaacaaaggtgaatatctttttgaacttaggaaaggaaaatgtttctacacatgacaagaatgataaatttgatcatattaaaattaagaccctctattcatcaaaaacatctgaaagaaagtgaaaagacaagttccatactgagaattgctattcatagccacaaaacttacaaaggattaatattttaaaaaatttctggccgggcgtggtggctcacacctgtaatcccagcactttgggaggccgaggcagggggatcacgtgaggtcaggaattcgagaccagcctggccaacatggtgaaaccccctctctactgaaaatayaaaaattagccgggtgtggtggcgcatgcctgtaatcccagttactcaggaggctgaggcaggaaaatcgcttgaactgaggaggcagaggttgcagtgagccgagatcgctccattgcactccagcctgggcaacaaagtgagactctgtctcaaaagaaacaaacaaaaaaatcccttctacagaataatataaaagaacaaataatacagtgagaaaacatgacaaaggacaggaatagaccagccatggtggctcacatctgtaatcctagcactttcggagactgaggcaggtggatcacttgaggtcaggagttcaagaccagcctggccaacatagtgaaaccccatctctttactaaaaatacaaagaaaaaaagaattagctgggcatggtcgcgtctgcctgtagtcccagctactcgggaggctgaggcaggagaatcgcttgaacccgggtggcagaggttgcagtgaaccgagatcacactactgcactgtagcctgggcaacagagcaagactctgtctccaaaaaaaaaaaaaaaaaaaaagacatgaataggcatatcataaagaaggaaacgtgtatgacccataaatatttgaagaggtattcatcatgtctgattatgatataaatgttaaacttacttgaaattagttgggggaatacttcctctttttctgttgtctctaagtgttcatataaaattgggatgatttgttccttgaaggtgtagtcaaacatcctgtaaaaccattggggcctggtgttttctttatgggaagattattaaccacagcttaaatctctttaatagttaaagaaatacttgtaaaactgtaggttttttttttgagtcagatctggtaagtcatttttctgggaatgtatccatttcatctaagttttcaaaattatttcataaagctgttatgatattctattatgggtatgtatatatacatatgtgtatatatatgtatatattatatatttgtgttggaaggttccaaactatgacttcagtttctttagtagatgtagtgctattcaggttattttttcttgagtgagctttgatggtatgtgcctttctgggaatttgtccatttcatctaatttgtctaacttatggcatgaagctatttgtaatattctcctattatctttttaatatccatagatttatagtgatttctcatctttcattcctgattttggtgatttgtgtcttctctctttcctctcttgtttcttggtcagtgtattagtcaaggttcttcagaaaaacagaaccaatagaatgtatacgcatgcacacacatgcacacacacacggaggatttattatgagaaactggctcatgcagttgtggaggctaagaagtcccacaatctgctgtctgcaagctggagaccaaagatatcagttgtttaattcagtctgagtttgaaggcctgagaactggggctgctaactgtgtaaatcttagtgcaagggccagatgagatgagatgagatgtcagggagaaataaggggcaaattccttcttcttctgccttttgttctatttcaagccctcaatggattggatgatgtctacattggagagggcaatctgctttactgagtcccatgactcaaatgccaatcttatccagaaacatcttcacagatacacccagaaataatgttgaatctggccatccctagggccagtcaagttgatacacagaattaaccatcacagtcagctagaagtctagcaatcttattgatctgttcaaagaaccagctttttgtttcactaattttctgttatttttatttatttatgttactttttttctttccttccttttttttcagcatgaactatcaagcaatctattggttttttgtttgtttgtttgttttcatgtcatttggcctttattgtttactttcttctgcttgttttggacttaaatttgctctttctcttttttttttttggtttattaaagtggaagcttagatatattttttttaattctttctaatttggtcttgaggtctctctctggaaagtggctataaaatgcatccttgctgtgatgggactccctgatggttacggatgcttacaatgtacatttcatgggacacttctttatcctgggggatggatggcctaatgcctaagtgtctgacccatgcccaggtgtccctttcacagtatgcttgttttactggcagacaccctgtggttccttgttggcctgtgtctagttttttcctaccaagatagcctttctctaggagacccctgaccaggaaagaagtctgggtttgtcagcagatgaaacacagaggaggcagcacaacaaaacacatcacataacagaagcagtttgattccttgacagagcccagaaagaacagggcagcacaccttgcagggccgtttgggacacacatgctcaaccagtgggtaggggcaagagagaggcagagacagaggacttgtgggattaaagcatttattggggtccaaagtattatccaagcaggtttcccatggggagttttcattggtgggtttaaagcaagcaggcatgagttctgtggggccacgctgtgactgagagatggttactgtgatatttccgtgcagtccgtgtggggtgtgggggtcagtggggcatgtccatggggctgtatctagcttccccatagggaggttgtcaaccggaggcaattgtatcgggggctatctagatcgaccacattgaggaatgggaagaagtagagaaatggaaactgtgtcaagtgtgactaagccctgctctggcatgagaaagttcaacttatattcagaattgatgctgaggtaacatagcattatagaattcactacagtcattgatttgaaaccttcagtcttttctaatatatttaatgctctacatatccctctaagcactgcttgagctgcatgcctcaggttttggtatgttatgttttagttttaattcaattcaaaatgtttattaatttctcttttgacttccttttgaaccatggaattagaagtatgttacttattttcaaatatttgggaatttccaaatatatgtgaattttctatgaacatttgaaaagagagtatattctgctgatgttgggtggagcattctataaatattaactggcccaagatggttgatagagctattcaggtcttctgcatcctgtattcaggatgatagcgacattaagtggagggaggtgaggatcatatttggatggtggatcatatttggatgttggattatggctttcagtaatgagcttaattattacatttttatacattttaaaaatcccacaaataaggcatgaaccaatggtcagagtgtgttatgagccaaggattatgattgctatttctcagaaaagaaaaaaaaaagggatttaatttttgtttcttggtgcattaaattttgaatttttcactttgtgatgaacttattacttaatttggagccggaaaggagaagggactatcctttgatattggactctaaagttccctacaagagtcccccaaaagaatctgcttggagttagaggaaaaaaaacaagaccccagggctgcagactggtgagccggcaggaaagtagaggaaggtgaagtcagagaagtgggcagggccaacttgtgtccaaactgtaggctgggataagagattggggttttattccaactgtaatgagaagcactggaggggttaaagtaagagagtgacaagatcaaatctacatcttaaaatgctccccgtgcctgctatagaagaaccatgacagaggggcaaggcctcaggttatttaaggagggggctgctacaatagtccaggtgagagggagtaggtagtaataactttggaggtggagagatgtcatactcttcaggatacattttggagttaggtcatgaacgaaagagcaaaagaactgacatcatcactgtcaccatcaccaccatcaccttttctaatatgtactgagtgttattttggtgccagacataggactactaagcatttcacatgcataatatcttttaatcctcaaaataatccctatgtcataggtgctattagccccattttacaaagagaaaaggagacttacagaagttaacttgattaacttctttstttgttggttttcagattagtaataaggcagaattttgatttttaagtttagaaaaaattttaatgaatgtgaactaaataaggcacaaaatagatggaaacagaatagacaaacatcgggaaaactagagagttatcattaagattaaagtatttttattgtaagtttcaacctgctatctttgggttactatggagtatatgaaaaccaagagacaccatcactagagaatcctatttggtagctcttgcaatgtggggggagtgggagcaggaaggagaacaattttccctcttttctgttatcttccaagtagaaggagtttaattaataaactggtttctgtctgtcactttactcatcccatgccaggtaaggatgtgtgacatctgcatcacatttagaaagagtagtctaggcatgttcagcttttcctttttgagacccagcctgaccacagagcatgcatttctccttttttttttcctaggcaggcctttttctcccaccaacagcctagtgctgccaggataggctgccatgtctgtcttctgctgggaggtctcagttacaatccattttgctcctactctaagctttcctccattctctgtcctggccttgcacgccaataaaggtggcatttgggcctctgcttgtcttaccccttgtgctatttctcatttggtttaacatttagttggggtagaaaggcatttctatttgacttctctcagagacaccccactctctccaaccaagaagaaaggtaggtcttcatgtattagatcagttgatgaggagatttaggtcaagagtgatcatgattcttaatagcaccctgggcagagctagccattttgggagaagagccaaaggtttttacaatgttgacgatgaatactggaacatttaggggggttgggaatgattcctagtactttagctagaaaaagggaggcagcagttgctatggaaatgtgacaaattaaaataacagctttaagtgagcatgaagaagcagtgagggtaacaccgatgattacgtgctctgtgtaactactcatgatgaatgttgagtgcttcattttcctgattaaattattaaacacaattttttctttatccaaaatgaatgatatttcttttctttttttttttttgagacgaagtctcgctcttgtcacccaggctggagtgcaatggcgtgatcttggctcactgcaacctccgccttccaggttcaagccattctcctgcctcagcctcccgagtagctgggattacaggcaccaccaccatgcccggctaattttttgtatttttagtagagatggggtttcactatgttggccaggctggtctcgaactcctgacctcgtgatccacccacctcggcctcccaaagtggtgggattayaggcgtgagccactgcgcctggcctgaatgagatttcttatcctctcattctagctactgcttggtgcagtgattatttcttctcacatctattccaaggtagaactaaagaaataagtctgtgttgccatatgatcttactaatattcagagctgatctttaaaatctggttattataattaaacctctgtgcaggatctagggggagttgacaaagctgttctttgatgctctttgtaaaattcctggaagggaggtataattttaagatgcatattaaaagttattctccaggtgttcttgagcttggctgagaaccaagcaaagggaaataagcttctatttcagtagagacctttgagttctaagcaaagaaagataatttttcttactaggaaaagaaagataatttttctcactgcaatgtgagaaatgtgttagaatctccttccctggagagatttcagaactgggtagatggaccagatctgggttgtctatgagttcagtggggaaacagttgatctttggtgatggagcatggtagaagtgactcttgcagcccttgcattccacagtaaaatgaaaaatcatcaggattatttcaagattattcaaatataatatgtaaatgagtataatatataaatataaaaattcctaccaaaataagcatgcaaaatgtcagacactttatattattaagactttgtcgcttaaagggctttactgtaaaacagttttttcctttaaaaaaaaagaacaagagagaaaaggaaggaaatagaggaagaaaaaagaaaagaagaagagagggggttctgggtttgtattgctgtacaaaagaacagaagcaatttttctatkgatttaaaaattgctttttgatctcgttggttctagcaatcattactaattatgaggatagccaaaatgaatgactctgtagccagttcatagatacagccatttcgcatactatggaatagtgtgctcatgtatgtgtgaattttaaaattacttagatgggttttaagttagaattcacaaacatatttaattatttagaaaataatatcttggagttgttaccaagtagttgtatataatactccctttgaaactaagtgtgcatggctgggcgtggtggctcatacctgtaatcccagcactttgggaggccgaggcaggtagatcacctgaggtcaggagtttgagaccagcctggccaacatggtgaaaccccatctctaataaaattacaaaaatgatccaggtgcagtggctcacgcatgtagagtcccaagctactcaggaggctgaggcatgagaatcgcttgaaccagggaggtggagactgcagtgagctgagatcatgccattgcactccggtctgggcaacagagtgagactccgtctcaaaaaaaaaaaaaaaaaaaaaaaaagggaaactaagtgtgctggctaatttatatccaaataattcattttgcccttgttataaatgtgacttcaaggataaggcaacatcacatggcacatattctcaacctgagtttcatctcagtgtctctgtmaaggtggacaccacaggtgcctggtgagagcatgttttgaggctagtggaggccttttcctttcctgggacccaggtctgtgaggctcaagcgtctcttcctagtcttgccttgattaccacactaaaagtgtcatttagcaaatccttctaataaaggctcttttgtactttaggtaaagaaacccatatgagagtgtcttgtctattatgtacctaccactttgtctccttcatttaatcagccattgcctggggaagaggtggggctgacctcaagaaaggtcactggtttgctgggtgaatatcccaaaggtgtttacatttctgcatgttactgggctgggaggattttgggggcaaggactgtatttttcactttgtattcctggtaaagaatgtagcacggtgacagtcagtatttcttgaatgcacaaatttgtttcaagagcaggcctcctgtcttagtttagcttgagcagcccagaacacaattaagtgctattaatctggcatatcatctgtgttccaagaagtcaaagggaaacctaaagtgagaaacatgaacatttaaattaaaagcacttacaactatttaatgtagcatcctgattctaattaatgcagaagttaatttgatgaaaattggcagaaatcatggcagcaattttgctctgaaattgataaagggttatacagtacctcctgctccttggggaatggagggtgctatgaactgatgtaacctggattttgtgtgttcccattttcaagtggcagaattctatggaatacttgaattaattgattttcccattataattgcctaaagactcaggccttgggagtcataaccatgtggcacaaagtgggaattaattatgtggcattttttgataggatcattcattcattccgtatattttactgagcaccaacctgggctccaggtatgtatcagtcaaatagacatagtatctaccctcatggagcgtgccttgtgatgaagaaacagcatcaataagtacatgagaaaataaatctctcagtgcaaattgtgatatrtgttatgatgaaagtgaatagaatacasggagagctagagaggtgtgaggtgacttcacagagagaatagtatgtgcaaggtcacttgggtgcaatggagcttggcatgttgagggtgctgagaagctgagtgcgagccagtgtgcctggaacatgttcaggatgaggagctggtgttaaatgaggcaagagagaccagcaggggccacgccatgctgggctttgtaggagttacgtggatttggattttgaatcactatgcaaagaccattataattgattgaaacatttatgcaagttttggtctgagagcgttgaatgaatagagactgtgcacctgttagtcttcttaaggtaaatattagaattcttaagttagatccatttttgttcctgtgggaacacaattctatatggtcatatgtgattatgggaagatagatttttgatattcaaatattcaggtaacatatcatttagttatatatagtaaataaaaaaatgaagcaaacccaagttgtgtccagttgtaaagaaggcagcatggctgtacaacttcctgttctcctgtggagacagtagaggggaaattttccatgtgcctctgcattttctgcctgtattgtgagctagtccctaactgctctttgttctgaataccttttctaggatgtttgtatagggagaagccttgaacggtagaaatcatgtcccctttgtagcaaaggacaggcttgcttatagcattggaaagtagaggtagtrtttcccctcagagcaaagggcagataggtttactactcactataaaaaaattggggctccgtaagctcagggtttctctcctgagatgaagcccactgtgtgtgcaagtatccatctgggcctacctacattattccgaggggaaggggagctgaccaaatatactgatgcttgtgtcacttgctgtgcggtgagtaataaagtccttttctctgacccaggagtctgtgtcttctgtcagcctccataaaactgtcagggtaactagttagcttctaagtgaataaaatctcagacccttcacagttcttcacagaggctcctcagcagtccgagcaggaaggtacaatgccaggcaggtgacaccctagagctttgcagcctctaagatgtccagtgagcatttcttgtcactgtgtgaaacctacatgtgtgaaacctactrgctactaattattatgccttgaatattcttaaccaagtgggagaatgtttcaacaacagaaagaatactatgttacaattttaggatcaggacataaaatctattaaaatgatactttatttaaattgaaaatattgtgtgtgtgtctgaaaatgtaacccaagcatatttccatgaaagattcttttttttttttttttttttttttttgagatggagtcttgctctgttgtccaggctggagtgcagtggcatggtcttggctcactgcaacctccgcctcctgggttcaagcgattctcctgccccagcctcccaagtagctgggattacaggcacctgccaccatgcctggctacttttttgtatttttagtagagacggggtttcaccatgttggccagactggtctcgagctcctgtcctcgtgatctgcccgcctcggcctcctaaatgctgggattacaggcgtgagccactgtgcccagccgaaagattattatgtaataactagtaagggactaacactgtcctttctcagggttcacagaaccattattgtcacaatgcaggatcatcattggcttgggctctcactttctcctgaccagggccttgaggagtaggcactgccactgctcccataagagaataccaagtactgctctggcagctgcaggagatgttctgtatcttgcctgtccaatacagggggcactagccacaagtgtccactgaacgcttcaaatttggcttgtttgaattgagatataagtagcatggtggctcatgcctgtaattccagcacttttggaggctgaggcaggagggctgctggagcccaggagtttgagaccggcctaggtaacataacaagacccccatctctacaaaatatagaaataaataaatttttaaaattatacgctagagttcagatttagggcagaaaaagaacataaaatgtttcactaataatccttaaaattgagtatgtttgaaatgatagtattttagacaggttaaataaaaatactgttaaaattagtttcacctgtttatttttacttctttttaatgtgactagaaaattttaaattccatatgtagctctcattctatttctattgaacaatgctgttctagatccttgctactcaaagggcggttctcaggcaagcagcatcaccatcatcatcatctgggagctggttaggaatgtggtatcctacaccccactccagacctactgggtcaaaatttgcattttaacggaatctcatgtgatttgtatgcactttacactttgagtagctgagcttccctaagactaggactggctggtttagcaaactaaaaatataagatgcccagttaaacttaattttcaaataaacaattaatacattttaaatatagtatgtcccaaatattgcatggaacatacttatattaaaatcatttgttatgtttctgacattccactttaacaggttatcctataggttatctgtcaacattacctaaaactaaacttctcttatccagacctgcttgttacttgaaattccacagaatcaggaaaagaacagaaagagaaaaggagaggtgaagagtagaagctgggggaaatgaaaacggagaagaaaagggagtatgaggaggcagtaggaattagatggggcacggaaaggccacatttaaggccagcgaccctttttattttacaatttttgttagcaactttcttccttattcctgcattctcccacttcctctagtcattctgctttattctcctcttcttattttccgttggggtcccctgaactatgttggaagaaagtggtgtgtgagaggaataggaatgtctgctcagcgccaagaccccagctttcctatagtctatcatctctgaaattttacttacaaatagcccttttccgctaccagtactttgtctttaagccatcaaggttcctaagtgcccccaaatggtggcacttgacactttcgttttggaggattttctttattgtggcattttaattgtatttttaaaaaatgtaaaacaactcttaggaattttgtcgtttgttttgtttttcaggctttttaggggagtgaggtgaaaggagaggccagcagggaaggaataacaataggcactctatttagctaagcactgagttaagaagaggctttcatggcctggcgcggtcgtggctcacgcctgtaatcccagcattctgcggggccgaggcgggcagaccacctgaggtcagtagtacgtgaccagcctggccaacatggcgaaaccccatctctactaaaaatacaaaaattaactgggcgtggtggtgcatgcctgtaatcccagctactcgggaggttgaggcaagagaatcacttgaactcaggaggttgagattgcagtgagccgagatcgcgccactgcactccagcctgacagagcgagactggcttaaaaaaaaaaaaaaaaaaaaaaaaaaaaaaagcctttcatccatgatcccatttaatcttcacaacaattaagtgtgcctgtccccactctgcagatgaggaaacaaggctctagagggaaaataacctgcctggtgtcagcttgctcactggtaagcagctggccaggcacttcagcttctgactccaaagccagtgctcctcaccattgctatccacacctcttggcaaatggagccttatgaattcaacaggaaactgtgaactaggacatatatgtaactttagggaagttcccgagatttttatttattcacttgaaaaatatatgtaaaaatatatacttcatagattttggggagaaattaatagcttcctgaagtgtagtatgaaatatataatagtatgacatatatgtagtatgaagtatataaaataaagagtcttaagagttacatgacagtatcaaaacaatgcaaatttctaaaatgagcttaagtggcaaatatattttctttaaaaattggctccttaataatctttccatgagatgaataattaaaaacctaaatatttgtttcactctatactctcagcattatcagacccctcccttcctcccctcaccatggaatacattctgagaaagctgccctgttattggttaaatatgctgtcagtcacatggcatgaaaagtactgcctctgctctgtttgcatttatgaattaacagatttgcttgctttgaagaaactgattcttttcttgatgggaaaaaaaaatcttgtttagtttttcactgatttttttaggtataggactttcactaaccttggaccatatatttgccaggaagaatgtaaggtgagtaactgcacatcttttaaagcaatgtgtttgtgaacttaaatgcaagtatgaaattaggtggctctgtgatttctttatgttgtttcatatcgacatttacttgtgattcaaaatgaataggctagatcatacaggtagctacaaaaattattgaccagagtttatgcttgaggtaaaaatataagcttttttataagaggcaagggttacttgttcaaaatatccaagaaacttttgtagtatgtatcaaagtatttatctgtgagaaaatgactcctcaaatcagttttcagatttcttttatacttacaagtgaatgttaattccacagtatcccctgccattattatgtgagaaaagagtaagaaaaaaattgaaaacctcagaaatatatatcctgtccttcaaagaaaaggtgttaaattgttttaactgttaagagatggcaattaaattcctgtttctatttctgttgtccctttggcttctttatacgtcatataaggaacacttagaggtttttctataaaaaagaatattcaaaatctgaatagcaattaaggtatgtcatgtcccccactgactcattgtgtgccatctcaacaaatgcttcagggaatttagtgtgaacatagcagacagcagcaagcaggagaatatggcaaaactcgggttaaagactccttagtccacaactgataaaatctatacatatagacattaacaatttttttcttccattgtttctgagtcaattggtgctttcctgcaggttcacttttgaatagtgacttctattctttagtggttaaagcctagttctgtttccccacctgggttacacagaaatgcctgatttgtgtattacactagtaaaatgtacaccaagaattagaaaaatcctagttctgtttttaagacaaagttaatgggcttaattttagcttcagaagctttagatcttagaaatcacataagtcaatgatcatttgaatctaatattatggctcattaattcattatgaaggaaacaacagttgttgttttgtgtgttctttcaaataatggatctgaaatttaaaatatctttcaactccctggggctattcaatattctgtctgtaggaaggaggattgtagtttaagctcgatacacggtttctaaacatagagtgagtaggggtcattattctcactttgcacatttcttcctcaagttgggtttattcttgatccaaaaagaaatcctgtgtgacctcccattttccactttgatttcagagtattttcatcaatttcttagttcatttgtgcatgcaacacattttaaaaataattggtgcttttaagtagcaaggccccatgctagatgctgggtctacaatggtgagcacaacagggatagtccctggcctcacggactaagtctaatagggaagcccttgttaatcaaatgatatatattattccaaataaactttgaaatgtgttgtgaaagaaaagtataggaagcaatgagcacatacaacagggggattggaacttgcacaagttagggattgtgttcctgaggaagtgacacttacgccatcatctggaggagatgtagaaaataactaggaggatggagaacattccaggtggagggamcagcaggtgctaagggaaaaatggaccatgaagtgttcaaggaactgaataatgctagagtagcggaagcagagagagaagggaagaggtgaaataaggcaagcacagctggcaggccgaagtctgcctgggtaatgtctgggtattcgtgcctctttcatatattgtattcagttacgttttaacctgtactacaaagtctggagtttaggtaggttagatgatttggctaaagcatatctctattataatttcattattacttggatgggaacctcacttttgttgctcaggaaattaaacttgtactcacaagagacttaatataaaccgtaatgctaatttataaatttctaaaggaagacatctttttaaaaaattaaaatagaaaaatttatcaaagtaatacatgtacatggtttcaaaaaatcaaaaggtgacaagacacattaaaggaaaaattgtcttctagttacttctataggcaaacattttcaaatttttagttgtttcttctgttggccactgcttgtattagtcaccttttttctagaaacaaaacaacccctacattgcagaartttgcagcctcaaacatttctttcttgctcctcttacttctgacagctacaggygggctgctgtgaccctgctttagctctgtttccacttctcattccaagtcccagactgaaagagcagcccctatttgggcatgccattcttatgacagagggagtggggcaagagatggcaggcacatgcagacactcgcaacttctgcagaactgccacactgttgcttctgcccatattccattggtctaattaagatgtatagctgaaactggagagttccgtgaccccccttgcaggacatrcaacaggggtgtggtgcatctgtttggccactgccacatgtgctcaaaccttttacaagaaggggagcatgcagatgggcaggtgcaggaaccagggcaagtgattttgggttctggcctcatggtagcatctaggcttgggttcctgtgactctcaaagccccagtgggtgtgctacagtgctcttttagctctgccatcttcagacagcttaagtgttaaccagcttagtgccctcttggaccccgggtttttgtttggcatccaggaagaatcaggtcacacagggctggaaggatggtgaatgtgggggttatactgagtggtggaggtggctttcagcaggctggatggggagctggaagggtgatggattgggggatgatcttcccctggagtttggctgttcagcagctgatctcctctctgactgtccccagccaaactcctctagatgttcagatgctgcttctcgtctctcttctctgtcatgctgttctgctgctcttctgttcacctgttcatctgctcatctgcttgtggagcctggggtttggggtttatatgggtactggatagggggccctggtgggccaaaaggcaacattggggtgcagaaacaggaatgcctgttcccatttagggccgtgggtttccaggcttaagggtggggcctttgccaggaactgcccccttctatccagtatttcctcgtctgctgttcatataatagctaagcctgatgatggggcaggaagtattttccacccacagggaggaactgcaagtcatatgccctagggggatgcaaaatcctctcccagagaaggaaacaaagactgggtaacaatcatacaattcaccatactgccataatatcaaaataatatgcataggtgatttctccatttatacatgttagattttataacaagttcctttattattgacaaagttcctgtcttcaatgtcctcatctttctttcctccaccccccatccctccaatatagttacattactactttcagttcatcagtgcttgcgtcaatatgactatgtatattgttcacagacaagctagttagtagagtgtaattttgtttctttctttcttttttttttttttttttkgtgcaacgtttctttttcccttgagttaaaaatggcctttttgtagytgcaatttcaaaacatgcatagtcttaattcttttcacatattctttcctctaatatatagtggtctctcaaattcccctttcacttagagatctctctgtaggtcttccttttattgtcctcttgctccaatctggattgattctatgtctgatgtacaatgggtagtcttaggttttgcttcaccactcttctagtgagatctgctgtttatgagagcctgtgctttctctttgttggcttttgcccttacgttgtgggagcatgtcctccattagcttctgtgaaggggtgagagaggtgcattggctgaatccttgcatgattcttgttttttacttctgcaagcttaataggacattttctttatccttagctccaaaatgatacaagtaccttagctcacaaaaatgaactcaaaatggatcacagacctaagtgtaaaagttaaaatttaaaaactaggagaaacacaagagaaaatcktggtgaccttgttgagcaaatatttcttttagacacaaaaacataggccataacagagaaaaagaatacattggactttatgaaaattagaactattgatctttgaaaaaacaccattaagaaaatgaaaaaggaagacagaatgcaataaaatatttccggtgtgtatctctgacacaggacttgcatccagaacatataaagagcacttatggaggtcaatgaatttaatttttaaaatgagctaaagatttaagcacacttcacaaaagaaactatatgaatgctctataggcataagaaaagatgcttagcatcattaatcatcagagaaatggatattaaaattaaacttagagaaaatgtggcacgtatacaccatggaatactatgcagccataaaaaatgatgagttcatgtcctttgtagggacatggatgaaattggaaatcatcattctcagtaaactatcacaagaacaaaaaaccaaacaccgcatattctcactcataggtgggaattgaacagtgagaacacatggacacaggaaggggaacatcacactctggggactgttgtggggtggggggaggggggagggatagcattaggagatatacctaatgctaaatgacaagttaatgggtgcagcacaccagcatggcacatgtatgcatatgtaatttgcacattgtgcacatgtaccctaaaactttataataataataaaaaaataaaataaaataaaattaaacttagctagcaacccacacccattggaatggttaaaattaaatagattgatgataccaaatgtcagcaagaatgttgaacaacagggaagcaaaattgattgacagcttttctaaaaaagttacttctattatgtgacttggtcattctattcctgtttatttattcaagagaaacaaaaacatattcacacaaactcctatacattaatgttcttaaatctttatttatagtagctccaaaccagaatcaccccaaatattcatgactgtgtgcacagacagataaagtatggcatatccatacaatgaaatatttcttaacactaaagcagaatgaactactgacatatgcaacaacaggcatgaattttaaagtcattacgatgagacagaaagaagccaaatgctaaggaatatgtatgattccatttatacgcaattgtagaaaatgctaactaggctgggtgtggtggctcacacctgtaatcccagcattttgggaggccgaagcgggcggatcacctgaggtcgagagtttgagaccagcctgatcaacatggagaaaccctgtctctactaaaaaacacaaaattagccgggcgtggtggtgcatgcctttaatcccagctacttgggaggctgaggcaggagaatcgcttgaacccaggaggtggaggttgtggtgagccgagatcacgccattgcactccagcctgggcagcaagagcaaaactccatctcaaaaaagaaaaaagaaaaaagaaaatgctaactaatctaaagtgacagaagcaggtctgtagttgcctggggttgagggtggagggaacaactcagctgcagaaatgcaagcggaaactcttttgggtgttgtaagtattctgtattgttattatggcagtggtgtcatgggtatgtgcctgtgccaaaactcatataattgtataatttgcatgaatgcaatttactgtacataaattatatacctcaataaagttgatgaaaatgaattgcatgcatgcataaatttattaatagcaactagtagacatcatggtcaccaatttgtcatcttcagaaattcttattagataacagggatcatattacagagagaatggtgcatttaatttgtaattggttccatataattaattctaaagcactttactatgatacagatttagtaactcttcagctacaattatgttttgtatacatatcatgtaatatatatctttctctaattataaaaatgttgagtttatatgatagtgacatatagagaccttatatcacaggaattgttaagtatagagtttgctttgcattctcatatactgtaggtaaaacttatggaaaacctaaaatatgcaataaacaaactgttaaatccttaggacatgtatgacaaaactggagatttaaacactaattttatgttaaataattatcagtattttstagatgtaattgtgctgttatttttaaaagttattatcttttagagatatatactgaaatgatataatttttgatattttattcaaactaatatcacacgggggaagagggtgtgcttgtaggtgaaacaagattggttataacctgataattactaaagctgaatgatgggtccaggtacatgggggcttattatatttttctgtttatatttgtgtatgtttgaaatatcctgtaataaaaaatgtgtatatcttctaacttagaaatttcacctcaaggaatttatcttaaggaacttctcatgggtgtgaacaaacaatccacagtaatgttcaatgcagtattgttataatgctaataaaattgaaaacaaatacttaagagtagaaatttggttaaatatattatgatacattttaatgatataataccacatacattaaaatgtgtcaaaagtatataattacatggaaaatatttgtgatatagttttaataaaaaattgcaaactctaaaacagtatgcccacaaaaatccatttttaaactgtaaaaagtaaattatatacatatgtgctgtgtgtgtgtgtttgtgtttgtatgcatatagagaggatatatacacacacaaactcaaggatatatataataatttatatgctcataagtttccaatataactttttggtaattgagtcagtcttttttttgaaaggctggatgttttggctttgataggttaacaatgcaatgtagtataaaatttcactgtaaaatgttttatatgctttattactttgttattttatatttgttattggttaaaccttagcgtgtagcacattgcttggcacatagtaggcccccccataatatcattcaatgaataagaatcaggtttgatttaaaataatttttctggctgggcatgatggctcacacctgtaattgcagcacttggggaggctgaggtgggtggatcacctgaggtcaggagttcaagagcagcctggccaacatggtgaaaccccatctctacaaaaaatacaagaattaatagggtgtggtggtgcatgcctgtaatcccggctactcaggaggttgaggcgggagaatcacttgaacccaggaggcagaggtggcagggagccgagatcacaccactggactccagcttgggtgacagagtgagactccatctcaaataaaataaaataaaataaaaataaataaaataatttttctttctaaaatttttctttatttttcattttcttttttgaggaacatatgttactttctctctctgttaaatgcagagacagcaggggagagacatattactgtttaaatgggaaattcactgttaagaaatgaacagttttggcaggctgtttctgctcctctattctgagatgtaataaagtgaaatatacttcttaaaatttcgtgtaacatctaaattatggatatttattcagcatcttttaatttttttttttttctaatttcagttctccaacatcttcaaataaagaagtggttatgaggaatggtaagactccagttgcccacatgattccttgtggggtggagaagggctttttctgtgatagaattccctgaccagtggtgtctgtaccaggagtcactcatgtgaaatcttttatactagtgcatcayaaattatgagccaaaaggggctcaagcttgatatatgtgacagtgcttagcattgctcccaattacattaataaatgacatttagcatttggtaaccacatcatcatttatttgacagatcagaataatggagatatgaaaccattccagaatttcacaacaataccaatcacacaggtatggctatgtcaggaaaccagattgtaatctagctctaaaaaacttaaaaacacatttcaatcatgtctgtgctctgtgaaaatataaataataattgtattaataagtaacatatttttgcttcaaatttgggtggggaaacatattgyggaatctcttctttttaaaagtcaacttttattttggatacagagggtccatgtgcagatttgttacgtgagaatagtgcataatgctggagtttgcggtatgaatcccatcaccctgatagtgagtatagtatcccataggtggttttttaacccactccactccctccatcctccagtcatccacagttttgatggtttgcatatttatgtccatgtgtactcagtgcttagctcccacttataagtgagaacatgtggtatttggttttctgtttattatggaatcttatagttgggaaaaacctaaaatacttaattttacttgctctcttatattttcattacaatattcagcttcacttttgttgctataataataataatctttagttactgataagcttaagttgctgctctctattaactaatttttcttttatctgtatttacactagagtaattggtgcaaatttctttctttgtattgtacattttgtgggttttaataaatgtgtaatggcatgtatttatcrttacaggatgtgaattagctctttcatttctaggaagccttttgtaacatagacacaaattcatctcttatgttctttttatttggttaattaggctctcaactacaatctgagcaaagaagggcatttagaaaaagaaccttggaatgcattcagccatcatggcccagttaatgtctccatcaatggaattccttgcattctcttctgggccaaaagaataatgattaaatttaagaatcaaacctggctggaccttacagacgagccatttggtcagaaggtaactgtggaccctgacaactcaaattgcagtgaagaaagtgctaggtaagttgatctctcagtttraggaagcccctagggctattgcgttctgttaactctgcattcaactttttttgtcatttcagaaaaaaaaagtaggctcctttgtataggaccctgacacacatctttgaggaagtatttactgtctaaaataaaggaacaagtcagaagttaacttcaaaaattgttggctgggcatggtggctcacgcctgtaatcccagcacttcgggaggccaagggagtggatcacctgaggtcaggagttggagacaagcctggccaacatggtgaaacctcgtctctactaaaatacaaaaattagccgggcgtggtggcaggtgcctgtaatcccagctactcaggaggctgagacaggagaattgcttgaacctgggaggtggaggttgtggtgagctgagatcgcgccattgctctccagcttgggtgacagagtgagtgagactccatctcaaaaaaaaaaaattgttatattttcccggcagttttcttctgaacctttttgctaattgtcggaataacttgtagaaaatgagactttggaaagcaagggttctcaaactcgttttgaaaacagcaaaggattccaggcttggtctcaactccaaatggtaggtgtcaaactacttttattctatcagggaagagatcacatatcccagcagggtcatacacattctagtgggtgacacactagccaggacaaatgcttgactctgcggaggtagggggccggggggtgtcagtgtgcagaaatagtggaatattgcctgtttgcaaatgcgcaagggtactttttaatggctaaattccagataattcttaaggacatttcaaaatgattggaataattagttttgatttgagataagcagattaaacaaayaacatgtttgaagggcaaatcaatttccaatgcctttctctgcttttcagtcatccaagcaaaaatttttgcttttatttattttggtccagggagaggaaatctggcatgtcctgcttgctttctataaaccttctttcaacatttgttggtaaaatagatccttttggaagattctctgcatttgttctggtttggcttagatgggtaggatgctttatataaagcataacagtgtgtgtgtgtgtgtgtgtgtgtgtgtgtgtgtgtgtgtttgtgtgtattctttttctactttatgtactttagctggaaagatccttttattcctgaactttacttctcacttaaaaattcttgacaatgggtaaaaatggattctattaatatacaattgaaagtcatattacaaatcttagtatcttgctgttcagaatgacaatcttttaatagggatttagggaaatgtacgtggaagcatttagagtcctctcagatttgtttatcctgttatagctcaactatccaaggctatcaaagagactacgggaggctgagagctcagaaccttttcctggggtgctaattaattccccacagggctctttatttgtggtcagttgcaaggagaaaggctgcctgcttggggataatcttgcctgtctatggctgactggctctccttgattccatttatcctgaccctagggcatctgtgggagaaaatcagggtcctacagttgtttgtttgtttatttatttattttatttcattttattttatttttgacagagtttcactcttgttgcccaagctggagtgcaatggcatgatctcagctcactgcaacctctgcctcccaggttcaagcgattctcctccctcagcctcctgagtagctgggattacaggcacgtgccaccacgcctgactagatttttgtatttttagtagagatggggtttcatcatgttggccaggctggtctcgaactcctgacctcaggtgatctgcccacctcgttctctcaaagtgctgggattacaggcttgagctgccrtgcccgggcacctacaggtttttcttttttttttgctgggttttagagatcttgtggttactgggaacctagagacggaaagaatgaaaacttggcttctaggcccagttctgccagtgagctttgtgattttacaggcaggacctgtaggatcatcatctgtcaaatggagatgatggcatctattcattatagctatgaggccttgagcatttactgtgggccaggcacggtgtgaggtcttcataggcacatgtctgttattcctcacagtaactcttagagtcacaggcagttatcacagaggttagaaaacttgctaaagtcatggagcatgtatgttcatagagctggggttgaaaacatctttaaaaatgaccatttatcttcttcctcttggccctatctgacaaggttgtgaaaaacacatgaggaaatatatgcataagcactttgagatcttgtcaagtgctgttcaaagtattaatagtagtagcattattttccttcctgacatcccaatgataactagagtgaaatagtgtctaatttcttcagtaagcttcgggtctcacaggacacaaatgaaagattgggcagaacctgactgtctttttggtcactgcttagaattctattcaggtgtgagccctgagtgtgcagtgtccacctgctggagtcctgcacacagagtgtgcaggcatcctggacagcctgcccaaagaggagcaacaggaggcttccaggaagggaggtgtcaagaaccagctgctgagacctagtggctgattcctgtgaattgcatggatragccagatgcccttgtggtgctggcaaggaaatcttaagatcttaagaaggagaatgggagttgctgaaataacaaaccgaaacaaagacataaccatgtaaggtcaaaagcacagattaaaaaaaggtgaccacgttttagctcttggaaacaaaatgtttagagagaggcaaattgttggcagacagatttgctacggaagtctttttaaatagtgaaagccctgcaaatacagcataatcccagcatctgtgtgtatttggaatttaggcaattatagcctcaagaattcagaatccattttacatgtgtgagagtagaacacttgaaagagtaaaaagagctcctttttgagcagctcttgttccaggttgtatttctcctttgtgttcccaattgatgtcacagtgcctgatacttaaagatcctcatggctgagcacagtggctcacacctgtaatcccagtactttgggaggccaagatgggcagatcaccagaggtcaggagttagggaccagcctggccaacatgatgaaaccctgtctttactaaaaatacaaaaattagccaggtgtggtggtgcatgcctgtagtcccagctacacaggaggctgaggtgggaggattgcttgagcccgggaggtggaagttgcagtgagtggagattatgccactgcccctgagcctgtgtgacagaacaagaccctgtctcaaaaaaaaaaaaaaaaaaaaaaaaaaaggcaacaaatattttcatcatgccccaaagttactgtgtgtttctttgtaatgcgtctttccaaccactgtcacatctccagataaccactgatctgctatcattatcaattagtttccatgttctagaattttatataatcacatgtgtgtactcttttttagtgtagccactgtcacttagcttaatgattttgataatcttccatgttactgcatctgttaatggtatttcccttttcattgctgagtagtagtccatattatagatgtaccacaacttatttatctattcacctgttgatagaaatttgttttttccctcactttttgcataactttccaagtacagtcactatgaacattcatgtacaagtctttgtggcagcaggtatcttcatttctcttaactgtcattccaactaggagtagaatgcctggatcatatggtatgtgtatgtttacctttttagaaaacagccaaactgttttttaaagtggccgcatcatttttccttttctcaagcattgtatgagagttccagttgcttcacattctcactaacacttcgtatggtcagagtgagactagagaaagcatttttatatttctgcatgtttaggaatttctgaacaaatttttactgggaactgggttaaaagataagtgttagagttagtgagagatttacctcttgaaaggaatgtgttgtgttcatgtatcaaggggtaatgaaactcaaggccatagagacgttccaggggttagaaactcagagaggcttatcttatcctcccctcggagatatttatttacataccatgggtatgagacctgcagccatttgtctccttatggtgagcgatttgcttccatccaaaggctaattaaagtctttcatccaaagactaatcatccctcttctcttcctaaggagaatttattgacactagaggagcaaatgtttctctccctctcttgggaggtgagaaggaaaccacggtctctctcctatataagctcccagattcataattttggtgttgctcatctgtattacaaatctcaatatgtgtaggatgacatctggctcttctcctgctgcctgggtggaggagaattggattagaagggggaaccaatatggttgttcccatgagtaagtyaattcatctgtctttgctctgggaaatcttatgtttactcttaggaaaacaggaataaatgtaggtattaaaagcttaagagtcagtttaaaaagtgttttagccattctgattcctgtactgtgttatctttattgtggttttattttacattttccgaatgtctaatggtcctaagcatcttttcatgtacttattgaccatttgtatatctttctttaaaacatgctcgagtcttctgacaatttttatgatttttacattgggctgtcttttgttgagttgttagtgttatttattgtattctggatagagttctttatgtatacgtgttgtgagtattttctcctgttgcgtggcttgcctttcttgttttcttaaacagtgttttttgaagagtaaaagttctggattttagtaaaatgcaatttatcagttgtttcttttatggttcatgcctttgtacttttttcaggaaaccattgcctacctcaagattaaaaaaaagttctgtacattttgtgtgttaggtgttacgtgatccaccttgaggtaacttttgagtacatatgaagtcagggtcattcctattttcatagactgcgttgtttccttttcttaggttgtctttgaagcttggtgatgctggaaaccccagaagtcttgctataaggtaggtaggacaccactttggagtatcgcagtttcagcacttcagattagctctatagaatttattcattccacatgtgcgaagcaagggcttgctatatgcccaagcactgtgacacattgcatgccacatcaacctaattaaacggaaaagtyggtgctgtgatatgatgggatcctatactaatgctttctttctaaaagtttctaccaaaatacccatagttcttccctctcccccacccccatgccgcctgcattagggacttagaaaactcccaatcctgagaatgtaatatccttttcttctgagaaaagaagacaaaagaaaaagctctaagggctggggctctggtttgaacttattttctatagcttcttataatgaatcacacttaccatttaactacagtgaaaaagcctcgttacgtgtattccccagcagacaatcaacagaggcctacagttttttggtgtttaggtatgaaaggatgcatctgtcaacagagactttagccaagcagttaggaactgctcctgaggtagggggagcaatttgaaggctttttttttttcttataaaaatacagtgcttcccttcctataagacaaacttgttagtggagataagtagttgtgtctttaacattatttggaaaaccagcaggattgtgctagggcagtctttcttaagctttgctctatgggacacttctgctctgtaaaaatatttataagattttatgaaaaggggattctgtggtcaaatgtgtctgggaacgactctaaaccatgtcttcctcttggcaattcacagtgtaaatttgtatgttaaagtttctgagaaaaaataatcttaaggaagactattgcactttgtaactttgactaactcagtgtttcctgtgtttaattttggagaaccttcttcctcagaacacttgtctacatatcatgggagactagagtttcactgatcataatttagaaaatatatgtcatcatctttcagagcaactttacaagtaaatagaatcccacaaggtgaccaaacacacatgtctgtttgatctagaaatggagactatttttgatctgtaattccacttttttccaaaatgaaaaatagctttattattattattgttattattatttattctgatgataaaggtatgtagcagaaactgtcagtaccccgtgaatatctacatggtcctttccatttgagagcactgtagcctacctgctgaactttcaactccccgcctctctttgcctaaaagctttctctggcccactgcccccagtccctggcccagcagccttcaaccaatgactggaggacacatacacacacctcagctccctccccgtcaggtgagataactcagcagcatgtgctgtgctctggctcccaggttccatcacggccatgaagccctgcttgtccacattggaaactggcttaataatgtacctcttttagctgccttcccttcctctgtcatttcttttctctccattttacgtattttgaatgactaaactcccctgaatatttcttatattcacacctgtgtcttagagactgcttgcaaagaagccaaatagagacaagaaaaactaatgaaaacagaaaaatcagaaaatattgagctacagaaagaagaaaatgaaaatcatcaataatctaaacaccatttgtaatcactactaatgttttaatctctatccttccagacatttttttttaatgcagtcacttttttttttaaatggaaataaaatgataatgacaagtaaattatgacttttttcatggctggaaaacagtccattccaaaagagttaagattggatttgaagcccagctctgacacttactctccaagtgagcttattcaagccctttgtgtcttagattcctcagctgtgaagttagaataaggacattatctattacatggtgttgaagtgaagattaaacacaatacacatacataacacagaagttattaagagagctattactattattttaaaccacaatttagcaaattcttcattgatgtccatttaagtttttctcaaattttttgaataataaacacataatcaagtgttgattctaaaaaaggaaaaacaaaacaaaacaaacccaaactttgtgtgttttttctttcgtaggaatttgcactgtccactttgggtgctgccctgtcatttgctctttttccatccatccagggaaggctctgcagcaaaagtgaagcctttccccaagcccgttctgccgcctgacaaaagagggcgccattgtactgttcatagacgatgccttgcgtcagtaaacgtgggaaaagttctttaggagtaatgctgtttttataaccattttcagattcatccttaccarttacaacaagttgtccatccagagttggtttagtttgcgccgagtcgagatcatttccaacaattcaatccaagcagtctttaacccaactggcgtatatgctccctctggttactccyaccgctgccaacgcgtgggcagcctgcagcaggaccaggccctcttgctgcccagcgacacggatgatgggtcgagcctgtgggaggtcacttttattgatttccaggtaataaactaaaacctatgctcaatgcacctgcgtttttggtaccaaaagagctcagtgtttgtttaaaaacacctgaaacaaacctagatgcttaaggaaaagagaagtagatgcctttaaaagaatattggtggtttttttcctttgtcttttaaggtatgaagtagaataggatagagaattttatctccctgtgtcccccacctcctacccagggcttgcttttacattcagctttatccagcacgaataattatcagtgaggaatgccagccatctaagccctagtgaagctgtgggtgaagccagggactgacacttcctggactgagaggcccttctggggagaggcattggcggacaattattttatttccttcagggagtggcgcagtgatcttatcagggaagataagaagtacatcggcagtgtgagtgacagctttggcagttagtaggaagggactcagcggggagtcaaaaatatcccaaagatcttgaaagtatttggagtaaggaatggggtgtaagagattccttttcaccaccagaatcttaggctgagagacattctgtcaagttcctctatcctgtttacctgtgaatgaagcttagcttgttcctaccactccctgaaatagtaggcagggctttgcatgtacctcttatgggcacattccaaccttttccaaatatatgtgggcattggcatatatgcatattcttccctttcatccttcccaagcttagagaagtgtcgtgtggatgaaaggcagtttrgggtagggaaggagctcacattttggagtcagacagacctggtttcaaattactgctcagccaccagggcaagttacttaacctctctcaatttctcacctatctttattaawgtaaagaatacgtggcctaagatatgtggaaacactcaggagtgtgccaggcgtggattaacaataattgctacctgtgagtgacccgtgtgtgttggtactgtggtcgttactttatgtgctttgtcttcagaacttaccataatgctgcaaggtggttttatgaatgaggtgactgaatctcygataatcacataatttttctaaggagtataactggtaaacggtagaggcagaactcaaattctggacagtttggttccaaggattcttttgtgtgtgtgtgtgtgtgtgtgtgtgtgtgtataaaatgtttataaatattatttatattatgtatgtgtatgtctatacatgtgtgtatgcatgtgtgtatgtatacatatagaggaatggcagtgaggatataatgacaacaaggaatattttacatataatttcgcctatttagaccgggggaattgattgatttatacctctaccttgttccagaaatgacttagttgacttatggaaatactacttatgaaaaattactttcaaaaataggcaaatcacytcacatccattaggatggctattataaacaacaacaagcaaacagaaaataacaagtgttggcaaggacagggagaagttggaactcttgtgcattgctgttgggaatgtaaaatggtgtggatgctgcggcaaatagtatggagtttcctcaagaagttaaacatacaattatcaagggatccagcaactctgcttctggctatataccccaaataattgaaaacagggacttgaacagctttcacctgtgtttatacctacgttcatggcagcattattcacaataaccaaaaggtgcaagcaacccaaatgtctatcaatggatgaatggatcaacaaatctagtgtatatgtacaatggaatattattcagcattaaaaatgaagaaaatttggggattgggcgtggtggctcatgcctttaagcccagcacttagggaggctgaggcaggaggatcactcttgagcccaggagtttgagaccagcctaggcaacatagtgagacccccatctctacaaacaatttttaaaaaagaaattagctggggtcrtagtggtgtcacctgtagtcccagctacttgggaggctgaggtgggaggattgcttgagcccaggaggtcgaggcttcagtgagccaagactgtaccactgcactccagcctgagtgacagatgtctcaaaaaaaattaaatttaaaaagaggaaggaaatttggatacatgctacaacatgaatgaatgttgaagacataatgctaagtggaataagccagccacaacaggacaaatattgcatcatttcacttatatgaggtacttacagttgtcaaaccccgagatggaaaggtagaatagtagttaccagggactgaagggaggagggaatgggcagttagtgtttaatgggagtaatgtttcagtattgcaagatgtgaaagcattctggagatggatggcggcaatggttgcacaacaatgtgaatgtacttaatatccctgaactgtatacacttaaaatggttagatgataaattttatatcatatatgttttataataaaaaaacaaaaaatttagcaaagacttgggggtagagaaacacaaaggaagaaaatgtcagttagagccaccagtgaggttaatatacaaaaccacgagaccatctgtctgcactggctggaggcggcacaagaatttggctctgaagttctggagcagccagtatgagaaacactcagttacatgttcacaggctccctaagactactgccaatgtgcttgggataagcacattcatccctggtggtgtragatgtatacatcctcatcagcattcttattataaacacagctttcagggggacagatgggccttgttgaaacccccttcatgtgaagagatggcagaacacaagctcagtccaggggagaggaggtgatggtgatggtggctgaggtatgtgtacaaaaggctgctgtccacatacacagctctgctggcctggcttatggtgggaatagagcatagagcaatgtggccggtgcggcaaactcgagtacttgggtaactggtgagttgggctgggaccatggcaaagggtagccttcatcacaatgagcattttacaaattcaactgcagctgatttttgctttgtaggaatgcagggctggtgttgctggatcttttcaatagaagctagaatggtagattctcacaggaaattttcaggatattccgagtactgggtcaaacaaaacacacctgtgggctagaaacagcatgtctgtataacctctagtccaggaaatgggtggacaatgtatccttcaggcattctccacacttactgttctcaaacaagtcttgttaagaattaagtggcagttggctgggcgtggtggctcacgcctgtaatcccagcactttaggaggccgagatgggtggatcacctgaggtcaggagtttgagactagcctggccaacatggtgaaaccctgtctctactaaaaatacaaaaattagcagggcatggtggcaagtgcctgtaatcccagctacttgggaggctgaggcaggagaatcgcttgaaccctggaggtcgaggttgcagtgagctgaaatcctgtcattgcactccagcctgggcgacaagagcaaaactccatctcaagaaagaaaaaaaaaaaaaagaattaagtgtcagtcaacctcaggacgttctccttggctggagttgcagaatcaagtgaggtcctcttttgtcatggaggagctcgactcttcaggcaccagtctcaagagaaggtcactttgtctctttataggaggtgtggggcagggatccccraagccaggacaagagtctccttcaggatctgctttgggttcaatcgagttgggcgagcaaggccccttgtgtcwatggagtgatgggcggcctcaataattttagcatgggacaatgccaaagtgctcacttaagccatcaaagtgaattttcagtaaagcactcatggatagttcagttgtctgatgtactctttaaaaactgagtaggtgtctgaatgaggaaatgctgtgtagggtcatacttttaaagccggctggacagggagctgtcttccacaagcgatggctcttgctttaaagtaattgctctatagtcctgtttcattttgacagtattagatatcagtgccagttctcaatttgaacctctcttcctttcaagtaattataccatttcatctgcacacaatggaagctttactttctatttggttggtgcaaaagtgattgcggtttttgccattaaacgtaatgggtaggatgcaaggaggggctggtatccacctcttccaaaaatgggacaaagcctgtatgataaaaccaatagagagagagagagagggtagggaggaggaagagacagaacccaccaggagctatggagtatgagtctgacgcccactgcccaggtttcaattacaccatcacagcatttactgttatgtgactctgggcaagttacttaatttttctgtgcctcagtttcctcatccataaagtaggaataaaatagtaacttactcataggctctttgcctactaaacaaggtagtatatggtgcacaaaaaccttcaatacgtgttagcttttatgattattatttatgttttacctcattaaggatcatgacatcccccttcaaagactcttcctcattcctgtcaatagaatcaaaggcagaggaacggagacttaaaatctttgtgaaacttatactacccttataaaattttgagtgtgctttgaattttagagacaccacagcagttgtggtttttacatgaactggaatatttctaaggatcagattaaaagaacttttatctcagagccttgaaatcaaggttttatttcagagtcttgaatttcatgagcctcctagttatgacatccatgcatcccagaatttctgggtcagtcttgttttaagattgagttgcattgtccccataagcacaatcacatttgtcaaattgtgtggttaaattattcagcaaatatggtgatagtatattaaatttggctacctaggggccagaactgccagcccaactgggaagtagatcctaggagagaagggatgtatcacttcagctccttcctttctcctgcagatccaaggttttgccatcaaggggggacgatttaccaaagcccaagactgcgcctcctccttctcgccagcttttctgatcggcctggcaatgtccctgatcctgctgctggtgttggcctatgccctgcacatgctcatctacctgcggtatctggaccaacaatatgatctcatcgcctctcctgcccacttctcgcagctgaaagctcgagacacagccgaagagaaggagctgctgaggagccagggggctgaatgctataaactgagaagccaacagatcagcaaaatctatgtttagcagcacaggctggcccccaccatgtccacagtgggctccgaaagttgtctctgttctgtgctatttgacttgtgaattacagattttcaccaaatggcttgattacaaaaaaaaagaaaaaacacaaaaaggaaatagataatgaattctttttgaaccatccactggcctacttaggtagacttggggcaatcaaaaaaggcatctcagggatcccacagagacaaatatgactgttagttgcctcaaagtaccctgaaagcaaaggggtatttcaagtacggaaaaagagagagagagaagaagraggaggaggaggaggaggaggagaaggagaaggaggagcaggaggaagaggaggaggaggaggaaagggagggagggagggagagggagagagagagaaagattggcaacacagagaagggaaaacacacttggtcctccttgcctgtgccagtttggatgtgacaattatagaaataataaaccaagattatctggaagttcataatttaaactattttgtaacataatttgcatttctagatattatgtcccaattttgttttaaaaacagtctttttctctttcatagaaatgttgagggaggactcaacatgtggcagagcactttatttaaggaccttcttgtcctttactgtgctgttcagaagcagtacagctccatctgtgaagtaggggtaatagtcatggccatattttacctttccatttgggaaggggccagggttgtctcacttgtctgatttagacctccatgagctctcataggtccacttggaataaacagtagagctaagcaataacagtgtgcttgctatgcaaacacagctttgagacattcccctgatcttccttccaatgagatagtgccctctaaatgcttcctgaatagaaattctggagccaccactgatgttcttaccattgctgtctttcatatgcattcctcatcatccttttcagctcttggcagatactgaagattgattcaaccttcatcctcaccaaarcgtctctaataatataccttctgtcttaaagagatcttaaacataaagatgacattgcattttcccaggtagggtttggtacaggacctaggttctactaagaagatactcctacacaaaacttagaatgcagacaggaaacatgtgcagtggagggtcacacacagagcaagaaaatcttctgggcagctgtcacgatgagtctgctgtctagtcccatcctaggtggtaagcagtagatgataatgacagttttctgatgggacagtctcatgttgagcatttattttggctgcaattttcttggttatgaatgtaggtttggttctggccctctcagaattctgtaagatcccatactttatagtaaatttctttctgttttaataacagagttgattctgtagtctgcagtgaagaatcctgatttatgtagttgttagtaccaagaggattgcagggaacagactctcaagaaaatgcaaatctatgattgattatccaactccatttggctttaaaccagtggaaactgtcagccttagagaatggtattcaataataaaacagatttttattgtggttcccttgagcatccactggtgttataagtggttgtttgctaggttacatgtacgtgaagggtaaacataatgtattgctcaaactaggacacttttgaaagagaaaacgagtatagttaacaattctcagatagcagacataaataggatggtgccaagcaaactgggatagatagtcaccatgggtatggatgatatgctgcaggttagactggctctttctaactgtgcccagtggcttacagtctgggaagtttctatgactcatctaaagagattccttatatcttgtcaaagggccggcgtggtggaaaatcagacacaggtcagatcctgcaaactgcttacctgcattgcaggtgaaattcatagctttgctggatctcttatatgaacacaagcataatgatcacaaaacagaagaacgctgacaggctaagagcagtggctcatgcctgtatcctcagcactttgggaagccaaggcaggaggatcgcttgatgccaggagttcaagaccagattgagcaacatagtgagaccctgtctattcaaaaaaaattctaaaaagttaggtaaggttgctggcatgcacctatagttctagctacttaggaggctaaagcaggagcattgcttgagcccaggagtttgaggttacggtgggctatgatcatatcactgcattccagtctgagtgacagagtgagaccttgtctctagaaataataaaataaaataggccagacacagtggcttatgcctgtaatcccagtattttgggaggctgaggcaggaggatcacttttgcccaggagttcgagatcagcctgggcaacacagcaagatcctgtctctacaaacaacaacaacaaaattagctgggcttggtggcataagcggtagtcctagctactcaggaggctgaggctggaggatcacttgagttcagaaatttgaggctgtggtaagctacgattgtgccactgcattccagcctgagtgacagagtaagaccctgtctcaaaaataaaataaaatttaaaataaaaaaagaggggaacgttgagaatagaatagtgacttttgggaggatttaactttttaaaaatactgaactcccaaattccactaatttttttcttgttagcagaagcaacccctgtgagacaatgctattcctgccttgcttgaagacactgtgatgacctcaccagaaatagttgtcttgccagggggtgtcaattttcctcattgcctttaggcacttagagtcacattctggcatataccagggaaccaattgtaaagtcaaatctgtgataatcaaattgcaaaaatagttttgctaacttacgccacaaaagatttgggagattatgtatggtaatggatctggagttgccagcccagggaatgagctgtataattttagactggatgaattttttggatatgggttctctcaccagggattttggattaaatgtgctggtttgagcggctggaagtgttcctaacagtttgctctgtttgttgtttaaaacctagattcaacagtggcacacactaaatgaagtagagggatcagtcatttcttagtattagatagagaaagaagagaagtgcagtaacttaaatgattgggatgtaggaatggatttatcatgcatgaacagctctccctccccataactatttttctctgtaaaggcccggaggacactccctttgtcatagcactgaggaacacattgggaacgtggcatcagcacttttgaaaagtgctctggtggctgtcctctgtaggctatgggtggaggtagatattacctttgaaacagaatgcttagtttccatagggatgctgagacactggagtggcagagggtgagtagcagcccagtaaccttaaaaggctgatgggcaggagtgttaatcagattagattaactttgttaatggtaaattggtctttgacatctgtggctgcacaatccactgatgtaccctttgatccgcataataacagtgttgatgatagaatctagatctggtataaaaagccttactcgaaccatcatggtagattcccaaagccgagtctgctcataacttgaatctcttcagtgaaaaagagacatcttaagacatctttatgtctgatgttgagcattattatgaacaattgtatgcttatccattaggtcttcatctttttgtatcacttctggtatgttccgatcttcaggtaaagaacctacactattcatatgaatacctttactataaacccattagatatgtgattattgcttagtaattgttggtgctgcagaaacatagcctaagagctgtctccttggagatctgtaacaaaatggcaaaaaaagtgatgtttgacacaagttggagttgaaggaaagatgaaagcatggcagaaggaaacacatatgcaaagtctaggctctgtcatgtgtggagaactatgaacacatgtgtgtgggtaggtagatagaatgtgtttagaggagttaagaaggagaagctggagatgaagagagagaccagatcgttgtgttcacctcaagacttagaatcttgacttgaggtaattgagaggcccttaagaagattttggaggatttcaagcaagacgattacatggtgtggaagtgtgaatagaatagggagagaagtgctgattaggagattgttgcaatagcttaggcaaaaaatattaggacctgaactaacacagtgggatggaaggtagaatctaaaagaggtgttaggaggttggcaaccaattagcaaatcacaaatgaatggtaggtgtctgatttggggttgtgaggatggtggtgtcaagctctgcaatcagtgagaaaacaggtgagggtgggagtgggaggcccctggagtctgacagtagaagtccaagtaggcagttggttctgtggatcaggggaaaaatagagagatctggaccagaaacagaaatttagaaatgtagcagatgctgtcagtattccacccatattgctttggtagttaccattttggtgtattctggcacatctttccattgtcaacaactgtcctcaggggcttctctacctatggtcacaacaggctggaaggggtaaggaattaatgctttctgggagtagccctcaaaaaatgactctcagggattgtgtgcaaatgctgcagctcatttgccctttgcctgggataactctagagtatgttttacgctgttccctggagcttcccagcaggactaagctcttttcgcccattgtggaatcttgcttaataatgtttactttatgggctcctttctcttccctgtctcccttccccactcccctgatggcgtttccaggcatcactgccaaaacaaatgatttgcatctacatccctgtttcaggatatacttctggggaaaaccaaactaagacaggtagtaatgggcatatggggaaagttgaaaactaggtggtagtgaagaaataaatgagatcacctgagaagaaaggataggttgataacagacccctggggaacactatcatttatggagtaggactagaaagacaaatctgtagatttagagtaggagaaatcagagaggaagagagcaaaccaagaaagagtagtgtcccagaaatcaaaggaaaacaggatttcaagatgaaggaagtagtcaaccatgtcaaatgctggagagagatcaagtgagaaaagaactaaggagtgtttatttcctgcatttgcccagtaggaagtccttggtgaacatcgcactccatggaaaagagggagtagagggagctcaggatatttatcccttggggctctcccagagggaatgctttcgactgggtttcgactgggtttcatcccttctctgacgttcactgttcctttcaagacagccccctccacattctctccttctgcctttcagtaacttcttcccttgttgctttcgactcagggatggttactccattgctactagccccaggtcactacactatcccttgtggttctcctacaccctactgggacccttataaaaggttcttgtttaactaaaccccacttaaattatcctaatttgagggtgccatctgtttcctgttggaaacagacttacacagggttttagacaaactaaaatttatttgttgctttgttttacatctagcagttttagagtttttcggaaaggatttaaggcaaccattttaataagattttaataagatggaagaaacttgagcatattgtagggtaaggcattagcgatgaggtgtttgttttgcctgctgcaacattatgaataatgcggttcacatgtgtaatacactcccacagaaatggccacacgttgttaccctgtatcccaattttcgggctttacagcattctgttcctttgagatccctgatgcataaatgtccatgggtagctgagataggccgtgggctacggacaattcccagatagcaaactagagctttctcactcaaaaaagcattgcggaatatgagagtaatattacagagcagctctggaatactctttaatttatataaacagtgtaagaaatcagggctaacaagccacatggtgttacaccccaccaggctgactgcctctgcagttgggagcccctgcgctggttggaggaaccggggaatagggaaaggttaaacaaatatatactagagagggaagaaaattggtggagctaggtcctcagaggaaccagagtgttacaggatccccttcttgggggcgggtgaggaacagccacttgctcttcctcagaggagacaccaaagggacacaattttctaggcaggata

SEQ ID NO: 93412 - DNA, 50830 bp, Homo sapiens
aggagattgagaccatcctggctaacacggtgaaaccccatctctactaaaaatacaaaaaattagccaggcaccgtggcgggtgcctgtagtcccagctgctcaggaggctgaggcaggagaatggcgtgaattcaggaggcagagtttgcagtgagccgagatcccgccactgcactccagcctgggtgacagagcgagactctgtctcaaaaaaaaaaaaaaaaaaggaaccttaagtcgataaatatgaaaaagtgctcaaccttactaataatcatggacctataaaacaaaccaccatgagaaaccattttgcatctatcagattgttttttataatttgaaaatgccaagtactggcaaacatatgcaaagataattcttttttttgacagagtctcactctgtcaccaggctggagtgcagtggcgggatctcagctcactgcaacctccgcctcccgggttcaagcgattctcttgcctcagcctcccgagtagctgggactacaggcactcaccaccatgcccagctaatttttgtatttttagtagagacagggtttcaccgtgttggccaggctggtctcaaactcctgacctcaggtgatccgcccgcctcggcctcccaaagtgctgggattacaggcgtgaaccactgcacctggccaaggtaattcttatacacatctgtcaggagtgagtatttttctgtgatcactttggagagcactttggcatggtctaatagggtggacaacatatatagtctgtgactcaatcatttcctctagagtacacacggagataagcatgagaatgataacagcattgtttgcaacggcaaacgattgaataatgcctaagtatttattaaaggaggagatgaataaaaattgtggtgcatccgttactattatgggctgaatgtgtccctctcaaacatcatgttgaacaccatccccagtacttcagaatgggaatgtatttggagacagggcctttaaagaggtgattaaggtaaaatgaggtcacatggatgggcccaatatgattagtgtcctcataagaagaggggattaggatatagacaacatacagacaatgggcaaccacacaaggacacagtgaaaagacaggctgcactccagcctggcaacagaggggaactccacctcaaaaacaaaacaaaacaaaacaaagcaaaacaaccacaaacaaaaaattagctgggcaacctggtgggtgccacctgtaggattacaagattatacctataatcctaacactttgggaggccaagtggggaggatcacttgaggccaggagttcaagaccagattgggcaacatagtaagaccctgtgtctatttttttaaaaaaattagaagatgagcaattactcacaaatcagtgtcaaccatgataggaaaaactctattcttcaccatggcctagtcaacatatttatcaagccaaggaaagagggcatcaggagaaacctaacttgctaacaacttgatcttcaacttccagcttccagaactatgagaaaataaatttctgtttaagccattcagtggtactttgttatggcaactctagaaaactaatacaattactatacaacaattcattatacatttatacaattcagtatgttactgtagaacaacgttaaaacattaaaaatgaattaaccarggccaggtgcggtggctcacacctgtcatgccagcactttgggaggctgaggcgggtggatcacgaggtcaagagtttgagaccagcctggccaacatggtgaaaccctgtctctactaagaatacaaaatatagcttggcgtggtggcgcgtgcctgtaatcccatctactccggaggctgaggcaggagaactgcttgaaccctggaggtggagattgcagtgagccaagattgcgccactgcactccagcctgggtgacggagcaagactctgtctcgaacaacaacaaaattaaattaaccataactacacggtttaacagcactgaacttcacaatgctgagcaaaaatgtaagttgcagtagaccacatatagtttgatgccatttataaaaattttaaaagcataaacagatttttaaggaatatatacacatataaactctaaaagtctaaagaaatgcatggcaggggtacataccaaattcaagatagtggttcccagaggatgaagaaaggagataccatagaggtgactacagggaacttctttgtatgtgtattgttcttaggaagaggaatgggaaaagggacatcatattctttttttttttttttttgagacagagtctcactatgttttccagggtggagtgcaatggcgccatctcagctcactgcaacctccgcctccagggttggagcgattctcctgcctcagcctcccgagtagctgggattacaggcatgcaccaccacacccggctaattgttttgtatttttagtagagatggggttttgccatgttgggcaggctggtcttgaactcccgaccccaggtgatccgtccgcctcagcatcccaaagtgctgggattacaggcctgagccactgcgcccagctgggagatcatattctttataccttttgatatgtataaagtcattaattatatttttttttcagaaaggctatagaccaataatactgacttttaatttttttaaaactagaagggccataagaaatggctgaattcagccattttgttttacagattagggaactgaagaccggaaacctgtgtaacttcttctgttttctacaaatagctagactagaacccagatttcctgtctttttattcgaatcaatggtttgtgagcatagttcttaaagaaggaagtggtgatcactcagttgagtttttaagccaatttccaatttcatttctttctttcatttcttcttttttttttttttgagatggagtcttcctctgtcgcccacgctggagcgtagtggcacgcgcctgtaatcccagcaatttgggagggtgaggcaggagaatcgtttgaatctgggaggcggagaatgcagcgagctgagatcgtgccactgcactccagcctggcaacagaagggaactccgtctcaaaaacaaaacaaaacaaaacaaaacaaaataaccacacacatagaattagctgggcgtgctggcgggtgccacctgtaggattataagattacacctgtaatcctaacactttgggaggccaaggtgtgggggaggatcacttgaggccaggagttcaagaccagactgggcgacatagtaagaccctgtgtctatttttttaaaaaaattagaagatgagcaattactcacaaatcagtgtcaaccacgatgggaaaaactctattcttcaccatggcctcgtcaacatatttatcaacgttttgttttttttgattgactgagatagagtctggctccatcacccaggctagagtgcagtggagcaatctcgactcactgcaatctcctcctccgggttcaagcaattctcctccctcagcctcccgagtagctgggattataggcgcctaccactgcacccggctaatcttttttgtatctttagacagtgttttaccatgttggccaggctagtctcgaacttctgacctcacgtgatccacctgcctcgacctcccaaagtgctgggattacaggcataagccactgcgccgggccctcgagattttaaatgaagacgaattaaagatgttggtcaatattttgcccaaattgaaaaggcttatctctcttaacctagaggaggttaactgcagctcatcaatcattgcacttaccacattctttttacctggacagtctgattcctccactagacagatttcaggtcttgttttggaatcctctagattggtgcttggcacaagtaggatgctcagctaattaattttttttttttttttttttttttttttgtagagatggtgttctcgctttcttgcccaggctggtcttgaactcctgggcttaaacgatcctcccaccttggcctcccaaagggttgggattacaggtgtgagccactgcacctggcctcaacaaatacctgttgatctcacacaaactgaattgcatgaacagatcatattccaaggctccaggagacattaggaaaggatccaaactaaccagatgctatttaaaagttacaaaaaaaaaattcctgttgaaagttttaaaaaatactaattgcacaaaaggacaggggaaatagttgacagtggttcacctaaaaaagcacccttgacctttttttttttttttttgtgagtgaggtggttgcagatttctatgaaaaagaagttaattcttcagctccttaatggaaccctggatctcccagctatgcaggaggttatgctagaagtagaacaaagcggaatgtacaaatttaaggaaggttactgccctgtgttcttttgcatgggtctgtatctagcattgggagccaggttttgttgttgcttattgggagagataagaatggtatatacacaaataactaaaaaaaaaatacgtggtaaatgctaaaagacaggtgcaaagaacactgagatggagctttcttgggttacacagccagttttaatgtttcctaatatagaagagctttcaacaaacctctcaggcaggctgtcttcaaatgacattacttcccccaaatacctaatttcatttatttcagaacaactctaaatgttagaggattttctgagcttaaaaatactgccttgtaatttctattggttttagttctgcactttggagaagagaataaggctccgttatttccaatattatactattcagttatttgaagacagcttccaatttctatgctcaaccctttccctctttttttttttttttttttttgagatgcagtttcgctcttgtcgcccaggctggagtgcaatggcgctatctcggctcactgcaacctccgccacccgggttcaaacgattctcctgcctcggcctcctaagtagctgggattacaggtgaccgccaccatgccccgctaattttttgtatttttagtagaaacgggggtttcgccatgttgggcaggatggtctcgaactgctgacctcaggtgatccgcccgcctcggcctcccaaagtgcgctgggattacaggggagagccactgcgcccggcctccctcgtttatatgcaggttaaaaactcccttgagccttcaactatttctttttcttttttttttttttttttgaggagtttcgctcttgttgcccaggctggaatggcgctatctcggctcactgcaacctccgcctcccaagttcaaacgattctcctgagtagctgggattacaggcatgcgccaccacacccgactaattttgtatttttagtagaaacagggtttcaccatattggtcagactggtctcgaactcctgacctcaggtgatccgcctgccttaggcctcccaaagtgctgggattacaggcgtgagccacagcggctggtgctttcaactatttatttgacatggcttcaagcttccttgccaccctagtgccgccatcgctccgtttcccttccctaccacccttggggagtaagggtgaggactggggaatggcagaggaagcgtagtttttccgaagagctgaaggcagcctgtgattatgaccttagctcttcctcttctctgttttctgatctcctaatacacgtctgtaaatatcacaagaccctgcaagtccctcacttattatctcttcaaatctgacgactttcaaccgttcgggccccacgactctctccccggactaggatctactctatggtagtgagctcagcctttctagctctctagtcctcccattgctccatctatggtttccggaggcctcaccggaagccctcgtgtgaggccgtgtgggaggccggaagttgcggcttcattactcgccatttcaaaatgctgccgaggccctaggatctgtgactgccacccctccccccacccgggctcggcgggggagcgactcatggagctgccgtaaggtgtggctcttggccttcgtcggcggggtgccgggagcgggagctggagagtgaggagcaggcggccgtaccgccagttgtgcgggtagcgggcgggaggagcttgagaggtgggtcgggcggcgtggggaaggccgcgccaggcggaagaagggctcggggggaggggaagagttgtgggatgaggrctcgcggaagataaaagtggaggtggggtgacgtgaagtaactttggccaacaggtgacaaacytaaagtcgacgtagttggattgagtttaactggacacaacatttgaggactgttgaggcaatttggagaaaggaggtgggagagagggaaccgggtagaatgacattgacgtgtcttaagtttttaagttagtttttaggtctgcggacagtctaccttagaggcacttgagtgcttgtttgaaaatgcttgttttggcttggcgcggtggctcacgcctgtaatcccagcacttcaggaggccgaggtgggtggatctacctgaggacaggagttcgagaccaacctggccaacctggtgaaaccccgtctctagtaaaaatacaaaaatattagatgtgtgtggtggcgcatgcctgtaatcctagctactcgggaggctgaggcaggagaatcacttgaatccgtgggcgggggttgcagtgagtcgagatcgcgccactgcactccagcttgggctacagagggagattccgtctcaaaaaaaaaaaaagaaaaaatgttcgttttggggccacactgaaacctacagacagtatcgagatggggctcagagaaatatattttaatgagcacacctcccagtgatttttgtataccttaaagcttgaaaaccacaggtttttttggttgtgtttttgttttgtttttgttttttttgagtggagtttcgctctttttgcccaggctggcgtgcagtggcgcgatcttggctcactgcaacttctgcctcacgggttcaagtgattcttctgcctcagcctcccgggtcgctgggattacaggtgtgcgccaccacgcctggctaattttgtgttttattagagatgaggtttcaccaggttggccaggctgttctcgaactccagacctcaggtgatccgcccacctcggcctccgaaagtgttgggattacaggcgtgagccaccgtgcccggccgaaaaccacagtttaaaagcaacacccggagaaaatgctgcagctctgtgctgttggcacgtggaactagtatctgtcaaagatacttggaacctcttggtgttaagtattactgtatctcagtttagatttagtcttctctctcctcatacattttttttttaatagatgggatttcggccaggcccagtggctcacacctttaatcccagcactttgggaggccaagggggcaggtttgcttgagtctcggagttcgacaccagcctaggcaacaaactgagccccatctctgcaaaaaataaaaaaatcagtgtcatagagcgagcttccagtcccagctacccaagagactgaggtgggaggattgcttgatcccaggaggtaaaggctgcagcaagccgggatggagctactgcactctagcttaggcgacagcgcgagagcctgtctcaaaaaaagagatgaggtctcactgtgtgctcaggctgcagtgcagtggctattcacaggtgtgatcattgcacactacagcctgaaactcctggactctagggatcctcctgcctcagccctccggaatagctgggactacaggcacaggccaccggctgcagttggttttttaagattctataacaatcgttaatctttaattaaagatttaatcttcccagtttaatcttcccactttaatcttccctgccgtcccaggtcctgtagaacacctacgttctggatttgacttattaactgcttgctctccattttccctagtaacttgcagttagtaggtaggtctagatttggattatttatcttttggtcaggaatacttaataggtgttgtgctagtttcttgttgcttcataatcaagtagtatatggtgtgtgaatgaccctcttttagtgataaggttggggatggtggaatggtcagcctactccacgtgttttctttccaccccaacctttcactcagatggctttagcatcccctacccctgccactggagtgaagtggtatgatcttggctcactgcaacctctgccttctgggttcaagctattcttctgccgcagccacgcaagtagctggattacaggcgttgtgccaccacgcccagctaatttttgtattttcagtagagagaggttttcattatgttggccaggctggtcttgaactcctggcctcaatctgcctgccttggcctcccaaagtgctgggattacaggtgtgagccactgcttctggcctggaatctcgtgatgactgttgaagaggtgacatttaacctgagacttgaaggtttaggatgaatcagttttgtacaaaactcacagtgctccaaatgaagggacgatttgtgcaaaggccctgtttgagaaactaaaagatcagggtggctgaggctcaagatacgactaaacagtgcaagataagastgaaaatgtgctgaggggatagaccacgtgtttatctttacagcaatagcaagctgttgagcagggcctgacactataggatttttttactttttaaaatgcttttggcaggctgggccaaggtgggcggatcacctggttgggagttcgagaccagcctgaccaacaaaaagaaaccgcgtctctactaaaaatataaagttaaagttagctgggcgtgatggtgcatgcctgtaatcctagctactcgggaggctgaggcaggagaatcgtttgaacccaggaggtggaggttgcggtggaccaggatcgctccattgcactccaacctgggcaacaagagcgaaactccgtctcaaaaaatatatgtatatgaaaaagaaaaatacagtggttggattaaagaacattggcctggcatggtggctcatgcctgtaatcccagcactttgggaggctgaaaaggattgctttagctcagaatttgagactagcctggggaacattaaaaaaactagctggattaggtggtacacgcctgtagtcccagctactccagaggctaaggtgggaggcttgcttgagctggggaggttgaggttgcagtaagccatgatcacggcactgcagtccagcctgggcgacagagtgagaccttgtctcaaaacatctatatctattctgtaatttattccatctgtaatgttatggaatcacagatggaataaataacagaacggatacaactgaggaatgaattagaattctagaaggagaaaatctagaacaaagaaagagaaaaatataaacgaaaaactaagagataagaaagaactaccattttaggctgggcgcggtggcttatgcctgtaatcccagcactttgggaggccgaggcgggcggatcacgaggtcaggagatcgagaccatcctggctaacatggtgaaaccccgtctctactaaaaatacaaaaaattagccaggcgaggtggtggacgcctgtagtcccagctacgcgggaggctgaggcagaagaatggcatgaaccccggggggtggagcctgcagtgaggggagatctcgccactgcactccagcctgtgcgacagagcgagactccatctcaaaaaaaaaaaaaaaaaaatgaattttgatatgacagtaggaattaatctatgttagtggaacaaaatttcccaaattacatgcaacatccctgcttttttttttttttaataattaagagcaactaaactaaaaatactttttaggaatccattttgatgcagtaaaatgtataaaaaggaaagcaagggaaatgaaaacaatagggttcaggatgattattattgcaggaaggcagcaaaatgggatgggggatattatcgttaaatataggttatgatcagagtcttagtttgtggaagattattgcgttaaaaataatccaggccaggtgtggtggctcatgcctgtaatcccaacactttcgttgagagaatcacttgaggccaagagtttgagactagcctgggcaacatagcaaaatcctgtctctacaaaaaataaaaaaattagccaggaatggtggcgcatgcctgtagtcccagataatcaggagactgaggtgggaggattacttgagcccaggaggtcgaggtggcagtgagctatgtttgtgccactgtactccagcctgggtgacagaacaataccctgtctcaaaaaaattatgaaaataaaaaggtaaaaataagtaaaatgggccatgtgtggatgaataatcagcatatgtcttgaataaaagagttatgattaattctgtgtacttgaggtctaatgggaaaaaatgctgctaaacggggatgttagtgcttgtctgagtttgaaatcttgactccaacaacttactcattgggtgatcttggacaaataacttctgtttctctttcctgatctgtaaaataaggataatagctacataatagggctgttttggtattaaatgggtttatatgtatgcctggtacwtaataggcttgatgagtccttaccatttgtttcaattatctaatgctatggaataaaccaccccaaaacttagtgagttgaaacagtcattttatttatttttcattcagtgggatgataggctgagttggatagttcttgtggttttgtggtttgtcatgcagctgttaagtcaggtgcagctgaggctggaacgtgtgtgatgctttgttttgttttctttcttttttttaaggrcacctcgagaccgttgagtaagtgctttgttgtagtcaggtggcaactggggctggaagatgtgtggtgctttggagggtatggctaagagtctgggctcagctgggcaactgcacctccctctccttgtagcctttttgtgtagtctccagtagagtagccagatttcaagcacctccaaaagtacaaaacatgagcctgccaggcctggaattgtcacattatcacctgctgcattctatttattaagtcatagggccagttagggagcgtggttcattgggagccatttttggaaacggtctgcacattataattaatgtttctatctaccatgttgctctaccatgtatgtagttgtcagatttagacactggaaatgtataaatagacagttacaaattcctgtccacttgtagcttatattttacataataaataattaaaatatgtagtgttttggttggtaaaaaggttggtagggaaaaataaagcagggaaggagatagggaatacaagcggttgggagttttagttttaaaaatgggtgttcatatgaggccttgttgacaaactgtcatttgagcatagacaaaaagaaggataagaattagagggcaggctaggagtggtggcccatgcctgtaatcccagggattacagcactttgggaggctgaagcaggaggatcacttgagcccaggagtttgagaccagcctgggcaacatagcaagaccccgtctctacaaaaaataaattagctgggcatggtggcatgcacctgtagtcccaactacttgggaggctgaggtgggaggactgcttgagcccaggaggttgaaaggctgcagtgagctgtgattgtgccactgcactccagcctgagtgacagagtgagactccatcacacacacacaaaaaaagcaaatgaggaagtaggtgatgagatcaatagccacccattaaaagccaggttttaaattttttttttttttttgaaacagaatcttgctctgtcaccaggctgtagtgcagtggcacgatctcggctcactgcaacctccgcttcccaagttcaggcgattctcctgtctcagcctcccgagtagttgggactacaggcgtgtgccaccacacctggctaatttttgtatttttagtagagacggtttcaccattttggccaggatagtcttgatctcttgacctcatgatctgcctgcctcatctggggagtacaatcccaaagtgctgrgattataggcgtgagccaccatgcctggcccacttctgaattttaaattgtgcttgtttcctatttgacttattttatagcaaagtaaggtaatgggagagggaggaatttatacttgattacagctataagccttttcagaagcatgagggatcttgttatcttcagccagtgtatttactgattgtctttttttttttttttkgagatggagtttcactcttgtaacccaggttggagtgcaatggtgcgatctcagctcactgcaacctccgcctcccaggttcaagtgattctcctgcctcagcctcctgagtagctgggattacatgcatgtgccaccacgctcgcctaatttttggagctttagtagagacggggtttcaccatgttggccaggctggtgttgaactcctgacctcaggtgatccaccttcctcagcctcccaaagtgctgggattacaggcatgggccagcgtgcctgtaatcccagcactttgggaggctgaggcaggcggatcacgaggtcaggagatcaagaccatcctggctaacatggtgaaaccccgtctctactaaatacacaaaattagctgggcgtggtggtgggcgcctgtagtcccagctactcgggaggctgaggcaggagaatggtgtgaacccaggaggcggagcttgcagtgagccgagatcatgccactgcactccagcctgggcgacagagcgagactccacctaaaaaaaattttttttttttttttttttttttttgcgacagggtatcgctttgtcacccaggctggagtgcagtggcacagtcttggctcactgcaacctccaccttgccagttcaggtgattctcatgcctcagcttccttagtagttgggactgcaggctcgtgccatgcccagctagttgttgtatttttagtagagacagggttttrccctgttgcctagtctggcctctgttagaaataaattttcgaagctgcaaatgaatatcactcaaacataaatttaattttctcagcaaggcaattttacttctatggaagggtgcatctcacggatggagcaatggtgagagcacacctgaacaagggaggggaaggggttcttatccctgacgcaggtagcccctacttctgtgttgttcccgtattggctagggttggaccgcacagtctaagctaatactgatgggctattttaaagagagcaggggtatgagctggagtggctgggcgagtagtatggcgggaagaacagttacagaacaggtgactcaggatgactcaggtcaagggaggtgaccaggagtgactcaggatggagcaggtgatagaagctaggagggggttgtttactgaaacgaggggcaaggagatgaagagaatgaggaagttaaacttttaaagttttaaatgaagaacaaagaacaggggagctgaacatacagatacattggttttttggagagcatctcagaactcattgtacttaacaatttacaggctaaaacctttgaagaggaatttattaaatcctacatctcaaactcctgacctcaggtgatctgcccatcttagtctcccaaactgttaggattacaggcgtgagccactgcacctggcctattctagtcgccatttaccctttccctgatgtggcttgttagtcatcagttttaataattgttgccttttgttagaaaaaggcataaatgaaggttaacttaagtttatttaaaaatctattttccggctgggcatggtggctcacgcctgtaatcccagcactttgggaggctgaggtgggcggatcacgaggtcaggaatttgagaccagcctgaccaacagggtgaaaccccgtctctactaaaaatacaataatgagctgggcgtggtggcgtgtgcctgtaatcccagctactcaggaggctgaggcaggagaatcgcttgaacctgggaagcagaggttrcagtgagccgagattgcgccattgcgcttcagcctgggggacagcgagactgtgtctcaaaataaataaataaataaacaatctatcttccttctctgtagcttttgtttttttaaggataaaaggtaggtgaaagattttcattgaactttactctgtatttcacttcatgctacatcttttctttgatggtatatgtccatctcggtttaacccattttgtaggtttgtaattgctgtgtttttttctggggttggtacatttacaagctgttttaactggtacttaaaatgttgactcttagttaactttctatggtcctttgtcaagacatgttccaacatgttgtagaggttttcctagaagtcctgttggaatcttaaaacctgtgacttaccttggtaaatccccagtcttgcatctagagagtgctctacytgataaccattggggagataatgatttgactttcagctaaaacagtttactgattaacatcagttggaggttggagcgtgcctgaaactgttactgtttcagccttcacctgagagaagcttggacgattcttactcttaattaaatcagaaytagaaagtagtcagaagatatgcagaacctcagcaagggtatacagcatttgtgtacggtgctccattatatgtgtcatatgtgtcttttacttctgctggttgcctttgtgtgaatgctaaatagggaattttctgcrytagaatagatgttataaatttttttttctatttagttttaccaacagactgcagtttcttcactaccaaaatgacatcattttccacctctrctcagtgttcaacatctgacagtgcttgcaggatctctcctggacaaatcaatcaggtaaatcattttcggtatttctagttttttggttttttttttttttaatttttaaaaagtttagctgtctcatgactgtaatcccagcactttgagaagtcaaggcaggaagcttacttgaagccaggtgtttgagaccagccttggcaacatagtgagacctgtatctctacaaaacatttctaaaagaaaaaattagctagatgcagtggggtgtgcctttagttctagctacttgggagcctgaggcgggatatcacttgagcccaggagttcaaagctgcagtgaattatgatcacaaccagtgcaccccaggctgggcaagagagtgagaccttgtctcttttttaaaaaaagtaggggaggtgggggttgtgctgggcgaggtgggtcatgcctataatcccagcacttcgggaggcggaggtaggcaggtctcttgagcccaggggtttgagaacagccagggaaacatggtgaaaccccctctctacaaaaaaatacaaaaattacctggatatggtggcrtgcacctgtagtcccagctactctggaggctgaagtgggaggatcagttgagtctgggaggttgaggctgcagtgacctgtgatcacaccactgcactccagccaaggcgacagagcaagaccttgcctcaaaaaacaaaagcggggggagctgtttaaagaggttctcttgttccatagtttcagaaacctacttgaaatgtaaatagcacatttattttatgtttatatcaggtacgaccaaaactgccgcttttgaagattttgcatgcagcaggtgcgcaaggtgaaatgttcactgttaaagaggtaagccatcaaataaaattctcattttttttgttttttttttttttgagatggagtctccctcttttgcccaggctggagtgcagtggtgcgatctcagatcactgcaagctccgcctcctgggttcacgccattctcctgcctcagcctcccgagtagctgggattacaggtgcctgctgccacgcccggctaattttttgtatttttagtagagatggggtttcaccgtgttagccaggatggtctcagtctcctgacctcatgatccatccgccttggcctcccaaagtgctgggattacaggcatgagccaccgcgcctggccaaattctcagttttaagaacagttgagaagtagaagccagtgaatatgtagttttgaaatcaggcctaagaaaggaagttctactcctgaggtatcagaggggcaacttatactctgttttaaagactgttaggttgaacatcatatttcctttcttttgaagtgtgttataagataaacataagatgaaccatgaattcattgatcgtagagttaaaatgcagagcaagtaaagattaaaaagacactgggcctggcaccatagctcacgcctgcaatcccagtattttgggaggctgaggtggagggattgcatgaacccaggattttgagaccagcctgggcaacatgatgaaaccctgtctctaaaaaaaaaaaaawaaatacaaaaattgggcgggcatggtggtctgctcgtttagtcccagcagctacatgggaggctgaagtgggaggatcgcttgaacccagaaggtgaaggttgcaatgaggtgcactccagcttggttgatagaatgagagaccctgtctcagaaaaaaaagacactgtctgatttacaggctgtattttgaggcaggaattaaatgcagtagtttttattataaatgtgtcagatatggtggctcacgcctgtaatcccagcactttgcgaggctgaggtgggcagatcacctgaggtcaggagttcgagaccagcctgaccaacatggagaaaccccatctctactaaaaatacaaaactagcttggcatggttgtaatcccagctacttgggaggctgaggcaggagaatttcttgaacctgggaggcggaggttgcggtgagccaagattgtgccattgaactccatcctgggcaacaagagtgaaactccatctcaaaaaaaaaaaaaaaagtgtcagacactcttctgagcactgtgagttattttaaacacatgcatttaaataacttatttagcttmtgaagttttttaaaaaacaatttgtattctttaagtggraaagactcagtattaaaatgttaatgttgggaactgctttcatttggtggggtagatatctaacccttcctaaagagaagaaacaaaattatcaggcttttttttttttcgaacttaaaaccttcacacctatcaacactgccacactccagaaccattacacttctcaaggagacaaatctggaggcatttctgattttttagaatacctatattacttttacgattttaaattaagcacatcgttttggagtataaaatttgacacgtaagacctttttttccccaaacttattaaagtctggaattttttttttttttttttagttttatccttttattgaagcttacaatttcactgaacttttggccccaaatgaaaaaaatgcaaattaaaaaaagtattggcaaggagaggtgaccactgtcccctggagatggaagccgagcagagcgtggcaggcaagtgagggatcccagctgcggaggcagtagcctggccaaagatgcccagggarcagatttgtctgagcagggccagccccaggcagctagaagttaatacccaaggatttatgggtgtgatggaatccaagccactggtcccaggggcaaatctctctcatgcttggtcagattccactttggagaaaatgggctcatgtgacaggatggcctggtgagggaacacaggtgctaatggtaacaggccagtgaacactcgccactggcatcagggtggagctcagctgactggacactaactccattacaaggaccagaatctcctgcgtctggtgccaggctgtgccactcaactgctcatggccgtcgggacattcagctttcatcctctccttcatcaggcccctacctgtgtggcctcagccctggtcctcactatttggtggctgtgatgcaggactctcaaccctcttttggaacagtgttgcatcaagcaagggagaatgttcttctagagggacaggaaaagaagagagaggtccacgtacttctstcactctaggaagccaggaaaggtccctggtgcactccactctccacagatgggttgggtcatagcatccgagctgtcatggtgacgacgtccttgaagctgagccgaatgttgccttgtacagctgtgtccttctcccggaaggcctctgtcggcatctgcagctgggtgcacacctggatgaagcaatcaagctgtctggcaggattgacagagcgtgggcagtagctggagaccagtagctgggtgaactgggggctcaggttgtagcccatttgggacagagcttgctgcagctctgtgtagctaatggagcctgagttgtcccagtcataactgctggaagagctgcttccactgctggatgaatttccacagggctgagaagccgtagacatttatgtggcctgattaggtcttgtcaaacatgtttatcatcatgaggcaggtytcatcattgaacaaggaccagttgcagttgaccagagcctgcttcacctccttcatggagataaagccactgtgatcagagtcaccgactggaaccaggagtaggcctcatccatattgggaggggagccaccctgtccatgaggcctgggctgctgggcaccgtaggaatttggaggtggctgaccataggggccccctggagctgtaccatcatttggtcctcctggagttccagaggggaacatcccaggattgaggtgtccatagggccctctaccagctggtggtccataaggccctccaggggcaggacccccatagccaccaccagggggtagcacgctgccatactgccctccactactggggggggtccaaggtagtagctacccggaggggttcctggcgcttgccctgcatctccagggcagccccgcccatacagatagctggctgtggcaattctgacgtcacacacaggcaaggggtaaagtctggatttttatatcattatagtggttatgatgaattatgccatctccttcatttagcatggcagagtttgcctgagtttacacgatgagctttctgttatgaaccttgactctatctattgcataaagggaatttcctgatttttattatttatttatttagagccagggtcttactctgtcacccatgctggartgcagtggtggtatctcagctcactgcaacctccgcttcccaggttcaagtgatcctcccgcctcagccttcctagtagctgggactacaagcgtgcctcaccacacctggctaagttttgtatgttatgtagagacaggttttgccatgttgcccaggctggtatcaaactcctgggttcaagcaatttgcctgccttggcctcccaaagtgctgggattacaggtgtgaaccacttcagccgactaaatttttatttgataaacacttggattttatgttttgtccacttacaatgctgatggctcttattaaacattgtacttcatttgccaaaaagaattattatgtgaacacatatcaaaagcctaaagtcgtttatgtgccctggactgggaaaatatttttataatccaggcaaattacttctagtaatagaatagacttctttatttggacgtctgagaaaatttttaagaggatactaggtaaattcactgctttttctcattgtcagatcagttcatttctgtgctgaaaagtctgggtctgttaattgtcagaaagacaatgagtagatggacctagtagttgggagcggctttcctgttgtaggaccccttacacaaactttgacagtcttgtaaatatgttatttctttctttagcaaactaacttaccttacctcctctaatgaatttgtgtttttggtagcagctggacagatcacaacatggtattttattccatgcaggtcatgcactatttaggtcagtacataatggtgaagcaactttatgatcagcaggagcagcatatggtatattgtggtggagatcttttgggagaactactgggacgtcagagcttctccgtgaaagacccaaggtaaaaacagtgagggcttgcgtatctttttgggtgcttatacctagccacttaatttctatgggttattaatatttattacttcactcaacaaatatgtaagagcctacatatgttaggtagcctatgaggcactgagaatatggtaatgagcgacacacagtctgattttatggagtatacagagtagtgagtcagtagatgctcttgcccatcttagtcaaataatcacactaattcatggtaaacctacactatggcaagtgctacagaaaagagatacatgaagcagggagtgggtgggatttagartgttagaggtcaagaaaatgttcttttgaggaagtgaaatttcagccaaaagctgaaagatagataattaagtagtcaatcagagagtttgaggttgattgaacaccatgtgtaaaggcctgggtaggaggaagcttgatgtgactaggttagaattttgtgaaataattgttggagagggaggaagagtgagcagatgagagaaatgtagaattgctgggcagttagaggttgatgatgagcctggtaagaatcacagtagggctaacctgacctgttacttttctccagctgcatggggtgtaagttattagcttatatagtcaaaagctaattagtaatttagaagctctctttctctatagctttgatgactgctgcttctgagctcattctgtcttacactaagacttcccttagctgggtgtggtggctcaagcctgtaattccagcactttgggaggctgaggtgggtggatcacctgacttcaggagttcaagaccagcctggccaacataagtgaaacgccgtctctactaaaaatacaaaaaattagctgggcgtggtggcgggcgcctataatcctagctagtagggaggctgaggcaggagaattgcctgagtccgggaggcagagattgcagtgagctgagattgtgccatggcactccagcctgggcaataatagcaaaactccgtctccaaaaaaaaaagactcccctccacccccactttccaattacaatgtgaaacttcagtcctggaaggaaggaatagtttccaaaagagatttccccacttggattactgttcgctaatgaaataaaatgtaaattaatcagttttttaatgggggcagagtaacacaggggcctgggcattaacatcttaatatttaaataattaaaaactgttctgggaaaaagattctgcctttgtatgccttacagagagacttgggagataacatcagaaatacatttaatatttaacggcaaaccactgatatcttcatagtggcatttggggttgttaattttttatcttctctctttaacagccctctctatgatatgctaagaaagaatcttgtcactttagccactgctactacaggtatgtcayatcatatttcttcagtctgtatcacagctttgagttcaagggggcaaatgatgggaaaacaaagaagatgaaggtggaaatggaatgctatctttggcatgactgggagaaatacatactacctgtcacacagaatgttatgttattaactttttactgaaaaatcaaacatagagtagaaggatttccactttctagacgtactgttaacgttttgtcatattgcttcatctagacacacttttaaaaatctctagcagataaggacttttttctccaaacattcaatatcattattacacataacaaatttaacatgtaattccataatcctatttcatagccagtttatgtatcatttcccccagttatctcaaaaataccttgtatttttgtcttacttgaattaggatccaaagtccacacattgcctttggttgatatgtctcataagtgtctttaatctataaaacttaactttccttttgttttcatgtcatttacgtgttgaagaaatgggtcatttgttctgtagaatttcccacgctctagagttggcagattgtatccttgtgattttgtttaatgtgtttctttaccctctctatttttggtaaactggtagtgcttgaataaattcaagtttaaattttttgccaagaaagctttataggtaatgctttgtacttctgtttaatcacatcagagtcatgtaaggtctgcctgtctattttagtcagtcatgttaataatctgtgggctcaggtggtatcagtctgatccatctgttacacaggtcactcaagaaccttttacctaatggctttagccatctcttatctgaatgccaatttgtctaaccctttgcttgattctagaccttctaaatactgctctttaactattaggtatgtataggaaactggctgtactggagtctggagtctccaaaatggtggtctgtaagagataggtaaataaactggacagactgaacatagccatttccaaataatgaaactttttccctctccactactacataaagcccttttgtgagcttcatattaacattgccctttgaagaaagcccaagttagtaatctttttagattgaccatctttttttcttctcaggttgcccaggctggagtgcagtggcactatctcagctcactgcagcctggacctctcgggctcaggtgattctcccacctcagcctcccgagtagctgggattataggcacatgccaccatgcctggctaattttttgtatttttagtagagacagggttttgctgtgttgctcaggctgatcttgagctcctggactcaagcagtccacccactttggcctcccagagtcctgggattatgcgtgtgaaccactgcacttggccactgccactgtcttttgatagtttactgaactgtcttttgcactgtcttttgatagtttactgaaataagtaggttgagaagaatccattcctttttatctttttctttctttcttttctttttctttttttttttttttaaatgtagagcgtcttgctctgtcactcaggctggaatgcagtggtgcaatcatagttcactgcagcctttacctcctgggcttaactcatcttcctgtctcagcctcccaaatagctaggactataggtgcatggcactgcactgcacctggctaattttgtttttttgtagaaatggggtcttgctttgttgctcaggttggtcttgaactcctggcctcaagtgattcttccacttcagcctcccgaggtgttgggattacaggcatgagccaccgcccccagacctaaatcaattactaataaagatttattctttaaaggcagagaaagagacattgctgtcataccgaaacatgattttgaacttactgaattttgaagcctgttagtctcattgagtcatatgcccacttcacatagctgtaaatttgagagtgaagatcctgcaaatgatacggcagctttattgaaattcaatcacttgtaaaatagcatggctttcctgcgatagtcactaaaggtttgagatacatggaggattttataattgctgatctactttttcattaaaatttgtttttggattgatctgttttctgaatatctataattctccttttttctctcattttctttcttgtactttctctgcagaatttaacatgccatataaagaatattttgttggttttgttttgttttgtttgagacaggatctctctgttgctcaggctagagtgcagtggcaagatctcggctcactgcaacctccgcctccgtggcacaagcagtcctcccacctcagcctcctcagtagctgggactacaggagtatgccaccacacctggctagttttttgtatatttttttgtaggtacaggttttctgcttgttgcttaggctggtcttgaactccaggactcaagcgatcccccttcttcggcctcccaaagtgttgggatgacaggcgtgagccaccatgcgtggcccatttttattttttaacttgtcgttttgaaaaaatttcagacttaataaagttgcaaaagtattgcatagagtttctctataccctttatccagagtccccaaatggtaacatcttacataataatagtatgatgatcaaaaccagaaaattgccccaagtaattctgattggttatctgttctgacttgcaattgcattggtgcttgtggatggccatctctgttgatttttgtgatttgggttgcttgtgttttatttgaaaggacaaatgagagaagtgcttttcatataattttatacctttgcaaatgggttaaacttttcattttgrtcaagaagatgccattgtttaaaatggtagttcttttttttttttttttttgagatggagtctcgctctgtcgcctaggctggagtgcagtggcatgattttggctcactgcagcctccacctcccgggttcacgcagttctcctgcctcagcctcctgagtagctgggactacaggcgcccgccatcatgcctggctaattttttatatttttagtagagacggggtttcaccrtgttagccaggatggtctcgatctcctgacctcgtgatcygcccgccttggcctcctaaagtactgggattacaggcgtgagccactgcacccagcctaaaatggtagttctttctaaattgtctctccaaattttcccatgtatacaaatgaaataaatatgactaactttgtgtgtgtttattaatttttgagactgagtctcgctttgtcgactaggctggagtgcagtggtgcgatctcggctcactgcaacctctgcctcctgggttcaggtgatctcctgcctcagcctcccgagtagctgggattacaggtgcgcaccaccaagcccggctaatttttgtgattttagtagagatgaggtttcaccaggctggtgggttgcccaggctggtctcaaactcctggactcaagtgatccacacacctcgacctcccaaagttctgggattacaggcgtgagccaccacacccggctaattttaaaacttcttttttacattgtggtttcaccagataatttatttttgcttgtaactgttttaacctaagtaaggtagtaaggctttggaaatataaatgacagtaataggattgctttattaaagaattgctcctggcctgtgcggtggctcatgcctgtaatcccagcactttgggaggccgaggcgggtggatcacaaagtcaggagtttgagaccagcctggccaagatgataaaatcctgtctctactaaaaatacaaaaattagtcaggcgtgcgcctataatcctagctacttgggaggctgaggcaggagaatcacttgagccagggaggtagaggttttagtgagccgagattgcgccactgctctccagccagggtgacagagcaagactccgtctcaaacaaacaaaaaaattgctccatctgcattatatgttagtccaacttcgctttgaagaccactgtggtcagaaaatgctgtctctcaaactttttgttgtctccgtytgtccacaaaaatgtttctggaaataatgttttttataattagaattttgaaaatgtttgcttttttcaatagaaccgcattgacagatcagttgtaggatctgtatccttcctctagcagcctttatcagatggtgatgatattttccatattttatctctgaacctggtagtggttggtgaacctgacccacagtagacttattttgggtctatctcattcacatagcctcaaataatgaatagtccagattattaaattgtttgcagcttgatcttttcgtgtagccaagtttttgtcttttgttctacttgaaaaatttctttgtaagtccttggaatgcatttctcttttagattaatgtaatatctaagaatttctctgtactgtgttgttttccttggttctttttattggccttgagaaaaactttatttgctgctgcttcttaggaaatgtttatagtaactgggaaaaataagacaatgaaaaaaattaatttatatacaggtgatggtaatgggaatttaaaccataaaattatccttgacacttagaatgtcgctttagatgaagatgctattgttttatgaagcaaacggggaaaaatccagatttyaagatcccataaccctgtatgacttaacacttgaaagttgaaattaaatgtaaaaagccatacactcttttccttttgtttgtgagttaggcgaatttggtaatatataggaagagatgacaaaaatagactccattatgtcctgcttggaaccagttttcatataaaaatttaaaagcttgatatggaagaacatttttagctatttttcactgttttttttcccgattatattttggtaatatattttggatatggcctgtcttggtctttgtcatttttatcaattttgatttttcccttgcaaatgagagctttgtccagccaacatggagaagtacatttctagggactaaacctggctcccgggttgtttgctgaggtcctttttgtgtggaaagaatggttattaccagggaaggttttccttttgttttacttgctatccagatgctgctcagactctcgctctcgcacaggatcacagtatggatattccaagtcaagaccaactgaaggtaaaatcaccacacggtgacttcttttgttgtacagagtggccccttctctgtacctatggatcttggactcccaagacctttccctgaatgtggtaagaatttaataagaaaggttcttgggagttcacagaccagggacagagtgaaccttctctgttctgcccataacagagttccagtctctgaacctttctttgggatgtagcacttctgatcttcagttcttccagttgcatttttctttgggtttgtrtgtacctgtgtgtgtgtgtttgaggatattgctttattagattttaataggcgtgttgcagttaagttcatgtcaggccatttcctaaagcttccccaaacctggggaaactttatagtcatcttggtacgtggcgagggtttcatatgttttctgaattatgcctaattttgtagtagactggagggtttatacagatagsctgtttttaacagtagattttggcctttgtgcagaggttttttttccccccaggtttgggattcttctagctttgctcacagtgggttgaggagaggtgttgcctttatttgatgactgttgtgaacttgagttctctttcttgtgtgtaacccattgtgttgcacactaactggtgagccagaatggaactgctacatcccctggtstcagttatttctactgcactgatggacacctttcccttctttcagcaaagtgcagaggaaagttccacttccagaaaaagaactacagaagacgatatccccacactgcctacctcagagcataaatgcatacattctagagaaggtatgttttggattaaggctatatagacttttgttctcttcctcttccaacctttttatttttaatctctccgtatgtgaagtaggagagggatatgtcacaatttctcatccttttctgaaaacctttttatcagcctagttactaccattgttagctttgaagaggtagtgctattttagcaacccgtgagtactaggatggtgcaagacccttccatgagctagcatgctactagaaaatagctacacatttattgatttgctaccaggtgaattttctacatacatgaattcagctgccttagacttttcaatcttagtattcttgtatgtatatgatttggttagaatttttattttgatttatctacttgaggcaaaggccaattttcatacttttttttttttttttggagtcagagtttccctgggtcacccaggttggagtgcagcagtgcgatctcagctcactgcgacctccacctccttggttcaagtgattcttgtgcctcagcctcctgagtagctgagattacaggtgtgtgccaccacgcctggcttttttttttttttttttgagacggagtctcattcttgttacctgggctgagtgcaatggtgtgatctcagctcaccgcagcctccgcctcccaggttcaagccattctcctgcctcagcctctggagtagctgggattacaggcgcacgccaccacacccrgctaattttgtatttttagtagagatggggtttccccacgttggttaggctggtctccaactcccgacctcaggtgatctgcctaccttggcctcccaaagtgctgggattacaggtgcatgccactacgcctggctaattttggggttttgccatgttggccaggctggtctcgaactactggcctcaaatggtctacccgcctcagcctcctaaagtgctgggattacaggcgtgagccactgcacctggcccaatttttacacattttgaagtttgcaaagatgacataatatacttaatcacaaagccaagaatgagatataagaagcctggtataagttgagcactctaaatttgaaatgttgagcattctcaatttgaaagatkgtaatgctcttttagcaactcatgagtactaggatggtgcaagaccctttcaaaggatcttagaataagttgagcatccaaaatctgaaaacttgttttttttttttkttttgttttgtttttttttttttgagacagggtcttgctctgtcaccaggctggagtgcagtggcacagtctcagctcactgcaacaacctccacctcccgtgttcaagcgattctcctgcctcagcctcctaagtagctgggattacaggcgtgcaccactacgcccagctaatttttgtattcttagtagagacggggttttaccatgttgaccaggatgggttgatgtcatgacctcgtgatccacccgccttggcctcccaaagtgctgggattataggcatgagccaccacacccagcctctgaaaactttttcacatgacaccacaagtagaaaatttaacacctgacctcatatgacaggttgcagtgaaaacttagtttcatgcacggaattatttaaaatattacaaaaaactgtcttcaggctatgtgtacaaggtgtacatgaaaacttgggtcccattagccgggcgcggtggctcacgcctgtaatcccagcactttgggaggctgaggtgggcggatcacgaggtcaggagattgagaccatcctggccaacacggtgaaatcctgtctctacttaaaaaaaatacaaaaaattagctgggtgtggtggcgggcgcccgtagtcccagctaccygggaggctgaggcaggagaattgcgtgaacccaggaggtggagctagcagtgagccgagattgtgccactgcactccagcctgggcgacagagcgagactctgtctcaaaaaaaaaacaaaagggaaacttgggtcccatccccaggatatctcattatgtatatgcaaatattccaaatccagaaaaattgtttttgcccttggatggtagtcaccagatctttgccattccattagatatgttgtggtcaggctaatgagttcatccatattttccccaaaactctaaaaaacactttctaggctgggcatggtggctcatgcttgtaatcctagcactttgggaggctgaggcaggcggatcacctgaggtcaggagttcgagaccagcctggtcaacatggtgaaacactgtctatattaaaaatacaaaaattagccggacatggtggcaggcgcctgtaatcccagctactcgggaggctgaggcaggataattgcttgaacccgggaggcagaggttgcagtgagccgagatcgcgccattgccctccagcctgggggacaagagcaagactttgtctcaaaaaacaaacaaaaaaaacactttctaaaattagttttttgtttctgtttttgtgttggcgaagatgtgtaaaatcataaattccccaaagtcattttatggcatgatggcttctagtctaggcatgtggaccaatggcaggttaagcctctagttatgtctgagaaactttggctgctgaagttattttaaaagcttaaatttgaataagtttatcatgctggattgttttctttacattgcatttgagcataaactgaattttggtctacctagttactttgtaactattccagtctatatgatattaaatgtgtaattttattccttaatgcaaatccttgcttattttgtactcaaaaggcaattttaagatatataagaacatggctgggcactgttagaaaatcaaggctgggcatggtagctcgtgcctgtaatcccagcactttgggaggctgaggcaggggcattacttgagctcaagagttcgagaccagcttgggtaacatagcgagacctcgtctctacaaaaaatcagcccagtagaaaattagctgggcatgatggtgcrcaccagtcgtcccagctactcaggaggctgagatggaaggatcacttgagcccaagaggtgragattgcagtgagcggaggttgcagtgaatcaatatcatgtcactgcactccagcctgggcaacaaagtggtgccctgtctcaaaaaaaagttgggggcaagggcaggtatttaagaatagccaactcaaggggggatatgtagtttgtgatgaaaatttgggaataaataatagtattttcaggaagacctataggtagaagggacagaatttttatttgtggaaagaatgacctattttcatttccttcataagttgtagagctcgagtagggaagaataactttaatatggcaccatttcaagaatttggcttctgatagtttcaataatgaataagtggaaacataattgaagtttccctggccacagataagccttttagtcagcaatattgacataatttataagtaaatagggtaaccttatgttctggcaaggacccatgtattgcagaaattctttcaccatatgtacttcagcacacgttaaccccatggttgctatgggcaggcctaatgtattgggaggaggtagaagagaatgagaaagtaagaaaggagcagtagagcccaacaaaagactggagtatgggaaagaaaagagtatcatgtgataacaacagacttatgttaattagctgccctcagtgtcattcaaatgtacaatgtgagatcttttacttgaaataacgtggggtcttagtatttgtggtatgtctagatacttaactctaagagcccattgatccagcgagggcatatgtatgtatttggacaacctagagtttagtgttttatagtggttgttacctactaaaacatacgaattattgagaattgacccagaatatgtggtaccagtgagattgcctggacaaccttgtgatcacctattatggtttgtattgccttgctttgatcttaagggttagaccactatgttaccatcatttgcaatgctgttaatcaaactattatcaggcactatgtactagagcaagtaattctatagtttatacatggtaggagtgtttaaaataccagtaaatgcccatttagaaattcttttagmacaaggtcattgttcagatgcttttagagtcttttttttttcctgtcttctcatagaagacaatgcttttagagtttaaacttgataaacgatgatctgttygtagtgtcattacttgctaatgaagtctaaacaagggaggagatttgagctctgccactaagacagatacttgatttctggttctttctttcttagaacaggaatttctttttacctattttataaagaagttttaagtattctaaagatagtcttagttattacgtattgtgcatagttatcattcttttcatttgacttctatagatgaagacttaattgaaaatttagcccaagatgaaacatctaggctggaccttggatttgaggagtgggatgtagctggcctgccttggtggtttttaggaaacttgagaagcaactatacacctagaagtaatggctcaactgatttacagacaaatcaggtaaatttcacatttgaagggaagtggytttttttcttttgaaagggtaacattcttggttactcttgaccacacattatattctctaagaattcttatttactcctatggcgttaaataccatctgtatgcatgtgatacccaaatctgtatctctagtccttacctcttccctaaatgcccaacttcagtttccagatgcctatttaactaacaactctacttagaggatttgacattgaacaatttcaaaatggagcctttggctgtgcgtagtggctcatgcctgtaatctctgggagtcccagcctataacactgggaggccgagacaggaggattgcttgagcccaggagtttgagaccagcctaggcaacatagacaccatttttacaaaaaattaaaaattagccaggcgtggtggcgtgcgcctgttttactatagtaataactgattcagccccctccttcctcacttcctgtcattcttctttgttcactacatgcgttttggatatactaggctcctttctgacactgtagcccaaaattgctgccttcctcaggcaccttaagtttgttctttactctttctggaacactgttcccccacattctttctttgccttctcatgatttaggactcacctcaaatgtaatttcttcaaagaggtcatccctggccacaaaggctattatgttacacagttccagtaggatccattcgctttttgttttggagctgtgtagctataggtggtggccctgccaaacccatccctagttaaaatagcctcctctctagccactcttctcttttatcctattttattctccatagtacttctcactttgtaaaaatattgctatattttatgtatgtgttgtctgtttaccactgaaatgtaaggccagggcttttgtattattcactactttttccattacctggtacctagaacagtatgtggcacataataggtattcagtgagtatttgtttaataaatggatgagtatttaatagtgtgcaaaataataaattgtctctcatgaatgttgtagaaaagcatgtcatgaaatattcatagatgaatgcagaaggttagttctatatggagttcagaaagtgtcaggacaaaaggtttgggtgaccatcagtatttctcatatttctttaataarcatccttgaccattttaagggaaagaatatgtcagaactaatggaatgttttgtagcttcttagagtgtcacctgtagaagggaatttagggaatagattctatttacttgagcaactacaagtccttaccttttaaactcttcartactgtttcttaggtgttatacctgatttagtgttaaaagagaaaagtccatgcctgacaccattatatccatccattagtttatccacagtaggtgtcaagtagatatatgttgaatgaatacatgtccactgaataaaggcaagatgttctttsgcgatgtagtgtgacgacattgagttttgggttcatttgtgttgtttcaacatctctgataaacctctgaatacagaaactcatgtttgttttttttctgttaggatgtgggtactgccattgtttcagatactacagatgacttgtggtttttgaatgagtcagtatcagagcagttaggtgttggaataaaagttgaagctgctgatactgaacaaacaagtgaagaagtagggaaagtaagtgacaaaaaggtatgttgtggaaaaattccatgttgattctgtttgtgtgctcatagtatcatctgttgagatttctttgtatctgtttttacaacagattgctcacataatcccctttttaactttaattaatttttcaatccaattttaagattcacattaagtaatgttaaccagggctgccttaaaagcccctacttagtcaaaagcagtaagctactcttttttcccctgattatagcaacaagctaccttttctctccctttgctaacaaggtaaggtgctaatcaagcttgtccaacccacagcctgtggaccacatgcggcccagaacaactttgaatcaacacaaattcataaacttttaaaaaacattatgagttttcttgcgattttttttctccttttagctcatcagttatcattagtgttagtgtattttatgtgtggcccaagacaattcttccagtgtgacccagggaagccaaaaggttggacacccctgttgtaaatgaacagcagtctgtaggagaaaacttatttcttggaaatcttgatagcttccataaccatgttgtacctaaatggaaagataagattatttctttgtagctattttagtgttaaaatagtagaaaagaggggagattgaactctgagtacatacatatggtatgtactcatgaagtactcatgtgtatggtatgtactcatgtacagatgaagagtcatacaggcaacttgctcaagactcagaagaaattggggaggagatccagtggccagcatgtagaagagtgttggtaaacatccatcggataaatacagcaaagaaaaaattgggtcatcctttttagttatttaagggattttcataagaattttgagttcctgaaggataccctagtatattcgttgtagtcaaatggtacctgggttctcttagactagttatatgggtagcattagaaggaatgcaggtggcttgaattaagacaaaagtgacatttggaaacttttatttatttatttttgagatgggatctcactgttttgcccaacctggtcttaaacttcttagctcaagtggtccttccacttcagcctcccaagtagctggggtcacaggcatgtgcagccatacctggcctaggaaacgtctatagagagagatgggacttaaaatacttggccatttgtgagaaggttgctgtacagaggttcataattgtttcataattggttttattctttttattggaccacaaaactagggctttaaatttttaaattctaaattttaaaatttagaacactccttacttttgaaacggactttttttgtttgtttctgtttctgtgggcatgtttttataggacagccagagtatcacataactagtttcacttttgaaagtgaaaagtaaatttttaagatactttgtttcattcttcctgtctgcttagataaaaaattgcacgtttaacaatttgsagcttttctactctgaaattatttatttatttatttttaaattgttttagagacaagctcttattctgtcacccaggctggagtgcagtggtgagatcatagcttactgcaagccggaactcttgggctcaagcgattctcttgtctcagcccccaagtaactgggactacaggcgtgcaccaccacacctggctaattttttttattttttgcagagacagggtcttgctctgttgcctaggccagtttcaaactcctgggctcaaggtatcctcctgccttggcctcccaaagtgctgaaattataggcacctggctgtaaaatagccaccatgcccagctattttctttaaagtcataaatatgggcatcttctctcttctgaatgcaaaatttatttggtaactcttctgggtgcttttctgtcgtttgtgctactactgaaatgccaactagaagtacagaatcatgtgtttggtcttgcatttaagctgtctccttaagtgctagagatgggagaagaatgtgagttttaaattgaagcagttgtcttttttgctttyagttaattagcctcatctaaaacaagtaaacattactaatgagatgtttttgccttcacaggtgattgaagtgggaaamaatgatgacctggaggactctaagtccttaagtgatgataccgatgtagaggttacctctgaggtatgaatctttagcaagarctattttgcaccagccccatcttcagatgatgtaatcccagcagttcacttgtgttgaagagtgctgtttacccctcatttctgtctcccttgcctagttgctaagtgatgttggtttctttacatttttttaagagatttttattggaacttaagaagggaaggggataatttgatcttatcctctccctaccttgaaaaggatgagataaatgcctctgtgtgcctttctccctgccatcaaatctctctggagacacaaagttattcaaaatagtcttgcactgctttccctgactcaacacctctctgcaatcccaaagacagacccataggctatctaaaattatttgttgaatataaaaataatattgtcattgttttcttaaaaagaagcaaatggaaaacagcttaatttccacacagattagtattaatggaggactattaaagaagactkgatattccactcttaggttaatagggatggatttgtcactagttgacaactcaagtctagacccaaatgtataccttgcttttttgttgctrtttccccatgtttcttttagtcttgccacaggtaacacactatgggaaaaaggttggtggaggaaggataagaaggggattttacattttgctgcttggaaagagaaacatttttaggttgtttctggtgttgatccttcccccattcccaccacaccactgttgagcattatggtagttcattgccaatgatctgtgtgtagcttagtaataaagtaaaatatattggtccagtaagtgttcttgactgtaatacaaataacagagataaatgtttccatctgtttttttgagatggagtttcactcttgttgccaaggttggaatgcaatggcataatctcggctcactgcaacttccgcctcccggcttcgagcgattctcctgcctcagtctcccaagtagctgagattacagacatgtgccaccatgcccagctaattttgtatttttagtagagacgaggatctccatgttggtcaggctggtcttgaacttctgatctcaggtgatccgcccrcctcagcctcccacagtgctgggattacaggcgtgagccaccactcccggccatgtttccatcttaatcagacttctgtggctacttgggtgcagaaaacctattaagcaaatggactgtatttcatcatatcaaagatgccattgaatttaataagccctattattttatgtcctactaagaaaaagtgatgccaattaaactgtggcacaccatcactcatgaattccaaatctttatgaagttcctttgattatttgtatagcattttaaatgagattggaagatcttagactggcaagagtgttttgaggccatctggaatcccagtttaacacatggttgtgcccttgcctcagtctggacaattgagttatgacttctagacttgaagtgcttggcctttgacctaaaagtaatcaagttcagcttatgtcaaatcaaatcctgtcaaagccagttaaccgcattaaatattctttcttgttccctgtagctatttttgaattaagcaaagcatttaaaattcattgagatctagtgtctcctaatttgaatatggagaagtagggaaaaattacttggcattcaaggacaataacatttatttttcagagggcatgatttaggcatacagttacacctataattctgggtgcaatgagagtgcatgagtaaatttagtcgttttcaaatctcatttgttttagctttcttttttgccaaactttataacatttgctattagygtagaaaagaatgacagagtattctcttcattcttcagcctcttgcccgataaaggagtaagttgtgcaaagaaaaataactccaaagaagcccataaggtacagcaaacaatgtaaatttcaccgagatgaggtagaaagccacctttcttaaagccactttcttaaagataactatatcagattttggcttgaaaatagcagttgtggcactatcagtgtaaaccttccaaagactttccttcatgtggctgtagaatttgctcaaatcctaggctagatcactggtgtggaatagcttagtgagaggatgtgaatgaatttgacctcctttcctttttctcagcatcatattaaccccctgagtattaattggcttcacttgtctttgtaggatgagtggcagtgtactgaatgcaagaaatttaactctccaagcaagaggtactgttttcgttgttgggccttgaggaaggattggtattcagattgttcaaagttaacccattctctctccacgtctgatatcactgccatacctgaaaaggaaaatgaaggaaatgatgtccctgattgtcgaagaaccatttcggctcctgtcgttagacctaaagatgcgtatataaagaaagaaaactccaaactttttgatccctgcaactcagtggaattcttggatttggctcacagttctgaaagccaagagaccatctcaagcatgggagaacagttagataacctttctgaacagagaacagatacagaaaacatggaggattgccagaatctcttgaagccatgtagcttatgtgagaaaagaccacgagacgggaacattattcatggaaggacgggccatcttgtcacttgttttcactgtgccagaagactaaagaaggstggggcttcatgccctatttgcaagaaagagattcagctggttattaaggtttttatagcataatggtagtacgaacwtaaaaatgcatttattcmgttcacttaccacattatttgaaaatcaatcctttatttaattttatttccaacctgtcagagaatgttcttaggcatcaaaatccaaggtagctgtaagaaaaatactggagctaacaatgaagaacagaagtaatctgattagtcaaattattaagtgccatggattactttatgcagcagtcaggtacatagttaggtgaacccaaaagaaaaactcttgaaaacaagagatttcttccatgcacatttacaatattgaggtataattaacatgataaagtgtttccttctaacgagttgtagaaatctgagtaaccacccaaaaaagcaatagaatgtttctgtcaccccaaaacactcccttctgcccctcttcagacagtccttcagctatttcatggctctcaccctagttttttttttttttgcacttttttttttccgggggtataggggaggtgtggggcgacagggtctgtcttgttctgtctcccaggctgaagtgcagtgcagtggtatgatcatggctcactgcagccttggtttcctgggcataagtggtcttcccacttcagcctcctgagtagctgagactatagactagcataaccacactggctaattttttgtggagatgaagtctcactatgttgcccaggctggtctcgaactcctgggctcaaacaatcctcccgcctcagccttccaaattgctgggattatagtcatgaggcacctagtctggcccttttgcaagactttaatctgaaatctaaatttttaaaatttaagtacttacaaaggatatactatccaacatattgcatattatatatgtgctttaaagttttttttttttttgagagacggtctcactttgtcatccaagctggagtgcagtggtgcaaacacggmccacctcctgggctcaagtgatcctccagcctcagcttccctcacaggcattcactatcactcccagctaattaaaataatttgtagacggtgtctcgttatgttgcccaggctggtctcgaactcctgggtttaagtgattcccccgcctcagcctcccaaagtgttgggcttacagccttgagccactatgcttggctcaaagatatttttatgaaagccctgggactatagatttagctgattaaatttatagaaaaagtcctgtcatataaactggcaaagtctgttcttaatttaattagccaaatcagacttaacttccgtcagaacatgtcttggttttaattcagataaacacacaaacatacttctctggcacagccttcagaagcatcagtttttgttttgttttgttttgttttttgagacagggtcttgctctgtcgcccaggctggagtgcactggcacaatcacagttcactgcagcctcgacctcccagatccaagcaatcctcccacctaagcctcccaagtagctgggtctataggcgcgtgccaccaccatgcccagctgaattttgtattttttgtacagacagcattttgccatgttgcccaggctggtcccaaacttctagcctcaagcaaccctcctgcctcagcctctcaaagtgctaggattgcagtcctgagctactgccccctaccctctttgcgtcttaggagtcatttagattttttttgatccttttgtttagtgcctctggagctgcttacaccaaggcaatacgccttgatatactggatggttgagaggcagcctctttttttttttttttttttttttttttttggaggatagggagtatggctgttgtgaaaagggaggtaaagagaaatggtagatctgaagaggcctcatcagagcacatattttaggacaacacatatggaaattggacatctttaagttggtttccatagagctatgcatgtatccttacccccatgggaaaatgttggtgtgttctcaagggtatgcatgtgtcattttgaagaccaaggccctagaattgtcaaacttaaggatcataaaaatcatgagggttgcttgttaaaaatgtccaaacgtgcagagactgatctttgagatctggaccaggaatttgcatttgaacaagtgttcctggaatctctatgcaagttttatacagaacatacttttggaatccttgccctagacaggggtgtccaatcttttggcttccctggtccacaatggaagaagaattgtcttggaccacacataaaatacactaacactaacaatagctgatgagctaaaaaaaaaaaaaaaaaaaatcgtggaccgggcgtagtggctcacgcctgtaatcccaacactttgggagatcacctaggtcgggagtttgagaccagcctgaccgacatggagaaaccccatttttactaaaaatacaaaaaattagctgggcatggtggtgcatgcctgtagtcccagctactcaggaggctgaggcaggagaatcgcttgaacctgagagggggagattgcggtgagctgagattgcgccattgcaccccagcctgggcaacaatagcgaaactgtctcagaaaaaagaaaaaaaaaatcgcaaaaagaaaaatctcataatgtcgttgttggtttttttttttttttttgagacagtctcactctgttgcccaggctggagtgcaatggcatgatctctgctcaccgcaacctctgcctcccgggttcaggtgattctcctgcctcagcctcccagatagctgggactacaggcacataccaccatgcctggctaatttttgtatttttagtagagatgggggtttcactgtgttggccaggctggtctcgaactcctgacctcatgatccacacacctcggcctcccaaagtcctgcgattacaggcgtgagctaccgcacccagccaagttgtaatttttaataaaacttaagaagtaaacattttacttatgtttataggtatttgatcctaaatttgacacatcattgcccatgaaagaatcctcttaggctgctcagcttcactcttcctgcttgcccaccggggtttttcactgcttctgttagcactaagtacttagacgatcctaagatatgtgcttgagccgaatttcatctttacttgtaggaaactttaaactatttcttttcttttcttttttttttttttttacttgagatggagttttgctcttgtcgcccaggctggagtgcagtggagtgatctcggctcactgcaacctctgcctcccgggttcaaatgattctcctgcctcagcctcccaagtagctgggattacaggtgtgcaccaccatgtctggctaattttgtatttttagtagagatggtttcaccatgttggtcaggctggtctcgaactcctgacctcaggtcatccacccacctcagcctcgcaaagtgctgagattacaggcatgagccacagcgcccagcttaaactattttcttggtctgtttttgattttcttttttccttgccactgcggtacagattttttttactcactgccactaaactaaagcaaggcatagtttatatgtgaagtgttcagagtttactgctataaggaaacttccaaatactgacattyaccttttagctgtagttattgggaccatgtgytctggttttctggagactgccaaattgctcccatttttctgcatcccacctggtttctttctgcatgtcccctttcactttcaaacctcttcatttggatgttaaattatatggtcacctagttataggtaagccttgttcgagttgatatcttgattgtgaggaaggatctgtgtcattggagcttgtttctgctgcaacgtgctgtagactatgaataatgaaatcacaccacattaccatcagatttcttgttttagttgtcaaattaatatttatgattgttatcttgggcgaaaagttcagagcagagatgacaaatcattagaacaacgatgaatttcagtattacggctaaaaagttcttctgtctgaatattaactcactctccttccagtgtacttcacagtaattggtatgcttttttatttaatgcttaaatcaaactttataaaaatcttagaccagatctttaatatggtatgccatttccccagtctaccaatggaatagtatgggtttctaatcctaggcttgtacaatggattggagttgagccatgccagcctccacactgccactaacttctgtaatgtaagattgagtcactgccaagcatttgaaatatgcagttgtgttttaattataatttatgtatagttagatgtatgtagtgcattgtgtggtattayttggtttgtaagaatttatttttaagggtcaaggtcatttgtaacattttgtgtgtgtcaattcaatgcaatgttggctgccttttgaagtctttgatatattggtgaatattcttctgatctataatacaaagctatgtaatgttacctcttgactcgcttttgaaaggaagacaattgttaactagatatttgagttttttcccctcagaattatgtgaatttctgatatatggctttagatactgtgaatctgttttccatttagtcagttatctgcttaaattgttcagaactatatcctaacgagcaattagttctgatggttctcccagtcatgagtgtgcatgtgtgcaagcatgttttgatcctgatgctacctttgctaaaaatggccatagattaggaactagctatgtttttagaatcaaagatgaaccggtaagctgtctcatgtaccaaacgtgaaatttacagtgtttacaaatgtctggaattttgcactgccatagggaatgttaaggttacttggctggaatttatcagacttgtgagtaaacaagttgaagtttagcagatgagggggaatattgaggcccctaaggctaaacaaaataatcagtatctgagatagtggctaatgtggctccccaggcctaatttgggaacagtttttcctgattgctttgagaagtactttcttttgacagaaattttcattctgcttgccattgctatattctccctttataggagccattggatttctttccttttgtgggaaatgtcccattagcattttcagatcttttgatgtgcactaatgccattattggtaatgccgttattggtgaatacagcatagttaaataaactgttacagtaaatctacacttggatttgctgcacctctaccaatagccttttgaatgactgaaagtgttaacagagaaagaggcatgtctgcagaaagagatagctaatattttttggtactttatctgaaatccaagatgctgcttcccctgcaggttgttttccttcttacgatcctcattgaatcccctctgggagcacaggacagttagtagaactctccatttctttttttttttttttagacggagtctctctctgtcgccccggctggagtgcagtggcgcgatctcggctcactgcaacctccgcctcccgggttcaccccattctcctgcctcagcctccctagtagctgggactataggcgcccgccaccacgcctggctaatttttgtatttttattggagacggggtttcaccgtcttagccaggatggtcttgatctcctgacctcgtgatctgcccacctcagcctcccaaagtactgggattacaggcgtgagccaccgcgcccggccggaactctccatttcttaaggtaaagagggtcaaggatacctaaaaagggtcaaataatgctccaagagcaattcctctttcagagcagttgctgtaatttggcaaatgctttatcgaagattgatattaggctaggggcggtggcttacgcctgtaatcccagcactttgggaggccgaggtgggtggattgcctgagctcaggagttcgagaccagtctgaccagtatggtgaaaccctgtctctactaaaaatacaaaaattagccggtcgtggtggcgtgcacctgtagtcccagctacttggcaggttgagacaggagaatcgcttgaacctgggaggtggaggttgcagtgagccgagactgcaccactgcgctcccacctgggtgacagagactctgtctcaaaaaaaaggacatttatcattataacatcttattagagcccctaatttcttatctgaaggcactgtttttttttttaaacagttaagtactgatgtcaacagacaaatatttctgatcagatagtcccctgtcaacagtagcaaatgtggtttcataaagtgggaagaaaacagcattttaaagtaactttttgggagactgatttgagtaataataaaactctggtctcccttaagaaaaaaaaacccttccacctttactgtgtcatttatatccccttagttccaaagttaattatcttatttctggatattgcttttataccaaagacccttatcagcccttgtaactacagtatctttagataagattcctctttccagtcagtcctgggaaatgtttctgttgcagagttaggcggtagatgggaagctgtgatggcagagctactatctaataaagtaacaactcgtagttgaggcttcctttctgtgtgtgatgggggatagggagttagctcccctgttgtctcagcactaagaaattgaggtcaggccaggcgcggtggttcactcctgttattccagcactggggtggccaaagtgggcagattgcttgcgctctggagctcgagaccagcctgggcaacatggtgaaaccctgtctctaccaaaaatacaaaaaaaaagctgggcatggtgggtgcatgcttgtcccagctactgaggaggctgaggtgggaggatcgcttgagcctgggaggtggaggttgcagtgagctgagatggcaccactgcaatccaaggtgggtgacagagacgctgtctcaaagaaattgaggtcaggcttccttcttacagaattatttttttctctgtagtttgcctcattttttcactttcttttcaatgagaatcgaagtgtttcttttgggtttttttttcccccttttaaaatcaacaggaaatgtttcaaaggagggatgaaatgcttcttggcttcctcagcacttggcaaggtagacctcatagcaaccttgaatatgactttctttagtctctagctatgcactattaagtgcctcttgggtagaggtagagttaagtattgagtgccagtcttgacgtccgtatgcctcagtttttctcatatataaaaagcagtatacatacctacccttttctacctcatcatttgttgtagggattaaatccgggagagcaattctgaagcctataaatttccttgaagagatctaagaacctattatgctcttggtgtaccaagctctggggtatatattcagaatacctcatgttctggaagctgagcactagctcccctttattgcctgcctggcagagcctgtttgattactgcaggcccttttacccatgcttctagtttaggtattctttctttgatatgaggctcttgaccagaaaagagttctttctctaggtgttctgagagaagtttgtaaatttggatagtacattctatcctgataaaaccaccttgctgtggtcttgatgtacaaaaaaaaattttttttttgagacagagtcttactctgtcacccaggctggaatgcagtggcgcaatcttggttcactgcaacccccgcctcctgggttcaagcgatcctcctgcctcaacctctcaagtagctgggactacaggcgtgcaccaccacacctggctaattttgtatttttagtagagacagggtttcaccatgttggccaggctggtcttgaactcctgacctcaggcgatctgcccgccttggcctcccaaagtactgggattacaggcgtgagcaactgctcctggcccaaaacatctctttctacatacacttgagtaggtggcataaaatgcactgtcaatatatagaaaacatgaaattttccaaatatttccgatcagagaatcacaagagcagcaaatgtggtttcatcaagtgggaagaaagcagcaatttaaaataactttttgggagactgaattgagtaataataaaacttcagtctttcgctaataataataataataataataataacaacaacttattgaatgtggccagctcactagatgaggaaagaggaaggcattttctgcattcttgcctagttttccttataagcaccactaagttaatagctctgtctttttggtgtttgcactatgtaatgcttttaatactttttaattgtgcttttttatgtattaaatgtttttccttttgccattgtgtgttgtcattatttttgaaataggtaattttgtgtgtatacagttaaatctcattgctattggatcttttggtctgatagaccaaagatacaacagaaaattacttctgttacttctttggggaaattaatggacttaaaatcagcagcattggatattttcccccagttaccttttagagcaattgctatattttattttcagggtcccaatcctgaagaaatccatcaaattttacagagtattttctaacattgagctcgttgtggttttgaattggggctagtacgagaggtactgagggtttgtcacaccatatgcattaatcagttggtatgcctagcatctgctagggtctctaatggcggttcttaaactttggggattatagtcctccttgaaaagctaatgaacctcatgaaacctcttcttataagtagcacaatattaaacatcaatttcagggcttcattgaaaccactgatccatgaccctcaggttctgttctttggcaggatgccaaagaagagtgaatggcccacaaagagcctggtagcacatacgcttttcaaaaggtcatgcacttacagctaaagccattaaggtgagtgaaacatctggctagttgtcctgagcttgggtaggggcaggattaccatatagttggtgcagattgctgtgaactgtataactcttggggcactgttcataggctgccatataaatgatcctttagagatgtgtaatatatatctgaggaggccttgggggtggggtggggtgataatggacataccatcgtaacttttttttttgatacagggtcttgttctgtcacccaggctgaagtgcagtggcgagaggttcacggcagccttgacctcctggctgaagcgatccagccatctcagccccccgagtagctgagaccacaggcatgtacaccacgtctggctgaattttttgtgtttttgaagagatggcgttttgccatgttgcccaggctggtcttgaactcctgggcccaagtaatcacccacctcagcctcccaaagtgctgggtttacaggcaggagccaccatactgggcacccagggtaacactttttaaatgaaaacaaaacaaggagcattagaaacaaaaatggggccagcttctttgtctacttaagcctttcacattttgtatgtgacctgtataaggtactctaatgcaatttcaatggcataacgtgtttcctggggttttccatcctgctcaccttgagttcctggtgctgtagatgtatcatttttgttgaatgtattcttgatactagaagaagaaggcaagctgaaactggtaactaagcttacagagtattgcagttttttttggaaatagggtctcgctttgtccccccaggctggagtgcagtgatgcaatcacaactcaccacagcctcagcctttaaggctcaagtgatcgtcctcctcagcctcctgagtagttgggaccacaagctcatgccactacacctggctaatttaaaatattttttttgtgaggaggtgtggtcttactgtgttgctcatgtttgtctagaactcctgggctcaagcgatcctcctagctcagcctcccaaaatgttgcttttgcctggcacaattgttagtaggtaaatttcacatcactgtttgttttgagggtttgggggttttttgtttgtttttggtggagttacacaagtccatcatataaaggtatgaaaagagttattgctattaggaaaaattcaagtcattataggtttgggcatacagggttaaccttgtgatgtacatccccagccctgaatttatttgattaatcctctttaaaataaaggattacattcaatcaatttgttaaaaacttcagccgaattaaatttagaggagtttaatagagcaatgaacgattcacgaattgggcagtctccagaatcacagcagattcagagagactccagggatgcctcatggtcagaacaaatttatagacaaaaagagggaagtgacgtaaatamataggcagtgaagtacagaaacagctggctggattggttacaggtgggcgtttgccttatttgaacacagtttgaacactcagcagtgtatgagtggttgaagtatggctgctgggattggccaagactcagctattgttacaggcacatactcgtaaattaggttttcaatcttgtctgcctattaagctaggttacagttcatccacagggactcaaatatgtaagtatggagtccttctcaggccatatttggtttgctttaacaaataaatacttattaaatgttaatatgagccagagactggttgatactgagaatacaacagtaaggaagctgctctcaagttgcctatggccagacaatggagttagatacttaagacggtttccacatgagccaaggaaacagtagctgaaagaactaaaggagagagaatggcttttggggggaactcttaagtgtttgttgtgcctggagcaaatgatgtgcttggaaaagtgatgagagatggtgctggagtgggaaggggcctgggtgttgaaagtgtgatatgctaacctagtaggtttgaatgttatcctgaaggtagtggagagctacaaaggtcttaagcaggagagtgacatcatctcattggcatttttgaaagatccttctggctgcattggtgagagtagactggagtgctgtttagagcagggataacagtgaggccatggcagtaatctgggctgcattgatactcctaaagtcatggcagtgggctgggcaagaatagtaatagatgcattattgtaatagaacacttagtaggtgctgacttgacatctgttattccatgaggcatttaaggctcagagatgttaaatagcctgtcaaaggcaattcagaattgcagatagtcagtggttaaacccagtatgtttgagacaaaagcccaaaagaagtgcaaggatttgagagaaatcaaggtagaagagacagacttcatgacaatgcgtgcactttaaacaatgtatgtttaaagtgaccatcgtttttagaaaaaaaaagatgaataaatgtggtttgagggaagcaggga

SEQ ID NO: 93413 - DNA, 113260 bp, Homo sapiens
  misc_feature (1)...(113260): n = A,T,C or G
gagccactgcacccggccctggttaaattttaaaaattacttacagtagactgtctggaaataatttaaatgttcctttaatttttctgtatagtctgagaataagagtagtcaaggatgacttataaagacaaaatatgcacacatccttcaacctagcaatcctaatctctagaaaggaaagaattacagacacaatactgccacagtaagttttatttcagcagtaaaaatttggaaataatctatatttccaacaataatcctggtcatataaattatggtttatccatatgatgaaatacagtttggccattaaaaatgacattaagtaaaaatgacattattagagatttactgacacgagaaaatgttcatgatatagtgttaatgaaaaagcagattacaaaacagtgtatagtatatgatttaatttttgtgcttatatacgtgtatgtaaaaacatatctatgttatgtgcacacgaagcaagtaaggaagatttagaaaactgtatactaaggggttaacagtatttgtcactcaagggtagaattatgcgtgatttttattttcttctattgtgttacctgcattaaacattttgtacaataaacatgtgtcattcttggggcctaatctaccagaaattccttgcatttttaaggagaagaaaagaaaggagctgcccaaatttatggagggggtaaccatctgatttttaagtgtttgtatgggcaagcactccaagggtaaaactcatgctaaatttaatgttcttgccaatatggtgcatgcatgttagctgggttgttacttacatgatttcaattttctcgcaggaagggcttggggcaaattgtttaaggtctttcaaggattgtaggtggatagtcccttggttggtgctgatgcaggaacagcgaccctttctcactactggggttcctgagggaaagaaaaagatagaacacatcagtataggccaatgtttcagtttaggtgatctatcaaaatgatacacttgactgagtcatgattattgctatcatttaccgagtgcctaaaaataatcaccacaaacctttgaaggaggtatcatctctattttatacataaggaaactaaggttcagaaagattaagaacaaagtcatannnnnnnnnnnnnnnnnnnnnnnnnnnnnnnnnnnnnnnnnnnnnnnnnnnnnnnnnnnnnnnnnnnnnnnnnnnnnnnnnnnnnnnnnnnnnnnnnnnnnnnnnnnnnnnnnnnnnnnnnnnnnnnnnnnnnnnnnnnnnnnnnnnnnnnnnnnnnnnnnnnnnnnnnnnnnnnnnnnnnnnnnnntaagtccgtgggagaaaaagagactttcacaatatttaataaatgcctatcacaagacaaacagataactaattcatgtatgctatgctgatcacagtttcttaagcaactcctaaaccatctattatttattatctgaccttaaggaatggaactggtgttggtgttgaatagaaagcactcctttgtaaccaatcaccactttcatcctcatcctctctcctccccactgccttgcttttcaatagtgttttaaatttttgaaaaccccttaaaatacattatcttaattcttaaattcatatatttacttggtacttattgtaccatatgccatacattgtgtagcagtcagaaaaggtataactacaaagttctattttacagatgatgaggaaactgaggtctagaaagattaagtaatttgtccaaggtaacaaagatagttagtaaatagattagggacaaattctctgattattggttggatccttaattggttagccacagatatacttagcaaaaaacagtatcagggagaagaaaataatttaggagatagagttctcattattacccagttcaatgaacatttattgaacacttactaggaattcatacacctagactacaaagacttgtgtttgacttggcagatcgaagttatgaactttggataactggtcatgtcactgagaagcttttatgactgaccaaatattactcttcaatgcaggcagaacattcacctttatctggctaatcaagattcttttacagtgaatcacttctcttactttacaacctaactcagaaccccttaccttgcactccaatcagaaccagcaagatgatgcccaagaggaaaagaacaccacttttcttcatagtgatagaatggagttccaagtcactcctgtattggattttgagcctgagaaattctttagagaacacattttggggatcatatttatttaggatattcatttctctcctaaactctgattggctrgtatctttagctgagctaactaaattgaccacaracttgattgtgctgggggaaamcctagtctcagatccaagggaatttctgcatgtttttatttccatttcacataaatgggtggtttatagtaagggatgtgaaactagcaacactgatagcctttggcacattcacagttgctcacctgtgtgaagaataggttatataatgaatatactaatgttatacaacaaaggttggagatgtggtttccagatgggaaatattaaagtccagataaataatatacttttcaaattcccttactatttatggcatattcttctgtataatagatggctacattgatattttcttatattgcccacttaacaacttaaagcaccttaatttcctctgggaccaggtcattttctactagtggtaagctcattctgtatcattcctgctacagtattattttttaaactaatagattggttagaataaggggtcagttgcatgtaagagacccaaattaacagtggctaagaaatgcaataaaaatgaagataaatagctgggacctaattaaagagcttttgcacagcaaaaggaacagtcagcagagtaaacagacaacccacagagtgggagaaaatcttcacaatctatatacctgacaaaggactaatatccagaatctagaatgaattcaaacaaatcattaagtaaaaaacaaacaatcccattaaaaagtgggctaaggacatcaatatacaattctcaaaagaagatacacgaatagccaacaaacatatgaaaaaatgctcatcactaatgatcagggaaatgcaaatcaaaaccacggtgtgataccaccttacacctgcaagaatggccataatcaaaaaatcaaaaaacagcagatgttggtgtggacttggtgatcagggaacacttctacactgctggtgggaatgtaaactagcacagccgctatggaaaacagtgtggagattccttaaagaactaaaaagcagaattaccattttatccagcaatcccactactgggtatctacccagaggaaaagaagtcattatttgaaaaatgtacttgcacatgcatgtttatagcagcacaattcacaattgcaaaatcatggaaccaacccaaatgcccatcaatcaatgagtgaataaagaaactgtggtttatatatacacaatcgaatactactcagtcacaaaaaggaatgaattaacggcattagcagtgacctggatgagattggagactattattctaagtgaagtaactcaggaatggaaaaccaatcatcatctgttctcactggtatgtgggagctaagctatgaggacacaaaggcataagaatgatacaatggagtttggggacttgtggagaagagtgggagcggggtgagggataaaagactacaaatagggtgcagtgtatactgcttgggtgatgggtgaaccgaaatctcacaaatcaccactaaagaacttattcgtgtaaccaaataccacctgtaccccaataacttatggaaaaataaaaaaaaaaaaaaacaacaacagaaaacagtggctaagatagaagcttatttctccctgagagatgtaggtggattagcacttggatagtggctctttcccatgaggtcttccaggcttctcctttcttgtgttgtcaccatctctagattgctgccctcatgcacatggccaaaggtggcttgccaccatgtccaatttccaggtataggatgatgagaaggcagaaaaagggcatgtccctcctttttagacatcctagaagttgcacccatcattttctatcacctcccatggaggcaggccttaatcacatggctacacctagttgtaggggaagttaagaaacgtcatctttattttggttgactagctaaagattggagatttccttattgtaaaacaatgtttctcaacgttttttttcattatggactcagcactgcatgcgtgtgtgcrcgcatgtgcacccacacacacacacacacccccccacatttcaccttgctctgagaaaaaataaaatgaactgaaaactaaatttaatttcttcctgaagagagaaatcaaatgctaagaaataagattttgttgggtagggttgaaccttggtaggccactagtcattgcaatatctaaaattttttagctctccaagaaccaatattttcccccttgggagcaatttacctctcttcccattgacaatgcatgctgtagaattggaggaaaatggatattagcatttcatgtcacatggtgcacattttttgactgacttctatacagattattaatacttaaatggaattacagaattctttttgaataaaacatgtggtgaccattgatacagcttatccatttgctcatgcttaattttggtactgactgtggcaatgcatagagtgcaaataggttcacgttcctgctttaccacttaatgactgtgtgcaaaatacttaatttttgtgagcttcatctccctcatttaagaaaattattagacctcacagggtgttaaaattaatgccaaggacggattgtcaactgcaaagcctcacagggctagtggctgttctttccagcaaagaaaggaggatggaaatttcttaggataagaactaaggcccagcactgttggtgctacccacctttctagcctcttcttacacagctctctgctcccatcactttgtcttctctcagttttcttttcttttctccttctccttcccctcccctcttcttttcttttcttttctttctttttgagaccgttttttttttttgcccaggctagagtgcaatggtgcaatctcagctcacggcaactttcgtctcccaggctcaagcgattctcctgcctcagcctcccaagtagctgggattacaggcatccaccaccatgccaggctaatttctgtatttttagtagagaccgggtttcaccacgttgcccaggccggtctcgaactcctgacctcaagtgatctgcccgccctcccaaagtgctgcaattgcaggcgtgagccactgcacccggcccttctctcagttttcaaaggggacaatgctccttcccatggcactgtttttgctcatgccattcttctgcctggagcgactgtgcatgctcctcattcctgccctcctgcatagtagttactcaccatagttacccaggccagcatcatttccctgggaagactttcctgaaccccagaggggctctcaccgcacacttgcagaggccttgctgagcccgtgtccgcagcaacgctacgtttccctgcaaccctatggttaacatttccttccaccactaggcaaggaaggcctgcgacgctccccgtctgagcatggtgctaaacacagtgcctagcacccagtaagcgcacacgcatgagggaaggagctgggagctggctcggcaggtctggaagttggatagggtctgtaaagggctgcctggctccaggggcctcacacgcagcgacctcagccgggcccaaggtgcgtgtactgcgcatgcccagccaactggtcttccagaaccttcttcagtgaggaggttatacccggaggtctcgacgctcgctcgtgctgctcgtgttgccgctgggtacgtttgctgccagtgctgatccagccggaggcgaagagaagcactttgggggcaaaaggtaggggttgtgccttcaggatctctcctctctgtcccctgagcggcccgcagcctccccagccgagatggccgtgcttttggggatgggtgggaaggttctcagcggcggtggccatgagcgaagaggcccgttttgcaggtttcacacgaggcttgggtgaggccagcagggaacgacggccccagaagggccagggcactgggcttaggggtaaccctgggccgtgggcttcagtgactgggaaagaggcccttcggataagagaaaggaggtgttggggtcagttgggagtcactgaggccagatcttatttgttacccaaaaaggggctaattttctgagatagcaagcggaatgggagggcttctctcgcctgaccctacttcktggtgaaactgttctgccatggtagggtagggccccgcccctctgagcaggctggggccgctgcgcccagctcaggcctgtccagacactagtttcctgggcttcgtttaggaacttgtcatgcaaagtctgagagcaaccacattctctcaggaagcaggcagcgggaaggagaaaatcccattgatcgttgcatttatggctagacaaggcttttaggagaaacagaaacctgatgagaggatgttgcaggcgtttctcacagccctgggaatggagccaaagatgatctagagttgaaatcaacagttaccaattcctttttggacaagaattttaacttcctgtgccttgaaaaattccagttctgtgtccgtaggggatccaaatgctaatgtaaccccaaagaactttacaaagcggaattcttagttttcacaagtgtggcccagcctccctcttgaatctttttggttgtggaatcgaggtgttctgtttaattatccagtgtgactgactctgtggcagggacggtaagagccttccctttttacttgtgagaggagaagtttctctcataargaaacctccaggcctgtttgaatttctcacagtgtggayttcccctcctctcggcagctgttgttagtattaaactgactagaaagggrtttatttcttgaaagtcttagaagccccaagagaatattctgatttttctttttccctctcctctccccacgcagggagtcattccttccttcctaaatacaacatggtgagttacatgcaggcaaatcctagctgtgggaggttttatatcctgtctgcatctaagtcactaagagaaaggaccaagttcttcctttgctaatcttattatctggcttcttggtttatatttctcatgtaaaacttaaggactgggttaggtttgtgaataaacagttttgagagagcatgttaaggacatgatgtaaaggacaacttttgcaaaatgttgacaatagcaacatttttgcttggtgactttaggcaagtcagcttgtagtctgaggatatgtaacaatagccattaagaagctgctgactaacctggagaaaaattatcctgaaaagaaaacatgtttatacttaaaatatccatacttatttaaaatgtcactttaaaattgcatatgtaagtaattttacaagaaaaaatccacattcttaaaaatcttcatttactgtttatcattcatttcatccaccaaacttttattcttatggttctagactctgaggtcacatatgtgaacaatgatttcctcagagagttcacagttcagtgggggaaaacagcatgtacattaacacttattatagaagaagtggtatgataaaggattgtacagaataattggaggtacagagaagtgcacaaccctggctgatgggttcagacgcagctgtctgagttaggtctgaaaaggagaattggctggaatttgttacaagaagaagttgggggaatattctaagcaagaggcaggagaaggtatgccaaatttgaraagctgcaagtactttagcaagggtggacggtagagtgaataatggagtggtgagaaattggtctagaaatgtggcaggaacaagacgatgaagtgccttgtgaatctctatgtggggaggagacactgsagaattttaactaagggaataacatgakatttatatayacacacacacacacacccctgtgtatacatctgccccttgtcaccagtctttaatcttattttacttgaacatttccttgtgtctacgtagtttatatatttgtaaaatgttctcatatttctagcctcttsattctcagttctgtgtatttragttgtttccaataatgtctcagtaatacaacagtgatcttactattttaaaaaagattttactctcttggggtatttcccatctttgaaactgtagggacaaaggttaaaaaacgtttctgtatcttctgtaacattttgacagattgcttgccagaaagattgggctatcagtatgtagatgtatctgtttcacaatcctcttgtcattttatttacttttgttcatttagcrtgtgaaaattggcactagagactagtgttaattccattttctttacaaattgatattttactttgtattggtttaacatctgcatttcctacctttttaagaccacttgtcaagtagagtcagagttttgaccttgtaaatatctatcaattctttacatattttgattaggaagctctaatgcatttttagtgaaaatatttgctttttccattttgttaaattaatttccttcataattaaaaaaaagaaaacacaacttaggggctgaattgtgttcccccaccraatgcttatgttgaaaacctaactgccagtacctcagaaggtgactgtatttagagatagggttttcacagaggtaattaagttaaggtgaggtccctgaggaagcacagtctttggacttactagaccaagatattaaatcagctgtcttaaatatactcaaagaactaaaggaaatcatgtacaaaaaaacaaaaggaaacaagacaaaatgagaatattaataaaggggtagaaattataaaaaaggaaacaaatagaaatgatggagcggaaaagtgcaaaactgaagtgaaaaaatttagtagatgggttcaacagcagttttgagccagcagaagaaagaatctgcaaatctgaagataggacaattgaaattttcaaggctgagaagtagaaagaaaaaagaatgaagaaaagtgaacaaagcctaagagacctatgagacaccatcaagtggaccaatatatgcttaatatgagtttcggaaggagaagagagagaaagggacagaagactattcacagaagtaatgactgaaaactaacgaaatccaatgaaacgtatgaatctgcgtgactccaagaagctcagtgaactccaagcaagttaaactcaaaaagatccacactgagatacctaatagtcaaactgctaaaactcaagagacagagaatcttgaaagcaacaagtgaagtgattcatcatatacatccaagggatcctagataatattaacagctgatttcttatcagaagccaaggaagcaagagggcagtgaaacaacatgtttaaagtgctgaaagaaaaaaaatctgtcaatgaagaattctrtatctggcaaaactacccttcaagaatgaaaaagaaatgaagacatttttaaatagactgaagctagggggagtttattactagtagacttgctctacacaacatattgaaggcagtcctgcaggctgaaatgaaaggatactaactccaagccatataaaggaataatactggtaaaggtaactatgtaggtaatataaaaaccagtattattgcacttttggtttgtaccttctcatttttcctatgtgaattaaaaaatgcataaaaccataattataaatatgtattaatgagcacacagtgctgtaatctgtgacaataacaattgtcaaaggggagggatgcagatgtataggagcagagtgtgtttgtttactgttgaaactaargtggtattcaaactaggatgttacaagtttaggatgttaattataatccccaaagtaaccagtaagagaataactaaaaatatacagaaaagaaaagaggggactcaaaatagtacactctaaaaattcaactacttaccaaaaaaggaagtaatggagaaattgaggaacaaaaaaataagacacttaaaaaattcaatagctgaaaggcaaagtaaaaccttccttatcagtaataactttaaatgtaaatgaattaagctctggcctaatgagcttatatgtataaaggtttgatttgctttggtttgttgagacagggcctcactctgttgcctaggcttgagtgcagtggcatgattatggttcactacagcctcaacctggctcaaacaatcctcccacctcagcctctcgagtagctgggaccataggcatgcgccaccatgcccagctaatttttgtattttttgtagagatgggtttttgccatgttggtcagtctagtctggaactcctgggctcaagcgatcctctggccttggcctcctagagtgctgggactataggcacaagcctggcctgggattataggcacaatgcctggcctaggtttgttagtattttattgaggatttttgcatcaatattcatgagagatattggcctgttgttttcttttttgatgtgtctttgattttggtatcagggtaatactggccttatagaatgagtttggaaagtctttatttctccttcatgtttaaaggatattttcactggatatactattctaggttaaacatgttttttcttcagcactttaaatatgttatgccattctatcctggcctgtaaggtttccactgaaaagtttgctgctagacatatttccagatatttgaagatatttgagtgttgctatctaagccatatttgcgttaggaataccccaagcccagtaatactgtagtttttgcagactcaaagagataccgccttggtcttagataagatttggaagaattctctggattaccaggccgactcttgttctcttcccttagtttctcctaaacaaatgaagtctctctctctgtgctgagctgcttggggttgggggtggggtgacaccaagcacacctgtggccaccaccactgacgttgtgctgagtcagacctgaagccagcacagcactgggtctcacccaaggcatgtcactgtaaccactacctggctaccatctgtgtttgctcaaggccctacagctctaccatcagcatgtggaaaagtcagccaggcttatatccttccctgcaagcagcaagttttcccaggcaccagatgggcccagagatgctgtctgggagccagggactggagtcaaaaaccttagatatctccctggtgctctattctgttgcggctaagctggcactcaatctatgagacaaagtctttcccattcctccctcccctttccagaggcagaggagccttttactcatgcccatcaccacagacccatgggatgtacagacaggctacctaacaccaatattcacttaaggcccaagggctcttcagtctgcttatggtgaatgctgcccagcctgggactcacgtttcagggcagtgggctcccctctgggccagggcaggtccagaaatgccatctaagcccaggctggaattgggggcccaagagcccacttggtgctctacctcactgtggccgagctggtacctgtggttcaagaaaaagtctcctttacttttccttctgcttttctcaagcagaaggaatctctcactatgaccaccacagttgggaatgtgctgggtctcacctaaagccagcatatctgagtctcacccaaggcccactgtgtactacctgggtattggctgctggttattcagtgcccaagggctcttcagtcagcaggtgatgaatcctaccagcagtgggtccttcccttcaaggcagcaggttcccttctggcccagggcatgtctagaaatgtcatccaagatctagggcctggaataggggcctcatgactctctgcccagcactctatcctactgtggctgaactcgtatccaagtttcaagacaaagtcctctttattcttccctctcctcaagcagaaggaaggagtcgcttttattgctgtgagctgtgttgcctggagttgggaagggtggtgcaagcactctctttgctgtcctggttggtgtctcattaggtcatgttcccccaactaggttgtgcactccccaagtccactggctcttcagcacagcactaggactgcctaggacttgcaatccttgtggcctagactgcctttcagatttatttaggaccccagagcactttagcgagcagaggcaagacttgccaaaactcaacttctaaccactaggatgggtgattcccctttgcctggggatggtctaaatgctccctccatgggcatccactgagttcagcctaattttgctttccactgtgacagagcatgactgggttcccccaagcacacagattatctttctgtgcctcatggccactgccaggggaagggagaggggtggcattggccattcaagaccatctttcctacctggttttaactttgtatcactgaaagaagtactgattggttcagccactgtgagaagcagcttggatatttctcaaagaacttcaaatagaactaccattcaacccagcaatcccataactgggtatatacccaaacaagtgtaaatcattctaccataaagacacgtgcacatgtatgtcatcacagccctattcactatagcaaagayatggaaccaacctagatgcccatcaacggtggacttcataaagaaaatgtggtacatatacaccatggaatactaaaaaagaacaaaatcatgtcctttgcagcaacagagatgaagctggaggccattatcctaaacaaattaacacaggaacagaaaaccaaatactgcatgttctcacttataagtgggaactgaacattgagtacccatggacacaaagaaggcaacaatagatactgggacctactcgacagtgggggtagggaggaagatgaagattcaaaaactacctatctggtactatgwtcattacctgggtgatgaaataatctatacaccatacccccacaacacacgatttacccatgtaacaaacctgcatgcgtactccctaaacctaaaataaaagttggaaagaaaaaaaattcaagaagtattaaatacaaagtaatatgccatgaaaagtctccctgtgctatgaatggaataccaagtttactgtattttacattgccatataaaagtgaatctaaacaaagcaaatgaagaacatatgccagagctgagcatggtggctcatgcctataaccccagcattttgggaggccgaggtgggtggatcgcctgagctcagaagtttgagaccagcctgggcaacatggtgaagcctcatatttgtattatctaccaaaaataccaaaaaaaatttagctggcgtggtggcacatgcctgtggtcctagctacatgggaggcagaggtgggaggattgcttgagcctgggaggtgggggttggagtgagccgagatcacaccatttgcactccagcctgggtgacagagtgagaccccatctcaaggaaaaaaaaaaaaaaaaagaacatatgccagaaaggaagtaatccaatgaagtcatgggaatttgaacataataagattctttgtgaaaaaaatggccccaccaaaagatgaaaaatatcaaaaagattagaactaagtgtgtttttgtaatactcaggaaaggagtaaaaaagaaaagtagartaattacagagaataaaagcagtactattctggtgatggcttgtattggctagggagagctaatggttagattttcatgaattatgtgagttagttttaaaatacagtcattattaaaaaataaactacgtatttgcaattgaatgaactatgttaaaattatactacaacagattttattgtttctttctaggaagatcagtgtactgtacactgaagcttgttaaataaaaaaaattcaatctgataaaaaagcaattcttggctgggcaccctgtaatcccagttgagatcgcgccactgcactccagcctgggcaacagagcgagaccctgtctcaaaaaaaaaaaaaaaaaaaaaagcaatgctgctatcacattattattattattatnnnnnnnnnnnnnnnnnnnnnnnnnnnnnnnnnnnnnnnnnnnnnnnnnnnnnnnnnnnnnnnnnnnnnnnnnnnnnnnnnnnnnnnnnnnnnnnnnnnnnnnnnnnnnnnnnnnnnnnnnnnnnnnnaatctcggctcactgcaagctctgccttctgggttcaccccattctcctgcttcagcctcccgagtagctgggactacaggcgcccgccactacgcctggctaatttttttgtatttttagtagagacagggtttcaccatgttagccaggatggtctcaatctcctgacctcgtgatccacccatctcggcctcccaaagtgctgggattacaggtgtgagccaccgcgcccggccatatcacattctgatgtatgtcctatgcaagaatatctgtggtatatacatagtagtagaattgctggaacatggggtatgccagtgtttagctttgtgagataatgccaaactgttttccagagtagtcatagctattttttctttcatcagcagtggaagagcattcctcattgccttgcatccttggcaatggttgatgttatcaaactttaaaagttttgccagtttagtggtgtgaaatgttatttcacaatgatttgaatgtacatttccttgattacaaatgaggttgaacatctttgtatgttaggggcttatgcttcttacttctgtgaaattcttactcacttctgtttcctttttttttttcttctttttttttcttttagagatgaggtctcactctgttgcccaagctggagtgcagtggtgcagtcatagctcactgtaaccccagactcctgggctcaggtgatcctcctgcctcagcctcctgagtagctaaaaaaatatattttttttggtagagacagggtctcactgtgtttccaggctggtctcaaactcctgagctgaagaaatcctcctgccttggcttcccaaagtgctgagattacaggcatgagccaccacacccagccttgtcttttcctttttgatctatgggaattctttacatattctagatgctaataatttgccaactaaatgtattgtgaagatcttcttagtaagtaattggatgtgggaggagaggaagaagtagtatagaattactcccaggtttctggtttgggaaactgattggatgatggtgcaattaaactaggacatagaatagaggaggagaaacagatctcagggagaggagaattagtttattttggagtttaaactaaagttcctatrggatattcaagtggacatgtcttagagaaatttggccatagggctggatgtggtggcttgcacctgtaatcccagcttctctggaggctgaggtcagaggattacttgagcccaggagttcgaggctgcagtgagctatgattgcaccactgcactccggcttgggtgacagaggaagaccctgtgtctaaaaaaataagagattaaaaaaaaaagaaatttggctatagggatttggagattaggccaagctctgttatgctacattagttctgtaggatcttatatgatgggcctttcaggagattacagttggaaggagagagagtggtaattctctaactcatttgtcttctgcccatgccaccttcttctccaggccatagatttctccaatctaagtttcttatgaaataaatatcccaaccaagtgacacacaaggcacttcatcttagttataattactttattaaccttttgrtctttcaacatttagatagtctttcttaatatttccaggagagtacctcatttttattttgaaaaccattcagcacatttatcttatgtaacatgcagagcatatatctatctgtatttttaaaattttcctgttactcattgatacatagtacttaattacatgttattccatgtacactgaaaacaatataggaaatatatacatctaagacttctactttgtacagtctttcattaaataagaatacttacacatacattttcagatatttctaccttcctgtatgtgtttggaattgtatgtaggtagccactgaaagaatttgggccccttgggaggatggcagtggaagtccatgaagtaaagagcattcyttaaaaagcagatttgattgcataccttttagttatttgagattctgagaattctgataaaccccaaagcagaaagattccttatacccttggaagatgggaaaggtgagggaaatatttgaagcagggtcagaacatccactaagaacatagcacctcagtagagcttacattatagtgccagggtagagttattactgaatagcttaggatgatgaacattaaccttcctacaggagtagtagcagctgatttggtgaccatsattggtcaccttttagtgtaactgcaaactaagaacaattatggcttgacatatactccatgtagggaagtgatgggagaggcagcctctgtgtggtccatccttggaagcactgcatcgattttgctcccctctggttttaaggagatcttttagacctgtaagaagagaaaggggatataaaagtgtgatastctgactctggcttcagattgggttgtgtttggaaagtaccgagttcatagaatagataactgagctttcctgctgctatgcattcrttatggattayaggggttgcttttttcaaccatgaaagacttggggaaaatgttgtcagttttgcttagatmgttatagctgtacttcaaggttgactggtaatcagggtaacttctgatacttatcacacaagatgktgcctcagcatttaaataaatggaggtaggggagggcgtggtggtaacatacttttaaaccagcgattgcacagcaaaccacaatgcaagtatttctgactcccaagattgccgtttcctaaagagcaattcttctgcaggcaacagcaaacctacctttccttgctaactgctttcagtaaattcttgatggccttcgattctggattcagacatctcttctcacccttctttttcattgtagcactgtagaaataaatagggatgaaaatatttaaaactgtgttgggtcaataaaacagatggcatacgcarttctgaagtcagacatttaagtttcactctgcatgtttttgtttgctgtacattagttttagaatcatcacaaaccctttactgatctttttttattatcattacatatttaatacagtatataattacaaccaggggaagtgataatcagatgggatttcactcacatgatctcaacacgtggacaaaattggcttgcaggaataatttcaagtttttctaaagaccttggattaacaggttgattactaatgctgatgcaggtacagcgtacagttctagagagaggtactcctgtaggaaaagaggaacagcagagaaggttagcacagtgttcattttaggcatttaatgtagactggtggtatttagcagaacctatatccccatatcagcaaatagtcacttaatctgaggaggaatggatcacatcataacacaactgtaaatgattaaagagttgattatctggaagaaaagaattgcagcttgttgattataaagtcaaacccttaagcacagttcatgtggttcattgagcttagttaggtaaggaagtatctgtatctcatctctgtccgcattccctcacattttctctctctatcctccctcttccccatctcttctgtcctccttccctttttccttctctttctcttattctatttgtttctctcacttcaattcatataagttttrtgatctgagggaatctctatttatttccctcttatttataagcatgcagtgaaacttttacaaatacattatttctgtatttttagaatttatacctattcctatttctcatyttacaaattaagtatcctttgatgttccttaccttgaatgccacttagagtcagaaagataaggcagcaaatcagaatsgcagtttgattcatggtgctgagactggaggttcctctgctgtaggctcagaatatgtctaagcaattgaggaatgtctcagaaaacgtggggctagtgtgccatatttatctgcaaagccattttccctccctaattctgattggataagggcattacagttgacttagcaaaacctgctggctgttcctggggaagtcccatgttgcagactcgaaggtattatttattgtagcctccaagttacggaatttccctctgctcctctttttttggtaatagtgaattaggtttcactttccaaaacatgaactgtttcttgaaaaaaagaacttcattgcatatagaaaaaaacaaaggttgcaatccattctaactataatgctttttctcaacacttaaacttttacagttactttcagaggttatttttcaaaatatccccagtaatagaaatttttcatcctttataggtaaacctaattttttggtaacagcaagttgtgcctgattattagaacagtgatttacctggacagtcctccttgatcaaatactataaagtaataggactggcctgctttgacagggtcaaagatctggaactggcaagttttaaataattcaataaatgctttgatcattcataacaccattagattaagtaaatagcctccaacataactattttgagggaaaacattgctcatttgggtatctgatttgtggtgtgttaaaacaagtttcacgtcttatagcagtccctgaatgaaaacatcataagatggtatctagaatggtgtgagaaaaggattcatagctatcctagggttattgtaaaaaacaaagggtgctttttgaggaaatgaatttaaaagcgggggggcacgcatagagacagaccttgggaaagtagcttgagacagaagggaaacaggttgatttacgatggggttcagctccaagacactgttaaatgcaaagaaaaagaaaaaaaaagtgttggccattgagctagtaacagtgataactgaaattggcacaattttaactggatgatgaatcgtggcaaaacttaatttcacagcattcaatagtacttgactgattattcrtagtagctagcagtagaaagcacatgatactcatataatggaacacatgttgaacctgagagtggaaatttagcagtatccatggatatagtggtccttggttgtgttctttgcaaatgattagtaacagggaatccaagatgaaatactgtttcaaaggcaggcaccaccctgcaatgagagatctgaggcaagtgatatttagaacctaggaaaatatatgggagttcttttcatagtcagctgggctgcaacaatgcagggattggtcagggaatggaaaagcttccatcctrggatcaggctactgtacyaggcagatactgtctcagaacctggtatcaggggccaagaataaagcctgtatctgcaaactgggtgcacataaaacttggatcctcaaatgtaggarctccatcattaaagcagagagtgagttgcttggggtaaatgsaatttgctagagagctgaatcccatgttaatctgttctaggaactggaatagagctaagctttcaagtgaataagtcagtggaattagctgtgggaaaccggaaaggcaaaagagagggaggtgaggtagagactgacagaacccaaaagactttcacctagcaaagaggcgttcgttctgatgagggaaagtcttatgagaaatagtgacatggagggatccttccatacctatttgtgcagaacaaacattttactgtgaatagaatgccaacaaatttcagagaaatgtctgacatcatgaatggaagaggcctagaaaagttcaacattaaacaatcaaaatgagagatggtgacagttttattttagttggtatctaagttgtcagctaaaatgtctctatatagaagacaatgtaaaaaggakatacttgataaatggactaaaaatctgttattagggataaaatatttgatttttactaaacattgtattacattaactgtgtgccaggcattgtttgaactgctttgtgactattgaccatattgactcattttattcttataataacwtctacctctgacccagccactcttctatttttttcaccatagattatttttgcctgttctagaacttcatataaatggaaccacttgagtatatactcttttgtgcaagacatcttttgctcagtataatgtttcttagattcatcgatgtagttgcatgaattagtaatttgtttctctttattgatgggtagtaatccattgcacaaacatatcagtttgtttcttgttgatggacaccttgactgtgttcagattttagttattatatataaagctgctacgaagatttttttataattttttttctgggcatatgctttcattttgtggggtacatatgtagcagtggaacatgatcacttactttttttatttaaaaaacgtaagtgatcacgtcactcttctgcttaagacctcaaacaacttccagttagaataaaatccaaatttctaattaagctgctttactaaatcctctatgatctggctgctacctatttgtccaacctcatatcattccttctcaaccactacaatccagtcagtggcccatacactggcarttttctccatctggtatgcytttcctcctgttcgtcacatagagagttccttctggacatttaaattttagctggcttgtaccttctcttgtcacacaatctgaagcagacatgactttaattctctacatggcatttcatactatctgatattcagttcattcattttttttaattagtgtaatgtctgtttctccatgctaaaatgtatgccccaggagaacagggaactaaaatgcatatgagaggcatttggtaaatattggatagaaggatggttgaatgaatctttacagactttaagtgacagcataccaggattgtatttcaagaagtatttccatttgttcatcagatttctgaatctggacatgagtattattgttttccttagctttaagaaccaagtttaatttaagaagactataatttccccagaagttagtttagatttaagtaggtaaaatcaatacagatattctcagctagctataggacagactcttcattccggaactctggtaaatatagagtggtacccctaaaagcttcttagttatttgctgttttttatctgtaattaagcattgaatgaatgaatgcaggaatgcaaatatcctcagtgcatatcatgtatatggccatggatggtgttagaagaaggaggagaagtaggcttgttctcattattttctgtgcactttgtgtagggaactaagctaatctcagggaatactagaagggttaagatccaatatttatccttgatgggtttacattctaattgggaagaccagaaactatgaaacaataaatatcaataagagaaactttatgggccgggcaaggtggctcatgcctgtaatcccagcactttgggaggcccaggcgggtggatcaccttaggtcaggagttctagaacagcctggccaacatcgtgaaaccctgtctctactaaaaatacaaaaaattggctgggcgtggtggtgggcgactgtaatcccagctacacrggaggctgaggcaggagaatcacttgaaccctggagacggaggttgcagtgagccgagatcacgccattgcactctagcctgggcaacragagcgaaactccgtttcaaaaaaaagaaaagaaaaaaagaaactttatgatcagtaccaaatgagtggtatagaaaataaataatgtggaggttcataggagactgtactcattaaggtcagaagttttcagaagatccttcagaaaaaaagacctcagatgagccataaagtgtgaatgttacttaaataagtggccaggagaggaaagcttgtgcaattacagataaatgtcatcaaaaaatggtaaagggggaagccaaccaaccagtcaggaagattggtagactcataggggtgataatgccgtgttaggattctataaaatctggtcctcagtttttccagtccagaaattctcattttttcctaatcatccagggtaagcatattcctcagagagttaactgtgctaaccaaatctaaaacagaccaagatgaaaattaaaagacagtgtatccatttacaatgagaaccttttcagtgactaggatgattggttttggtatccaagtcacccctttcccaagatcagattgcctaggaaattgaattagtatcagaacagtacctggtgagcagagtcaaacgaaggacccttctcttcttgttttaaatgagggttctgctcagggtagaaacctgacaaatgtgatcaacatggaaaatcatttagaaaaaaaaacttttagagacagtagcaagcccactattacttatttcacccaaagccaagactgcatgtgtcatttgaataaaaatctaaatgataactctttttatatatttctctcaatttttgcaacgtttatggtataatcacgttcctagaattcactgatctgagtataattttgaaagaaaatgaaagttaaggaagtatcccgctttagtttccgtttcagtcgctattgatttatctttaagcctgtgattatggcatcaggccaaaaaagacaacaatgaaaaaaggaacagtctgccctgacaaactaatgagcacagacgaaggcaaaaatgctttcccggaaactgttatgcttagaagaaattttctaaaaagtgagcaggaggacatcagtgatttctgtggactgggaatcccctcagctggtgcagaatatgccttggaaagtatgggagagcagggcaaagcttccccttcacagttttcactctgagctctcaaaagattccccgagctcacagtgtttggtaatactggttacatacttttcaattacccatgtgtctcatccttcatagccagcctaagcagagggcaaactgagtgctggcaaagtgggtggtagaccctaacaatcatcatggcattggagraggcagaggctcagaatagcttctgtttggatacattttaggctatgcagtgtttctgaactcgygcacttgagaggacttttacaaatatggcagatttcatcatttggaggaagagacaaaattggaggacattataataaagtaaatgtgtttgggggaagtatggtgcatttctttctccttcccataaataagatatttcaacaaaataaattagaattttgtgatactttgttccatttttaatcaaaatctttagaaaatgtctagttttaattttaattgattcatcattggttgtcttttcttttgagaagaggaatcttgagatatgatatagttcagtagtgcctgttattccatattttagattatcattcagttttcttcaacttcttattgacagtttgtctttgtgaacaatttgaagaagaatgctaagtcaggatttattatatagagtctataattcacgttagggcatttccaatttagtagcagtttattgagcagcactaaggaactatgaatacatctgtacttatggtgccaggatttttaggacgtattcttcttaggtacttaagtgaaactatggtttcagtgttatgtgataatctcagacttgctcaatttcattaccagtgtctggttaataaaatttgcagacaaggcaagaagaagcaactaaaattgcctcattcaccccttctccaaaaaaaaccctaacagttttttttgtgtgtgtactacttayaatccacagaatgtgctgacyatatcataaagatttataattgttggctatgaaaatcttttcagaaatagatacaaagaggtatattaattccatgtgggcatattaggtcctgtactcagtagccaaaaataattaagtataatctttccttttctaatagcattatccaaaactactccatttgtttgaaagctcttcttggctaattagaggaaacagtcctgaaattttaagtcactgtgagtgtttggcatcttaagttccatgtatttaaaatcgaatctgcagttttttctgctaaactacatcttcccctcatatccctatttctgttagtgacagaactattctttcagacctcagaagttcagccttttttccttgtctcttctctgctttaaattcagaytcaaatccttaacatgttctttgtttcttttttgcatcttcaactttctttttctgagatggagtctcgctctatgtagcccaggctggagcgcaatgacgcgatctcggctcactgcaacctccacctcccgggttcaagcgattctcctgcctcaatctcctgagtagctgggattacaggcatgcaccaccatgcccagctaattttttgtatctttggtagagacggggtttcaccrtgttggccaggctggtcttgaactgctgacctcrtgatccacccgcctcggcctcccaaagtgctgggattacaggcgtgagccaccgtgtctggcctcagcttcaactttcacatccaatctatcactgtcttgattmtttttgtacagtgtacttgtcattatatttctactcttaccaataccaccttagtgtagcccttcttctttttatgatagtaaaatacaaataacataaaatttaccattttaaccatttaaaagagtacaatwcagtggagttaagtactttcacagtgctgtgaagccatcaccataatttagttccagaacattttcatcacccagaaacyccatactcattaagtagttactcctcattaacacctcccccaaaccccagtcagctaatttgctttttgtttttatggttttgcctactstagatatttcctataaaatggaatcatacaatatgtggtcccttgtgtctggctttttttacttagcatattttcaaggttcatccatgttgtagcatgtatcagtacttcattcctttttatggccgaataatctattgtgtgtgtataccacattttatccmttcacttgttgatggatatttgggttgtttctgctttctggctgttgtgtataatgctgctatgaacatttgtgtaccagtttttgtttaaagagctgtttcagttcttttgggtatatacctaggaatggaattgctggattatatagtaatatataattactataattatgtttaacttattgcagagccagccccattacttttcacaccagtgtttcccaaagtgtgggacactaccatgtacattgataataacrtktagtatcrgtgaattattctcttcttaacttcaatccctctgattaattaaatcagggggaatattagtatttttkcattgtattttgttttatcattacattttatttccatggcatgtattaccgattttacatgtacagtagtgaaagtttacttttcatgtaaatgtacgtaaaataaagtggtatacagagtttctaaaaatataatgaagatcaaacagagaaatgttaaaaaaaaattgtaaagatgatatgagaatgccttgaagttttggaaatacagacctgagatattgcagctattgcagcaaatcccaactgattttcctcctccactctttcccactttcaatcaaccattcatgcaattcccagaatattttccaatgactttgatagggtcactctcttcttcacaaacatttattgaatccccattttgtacagagtaaaattcaaggttatttacagtttcatgtccttcatccttccaaccaaacgaatctaattatgattcctaaaaatcactttatacttcctactactgtacattcccttgtgtcattcctctgctgtaaattccttttcccttagyttatattgccattcaatagggtctgatatgcaccagaaactgtactgttggcctgggctacagcagctttcttttacacttatgagagagcagatattaggcacaggaataattcattaattacaattgcagtaagtagtatgatggaaaaatagagagtgttatggaaataaataaataggacacctaatctagttraagctgaagtggtggtttcaaaggcttcttggagaaaaagtcatttaagctgagacctaagcaattagtaggcattagcttagtgaagaaatgggcagagagaatagtatgtgcaaaggtaccaaggtggggaggatcttggctcaaatatgttaattattaatatttcatatatttattttgctatgaagaactttaggtgtatgttttcttctcartaataatgtactggcctataatatttaatatacttcttacaaataccaatttatcatgcagccttaactctgtgaattttttttttttttgaggcaggcttttgcccaggctggagtgcagtggtgtgatcacagctgactgcagcctcaacctcccagacccaagtgatccatccacctcagcttcccaagtagctgaggttacaggcatgtgccaccatacccagctaattttcmtattttttatagagatgaattttcgctatgttgcccaagctagtcttgaactcctgggcttaagccattcacctatgtyggtctcccaaagtgctcagattataggtgtgagccaccatgcccagctgactatgtgaatttttatttttaaagagacttaaaaaaaaaatcactgtaagtagtcaaagattagattcaagtcttttttttttttttttttttgaggtgsagtttcactcttgttgcccaagctggaatgcaatggcatgatctcagctcactgcaacctctgcctcccgggttcaagcgattctcctgcctcagcttcctgagtagctgggattacaggcacrtgccagcasmctcggctaattttttgcattttaagtagaaatggggtttcaccatgttagccatgctggtcttgaactcctgacctcaggtgatccgcccgcttcggcctcccaaagtgctgggattacagatgtgagccatcgcacccagccagattcaggtcttaaaactatccagggaatttatatggaagtcccatctctatatagatatttatatagatttatataacaatttattataaatctatattgtatctataacctatataataatgcaatayagatatatctgattataatcctataataaatatttttatttttcaaatgtatgggtgcctatatagagagtactgctatcagtcaaggcttttggttacatgcagagaaaccaactctggctatcttaaggagaaaaagaatttagttggaggttgaagaatccacaggacaatggagaataagtcttggaaaatggacaaagacctaagggaactaggtgataggaaggactagccrgagtcatgctacaggaacacacattgggaagacactactgtaagactttcattgtttctcctgctgctgccaggcttgaaataattttcttactaatagtatctttgtgatgccagctggagttcaaagtctagggtagaaacagcatggctgagtccttgttgtggctacaggagaggatctcctgtctttggcttctctcttttggcctcccaccaacactcacataagggattttctccaagtaagaagggggtttggactatcaagaccccccaaggccgacaaaagaaacaactgtctttcccacctacccattaaaatatatttctaaacagtttttcatgatgacggataggtgtatgtttctgaaatataaggcaaaattgttaaaggcatctcaaatgtcctggaaagtatatagatctttttttaaaaaagaaaggttgtggtagtttattagagaaaaaaatgactttgattctttaaactagtcttgagtatacctaaattttacagtatataggcatgaacaaagaaattgattagattatgtatttttctaagagacagaattacaaaaagtaaaagtgattgctaggtatacatttgcttatttttcaacatttttctttggtagacaaaaacattttgtatttcaaatgtgtccaagatattgctatcatttatacaaacggatcaaaacaaaaagtacagtaaacacacatatcctaattgcttcaaaacatctcaatgaataaaagttgaaaaacatcaaattaagaccggtgctgctaatttggttatgaaatatgtgcactgttgccagtatcccatagcatataatttttttcatagtacattttatgaattacatttaatgaattggttataaaacaaaccaaatgatgcataagaatgtttccctacatattgatgtgctacatgatatttggggaaagaaktgtgtatttgcatgaaaaaatgtttgaggaatgctttacgacacatagatgcttttgacttataagggcttgactccagtaataatgtcaatgtctccactgtaaccacagatagtaatatagcataaagatcaatacagacagataacttctagagacagaaatgttctcatagtcacaacagaatagttgtaagcatcaaatctagaaggttctctagcctagaaatgcatgaatgtataatacaacaagtaagaacgtgaaagcactttgtaaactccgatggtaaccagcctttcttaaggtagcttttcctagaaatccatttaattgytggactcctttgggcagtggaattctgattgtcattcattcaggaagactgtatttctgtttttggtcctttcacccacctttcatccttcacataactgtacaaaagttgaaagtcacaaaaccatagaaaagtctcagtttcctactgtagaattcttgtcatttcagtagtcacagttaaacttgttctaggtttttcagatgcycttttccaggacttcatatgttttgatatttttaaaaattctttctttcaactttctggaataagaaaacaagagttttatttacttgggctgttcttgtttcccccaggacatctaaaaacatgtagtaagaaggggaagctgttacaaccaaggaccccttaacagaatatttcacacaggatcatagcagaatctttctgtagttgtccacattattttctttttcaaaagatctgtcttggataaaacagattataacatrggagtaatytggtaacttactttgattataagccttgcttgcttcgatttgggatttaggcatcgttgtcctttattttctttcagggtaatactgttaaaagaacatacaaaagagtcttaaagtttagatgcaaatacataaacaaaaaagcctgcaccattgtyatcttcagcaagttcattacttacatcacttctattttgtcacagttgttacttgggtacattatggaggctttctcaatatctgccactttcactgcttttaccccagggcctatgcaaagacagcgtcctcttttgaacatggggaagcctagaatagatcatagcattagttagtaatgcrtctgattgcaacagatggctgtggtttatagctggtggtgaacgtgagcagaattttcattaagggtaaagatagtaatttgtcaaatagcacttaacacawctgttactgggaaaagttaagtaagatgttgattattttctcattaaattagtaagcaaatcgctaacaaatgggaagcatgaaggaagtttattggaggtgaagcttgttttgcccccttgattttatcctcaaatattttcccaggaagcttgttaacatgatcgctatataaaatcttcttaacagacatttaaaactgttgctaaaggcttttgccagatattctagccaaatcaaaaattccatgaagttcataatttctaktttcaataatcatctctagtatcttaaacatgtccaccatttctgtgctaaagctgtagtaacttctaatctgtgagattaaataaaactttatcatgtcttttaggataaaagtggaagaaaagacatttgaaacattagaaaargaacttataggttgagaaataaaaattactgcataccttgaacaactgtagcacacaatatcacagccaaggctatagccatgcccttcacactcatgtttgttttttgctgttgctgctggtgctgytgctgctacttcagctttgctgctcttcttggaaggagtagaaatgctgaacatgaaaggaaattgataatyggcatatatagagcattttatacaccagcaatccttttatggcacaggaatttccctctttgagtcatgcacctttcctgcttccaagagtttctgttttgttctcttctaaatgttactgtcccttcctatttgcagtagtgttgaaagtgataagaatgtgaaagcactgtgaaaacccagatggtaaccagccttcttaaggtagcttttcctagaaatccatttaattgtcggactactttgggcagcggaattctgattgtcattcattcaggaagactgtgtttctgtttttggtcctttcacccaccyttcatccttcacatatctatacaaaataatattctgaaaagcttttttttattatctcacttttgcttttcagtccaaactcttataatagataaggcctatattatttgacaccagatgacctttattcaatttcatatttttacctgtaaatgagtgcctaaagaagtttccctgtgtttctgtatttatgtccatattgttttgcattttcaacaatttttactttatatattttattttgttttgctttattttatttttaaawttaattttattactttattttatatttattttattctgcaaagctttcattataggcagatggcagggggctcagtccttcttggcagctgctttcctcatggcagccaggacgttgctcagctcctcctgccttctcttggcgcagatgtttgtccctacccttttcttgatgaatttgagggcctgtttgaccttggagaccttcagtaactccatgccacgccactcgttaggggtcaagccacacacctactgggatcatgtcccacacaaatttagtgagtttggtcaggcgcccacagtggctgtgcctgggcttgctcacattcttggtcaccttgtggcccttgttgaggcccacagctatagggtagtgcagtgtcatggctgctgccctccaatggtggccatggtggaaagctactttatatatattttagcactgttacttagtacatgaagttgtatgagttgtattagggatcataaaaaaaagtgatcgtctttgctcatgtgatagttttacctctgagattctactttgatgtaattcctatttttttgtctttatctttcctcttaagcttcttaaatctttgttttaagtgtgtcacttgtagatgtttaagaaaatcatatcaaaggagctttctaatgggtaagcttaataaaatatatttactgtataactggtaatctgtaatttttaaaatgcttccttgctgattctttatgttttctttgatttctttctaactttaaatatattttatttaactttttgaagccatttttgttttttttaatgagatgggtctcactctgtcaccattctggagtcgagtggcacaatcgtagctcactgcagccatgaactccaggcctcaagcaatcctcctgccttggtctcccaaagtgctaggattactgggatgagccacggtgcttggccttccttaagtaatttgaaaggagtacattgttttacattttgatattaattcttaaaattctttaaaaagatttttacctgaatttttctaattatttacatcaaccatcaatgatatttttttagctcctgtctttgtaacatgagaaaatcactgtaactttctttcaagaattttctcctatttcctagttttaccaataaaagttggtataatcggggaatttatagccagtttattacttttagattattattttatcttattcaacttcattttttgagaattatcatttgcattttatcttgaaattatatatttatttagatataatcctgcatttaaattctttaacaaccatgactagtctttaaaacctttgaaagtctttacagtagtcccccattaaatgagaaattctagaaataattcataagttttaagcacttttctgagtagcatgatgaaatctcacatcatcttgctccatcacttcatcccatcacatagacattttatcatttcacagcatcactagaagagtgagtatagtacaataagatatttgaagagagagagactacacagtcacttaasttttattacagaatattgttgtaattattctatatattaatgttgatgctcttactgtggctaatttataaatcaaacttttttataggtatatatgtacaggaaaaaatacaatatatacagggctcagtactatctgcagtttcaggcactcattgggggtcttggaacatatcccccaaggataaggtgagggggctactgtattttaattaatttccaagtagctggaataktctttccttcttttccattaattcatttaacatatgtaaagaaagactaattttccctcaggaatatgggtaaagtaaaaggaatgtgttcttggagctcataaatccttatctgttattattttttaatgttgcttttcattttctcagcattagaaacacagtagagcatagttgttaatagggaaggctctagagtcagcctgtgttcaaatccacccttgattatttatttatttatttatttatttatttatttatttatctttgagatggattcttgctctgtagcccaggctggagtgcagtggtgtgatctcgactcaccacagcctctgcctcgtggattcaagtgattcgcctgcctcagcctcccaagtagctgggattacaggtgcgtgcctccatgcctggctaatttttatagttttagtagagatggtgtttagccatgttggccaagctggtcttgaactcctaacctcaggtgatcctgccgccttggcctcccaaagtgctgggattacaggcgtgagccactgtgcccagcccacattcagttatttatgaacaagttacckcaactttttgaggctattttctcatctatagactggggataataatagtactttttttttttttttgagatggagtctctctgtgccacccaggctggagtgcagtggcatgatctcggcttactgcaacctccgcctcctgggttcaagcgattttcttgcctcagcctcccaagtagctgggattacaggcatgtgttaccacgcccagccaatttttgtatttttagtagagatggggtttcaccatgttggccaggctggtctcagacccctttttcatagggctgttataaactaggtattaaaagaggtaatgcatattaatcatttagaaaaatatgtagcactcaaaatgtattaactgctattattattatcagtgtcctttcctgaattggcataccacatctagcttgttttcagctgtttttcagcattaacacaaacacaaccacttaataaaagatgagttgacattgttatagcatataaaaatattttaaattataataaccatgaatataaaaatagcatactaatcataaaaatcacttacagaaagtgcatgaatgcaatagcatagttcaaataatatagacaaacaatagtgaatatttctgcttactagctaaagtgttgtcatatagctttggtgtaagacaatttcttaaatagggattcttaatttttttaaaaagaccctggaaattattaaacatatttttacattatactattttaaatagaaaatagacataattcaaatttacataaaacaagactaaactcttccttttgccttcatgtgtgaattactacttagctgtgtagaaaaactgtggatcacaattttctccttcagtactctgctgggagtcttggaatgtatcccccaaggataacaaggggactactgtattttattttctattgttttattttcttccttactgcaaaggtaatatctgatattttaaaaaaacattagagctgggcatggtggctcatgcctgtaatcccagcagtttgggagaccgaggcaggyggatcacttgaggtcaggagttcgagaccagcctggccaacatggtgaaactctgtctctactaaaaatacaaaaatcagctgggtatggtggcgcatgcctgtaattccagctacttgcaaggttgaggcaggagaatcgcttgaacccagaaggcggaagttgcagcgagccaagatcgcgtcactgcactccagcctgggtgacccagagagactccgtctcaaaaaaacaaaaaaccaaacattagaaaatgtgtaataagaagaaccttaccaccagagatgaccactgctttagttttcttccctctggatggatacgcacatacactggatacacacacacacacacacacacacacacacacacacacacacatttcgcctaacaagttctatatcagactatatcaggttctcccccccgcccccyccmtgtgtcagggactatatagatacttcagaaggagacagaggagaagacagggagaaaaaaaaattcttccttttcctctgtgaggaagactactgcataatcttcctcacgraggctgctgcttgtgtatgaccctagaggagggggctatccctcccccatgtagacacatctttgtctgcttttcctcagagctaaatcacagtttgaaaactgagggaggtttatttagttcttcacttcttcaggtgatagatccaaaattatgcagagtaaggagagggattggttttgtgctgtaacsttttcacttcatctccttgaaccacaaaataagcctaattaggctttagcaggtgctaatrtggatactctctccttctataacactctctccctctttactgctcttcctcccagtgttcctgccttagagtgtcctggaaagcactacccttttctatagtagttcatttattcatttactcattcattcagcaaatgtttattttagatgtctgtcacatgtctgkcactcttttgggtattagagatagaacagtgaacaaaactcaccaagtcctttccgtgtgttccaaatttcaaactttctgccttattgtagaagttagtctgcctgatttctgctggctttgtagatgtgtggggtcagacgtgtcttcaggattgtgacttgttctggctctatactctctgacatcacatgaggaagattaccttctttcacagcatcccctcatctggtgagcctgagagatccctattttttatatttgtataatwtggtttttctagcatgaaaatgcactttcctctcctcttttgaatcctttccttcgtttaagtcttgatgtcttcatgaagcctttttcattatatcgtggtatcttcttgwcctttatactttgtagaacttactktcttttctaacyttatccagtagaaatacagtgcaaggcatggacataattttaaatattccaatagccacatttagaaagtaaaaagaaacagatgaaattaatttaaatatattttctttaattaagcatgaaaatatatthtttcaatgtgtaatcaatgtggatataaaaatgttaaatgaaatattttaccttttattactaagtcttcaaattgaactagctacatttcaaatgcttgataataacatgtgtttagtggctaccatattggacagtgaaggtctagttattcatttggcatgtattatatactgactccatacttattttaaactaaagctgaggttggagaggcagakagataactgtcaaactcctgtaaatttccctagttgttttcttctttctctaagtcattatatctcattgctctttttctttgattaaatgcaaaaaagatcagatacattctctgtgttcttagcagtgttggccttttttattgtttccagaattggactactttattttattttcccaggttcacccacttaaataagttttgcttttaatttaaagacataggagcatcccaggaaatgatggaatctagtttccataagtaawcaccttttcagcttaaaaaatctgtaatctgtgcttcatctgaaattttattaatgctgctaagttagccaattaatgtagaatttwaaaatgtttccaagttaaaagagattaatgtaagctatttaaaaataatttccaactcaccattcaccaggtctctgaataatatattgcctgacaaaagaaaaaaggtagtatcaaggatattttattcagttaagttagtgaaaagtgggttagaaatgaaaactaatgtttccatttattataaataagtatgacttaaaagaatcctgttttgagtgttagaagacagatgactcactcctagggaagaggttgccaggcatgtaatagacacctgaaataatatagatagactgaacagattaatgtagaatcctaaactcttaaaagtgtgtccagaattggtgggttcttggtctcgctgacttcaagaatgaagccacggaccctcgcggtgagtgttacagctcttaaggtggcgcgtctggagtttgttccttctgatgttcggatgtgttcggagtttgttccttctggtgggttcgtggtctcgctggctcaggagtgaagctgcagactttcgcggtgagtgttacagctcataaaagcagtgtggacccaaagagtgagcagcagcaagatttattgcaaagagtgaaagaacaaagcttccacagtgtggaaggggacctgagcrggttgccactgctggctcgggcagcctgcttttattctcttatctggccccacccacgtcctgctgattggtagagccgagtggtctgttttgacagggcgtgaytggtgcgtttacaatccctgagctagacacaaaggttctccacatccccaccagattagctagatacagagtgtcgacacagaggttctccrgggccccaccagaatagctagatacagagtgtcgattggtgcattcacaaaccctgagctagacacagggtgctgactggtgtatttacaaaccttgagctagatacagagggcygattggtgtatttacaatccctgagctagacataaaggttctccacgtccccaccagactcaggagcccagctggcttcacgcagtggatcccgcaccagggctgcaggtggagctgcctgccagtcccggtgcygtgtgcccacactcctcagcccttgggtggtyratgggactgggcaccgtggagcagggggtggcactcgtcagggaggctcgggccacacaggagcccatggagggggtgggaggctcaggcatggcgggctgcaggtcccgagccctgccctgtaggaaggcagctaaggcccgatgagaaatcgagtgcagtgccagcccactgggggacccagtacaccctccgcagctgctggcctgggtgctaagcccctcattgcccggggccggcagggctggccagctgttccgagtgcggggcccaccaagcccacgcccacccagaactccagctggccggcaagcgccgtgcgcagccctggttcccactggcgcctgtccctccacacctccctgcaagctgagggagctggctccggccttggccagcccagaaagggkctcccacagtgtagcagtgggctgaagggctcctcaggtgccgccaaagtgggagcccaggcagaggaggtgccragagcaagcgagggctgtgaggactgccagcacactgtcacctctcaatcccccctctaaacaggacaccccaactgctgttgggaatttggccgatgaccactctagctacttcctgctggataggggtgaagaaggggccctgcagttgtagtgtccttcagaggggaactctctaggccaggggaagtgccagtgggtcggtccaggggtccttggtagaagttgttagttgaactcatttggggttccatttgtaagaccatctgtagcttgatggcctcgattctagaggaaacaaatttgacaggaaggttaaaaatacagggcccaaaagcgagtwacagcaagatggctgccatgggacctagaaaggggagaagccatgttgcccaactccagagattggtataagaatttgaaaggcgttgtctgatttcagaagccttttcctgtaaacgccgggcggcatctcatactatccccgactggttagtgtgaaaacmacattcttcccctaagaaggtgcagagtcctcctttctcagcagtgaggaggtctaggccttggcgtttttggagagtcactgctgccaaagagtctatttgggattgtaaagtaagaatagatttygttatttcttgcaaactgtctgagaggcagatatgggttgaagatccacataagtagaatatgccttggctaggaagacagaaatttaccctggcttttaaaggaaaagggtacactgttttttctttactacttccatctctytctttctctcttcracttctttgtctcttcctctctttttaactctctctttgactttctgtgtctgtccytctttctgactccttttstttgtctctgtttctgacaccctctttaacgttctgtctctctgtctcttcctctccctgtctctttctctgactttctctttctctctttccttcttgctggtctttccctacctctgccagccgcttatgctgctgttctcccctctccttcccattttgatggccttggtagtgtaagactcccacctctttgggttcctgcaccatgtgcaataactccataacttccctgtggcatccagcgggggttcccagaggttaggaactcccattctttccatattgcagcatgggcatgtaggattagataagcatacttgttatctgtatacacatttattctttttccctttcccagttctaaggctcgggtaagtgccactagttctgctaactgggcactggtccctgggggaagaggcttgctttcaagtgtggttacatcactatggcgtaacctgcccttcgtatcccattctycacaaatgaacttccrtcggtatataggttaaggtcaggattagttaaggggacttctaagagatcatctcgggcggcataagtctggactataatttgttggcagtcatgctcaattggttccccatcctctgggagaaaagtggcagggttgagggccacgcacgtgcatattttaagcaccagtccctcaaggagtagtgcctggcatctaagaggcggttgtctgatagccataaacttcctttggcacctagtatgccatttacatcatgagtagtccagacagtgagatcctttccttgtattattytgatagcctctgacgctaagacrgccgctgctgcaactacccttaaacagtgaggccagcctttkgctactacatcaatttccttacttaggtatgccactggttgtgggggttgtcccacgagtctaaggactccaagagctatcttggctctctctgtgatgtataaagagaagttctgtcctgtgggaaggcttaaagctggagcttgtactagagcctgctttaagcttttgaaggctgtttctgcctctggttccctttcaactagatgagtatttgccctctgggtttccttgattagagtatagaggggcctggctatcttgctgtatctggagatccatagtcagcaaaagccagtaattccaaggaatccccgcaactgttttaatgtcttagggtgaggataagccagtataggctgtattcattccttgctgagggccctggtccctttggctaagattaggcttagatatttaacctgctgtaggcaaagctgggccttcgacctagacaccttgtacccttgattagccagaaagttcaagagatccagagtagcctgctggcacgaggcttccaaactggtagccaaaagtaaatcatccacatattgaaggaccagagtgcctggacttgagaagtggcctatagatcytgggccagtgcctgaccaaacagatgagggctatccctaaacccttggggcaagaccatctgtgtaagttgggacgtgtggtctgtgggatcctcaaaagcaaagagaaactgggagtcagagtgcaggggaataaagaagaaggcatccttgaggtccagaaccgtgaaccattctgcttcccctggtatttgagagagcagggtataggggttgggtacaactggatatagaggaattactgcctcattaatgagtctaagatcttgcactagtctccactgactgtttggtttttgtactcctagaactggggtgttgcagggactgctgcatttcctcactaagccttgagcttttaaatgtttaacaatattctataatcctttatgagcttcaggccttaagggatattgcctttgatacggaaaagtggtgggatcttttaacctgatttggactgggcaggcattttttgcccttccaaattgtccttccaatgcccagacttcagggttgattccctcctcaagtaggggacagcaaatgggtaactttttccccatattcatgtagataatagctccagccttggctaatatatccctccttaataagggtgtgggactttcaggaataacaaaaaaggcatgtgaaaagattaaagtctctcaattacaactgaggatgtgggagaaatacctggttataggctgtcccaggattcctcgggtggtaacggaccttgaggacagtcatccaggacaggagattaaccctgagaaggccgcgccagtgtccaggaggaaggcaatttcctggccctcaatagttaaacatacccggggctcagtgagggtgatgacatgagctggcacttgccccgggcaccctcagtcctgttgtcgcatcatctggttgggggcttctgacccagggaaccttcatcctctggggcagtgcaccttccagtgattgcctcagcatagtggacatggacgagggggcagcttgtttctcattggacaatcttttttaaagtgtcctagtaaaccacactgataacaagccctaccaggtgattggcctgctccattttctgtcctctctgaaccaccaaggcttgtttgtctgagggccatgactaaggctgtggcctttctctgatcttgcttttccttttgggcctgttcctcttggtccctattataggacaccgaggttgccaggtttaataatgcctcttgattttgttcagggcccagggcttgcttttggagctttctcctgatatctgcggctgattgggtaataaacttacccccgagtgattcaggtgacwggggagtatattttcttaaggcctctcatagccgctcggggaaggcagaaggattttcttcctttccctgagttatggcrgatatcattgaataattcatgggcttttttctaattctccttagtccttctagaacacaggtcaacagatgtttacgactccagtccccatgatctragtcaaggtcccagtggggatccatactggggatggcttgctgactggtagggaatttgtccctttcttcagctgtcattcyatcatttacttgactaagataccgggtatctccaaactctcgggctgcagctaaagccacattcttttcattaaaggccagggtttgatctaacagtggcatgacatctctccaagcgaggtcaaaggtttgccctagaccctgtaggacatctatgtaggtacatctgtgtacctmtcaggatcatctgaaaacttccccaggtctgccttgatctgttttaaatcagagagggagaaggggacaggtacccgggttgggccaaattcccctccccctacagcttgaaggggacataacctatagcccrggggtttttatggtcgtttggagatttctttgcttatttccttctgggcaggggagattagaggaggattatcactaataggaaggggagctatagggaggctaggatatggggataagctgagaggtcctcctgtaggatgtaaattgtaagctttgcatagttgtgtattctccctcaatgaaaagaaagcttggacataaggtatttcactccatttcccttccytcttacagaaaagatcaagctgcaggatagtattataatttgtacttccctcaggtggccatttttccccatcagagagmgaatattggggccaagccatagtgtagaaaaaaatgagccayctctttttcagggttagtgggtcaaattggtcccaatggcttaggatgcatttcaagggtgagcctgttgatgcatgagtgtttcccatctgaaagrcaaaaccaccygtggttttggtttattttgtttctccccctgcccaagaacccacaacggtccctggaccctgctgattggaatagttgcgctcaccgatgcagcagcagaaacaacccctgcccaagaacccgcaacagtctctggaccctgctgatcagaatagttgtgctcactgacrcagcagcggaaacactagttttcctcccagaccacatggaggactgaggaaggtcggatttagtggtccttaccaatgcattctcgaaaacctgcacccttgcctgtcttcctagaccacaaggaggaccgaccacraaaaatcggatttagtggcccttactgatgcattctcaaaaacctgttagagtcctaagcattctcctgttagtaytgggactttacccctgtcctataaagatsttatgccccaaaaatgaagtggagggccataccctgagggagggaagggatcttcagggttggaagagtgacacctttttcctcacttatatgaataggaaggatacaayttctgaggctccccatatcctagcttcaggaatagcttttgttaggcctgttagtctcaggagggatcctaaaattccaggtagtccccactatgacggggctttgggcaaaaatcatgtctttctgattggtgagcctgggtgcctaaagaaggtaacagagtcctggagtttatactataaatcattcttataggagaaactagaaaagcaccagggacaggtagcaatttttagaagtgggtctaacctcagagaagacaggygagaggaagtttgtctggcaggcattaggacccaggcrgcaagggtcaggatagataggatagatgggtgagtcttkcttgggcgacatgcttttgagagtgccgctcatggccgcagggtcagccaacatgttgtcgggaccttggagctgcatggctttcctctctgtcgaccctcggctcagcccagaagtacaggaaaagcggaagctggttctaggcaaaccaacggtcccaactccaaagagtcaggggttgttagagagccctttcccagacagcctgacacccatgtctttagtccggcagcctcactagtctcttttaactggccgacaggtgcccggtatttagcccccgaaattttaaggaaaaataggacagaatagcaagcgaaaggggtctgatggtactcactgcttggcgataggcgattgtctcaccgctcggcgataggcgatggtcttaccgctcggcgataggcgaaagtcccttcgtggttgccaagatgtgtccggaattggtgggttcttggtctcgctgacttcaagaatgaagccgcggaccctcacggtgagtgttacagctcttaaggtggcgcgtctggagtttgttccttctgatgtttggatgtgttcggagtttgttccttctggtgggttcgtggtctcactggctcaggagtgaagctgcagaccttagcggtgagtgttacagctcttaaggcggcgcgtctggagttgttcgttcctcccggtgggcttatggtctcactggctcaggagtgaagctgcagactttygcggtgagtgttacagctcataaaagcagtgtggacccaaagagtgagcagcagcaagatttattgcaaagagtgaaagaacaaagcttccacagtgtggaaggggacctgagcgggttgccactgctggctcgggcagcctgcttttattytcttatctggccccacccacgtcctgctaattggtagagctgagtggtctrttttgacagggcgctgatwggtgggtttacaatccctgagctagacacaaaggttctccacatccccaccagattagctagatacagagtgtcgacacaaaggttctccagggccccaccagaatagctagatacggagtgtcaattggtgcattcacaaaccctgagctagacacagggtgctgattggtgtatttacaaaccttgagctagatacagagggccgattggtgtatttacaatccctgagctagacataaaagttctccatgtccccaccagactcaagagcccagctggcttcacgcagtggatcccgcaccagggctgcaggtggagctgcctgccagtcccggtgctgtgtgcccgcactcctcagcccttgggtggtygatgggactgggcgccatggagcagggggtggcacttgtcgcggaggctcgggccacacaggagcccatggagkgggtgggaggctcaggcatggcgggctgcaggtcctgagccctgccccgcaggaaggcagctaaggcccaatgagaaatggagcgcagtgccagtgggctggcactgctgggggacccagtacaccctccgcagctgctagcccgggtgctaagcccctcattgcctggggccggcagggccggcgggctgctccgagtggggggcccgccaagcccacgcccacccggaactccagctggcctgcaaacccacgcgcagccctggttcccgctgacgcctgtccctccacacctccctgcaagctgagggagccggctcyggccttggccagcccagaaaggggctcccacagtgcagcagtgggctgaagggctcctcaagtgccgccaaagtgggagcccaggcagaggaggtgccgagagcaagcgagggctgtgaggactgccagcacactgtcacctctcaaaagtacagtagtatagtacctgatgctcttttttagagggatttaggcatgccaatgactttagggagctgctggtggatttttttttaaagagctcttagtagaatactactgtgagtttcttataatattattaaaatactcgtcccagaaatgagacagattctgcaggctatattcaaggtagccattaggcactgggtaaggctctatttttttcatcaaaacttggagtaaattgtataaataacattaaaatcattaagacgttgaggaataatgcatgttttaatgccattgaaaagagttccaaagtgatgatgaattttttgtttgtttgttttagacctgctctatcgcccaggctggagtgcaatggcgtgatctcggctgaccgcagtatctgcctcccgggcacaaaccatcttcccacctcagcctcctgagtagctgggactatgggcacacacgtccacagccagctaatgtttttgtatttttggtagagttggggtttcgccatgttgcccaggctggtctcgaattcctgtgcccaagtggtcttcccacctcaacctcccaaagtgctgggattactggcataagccactgtacctggctgacaatgaattttaaataaggatgtttctgagtttatgttgtatctctctctctctcttttttttttttttttttttttgagacagagtttcgctcttgctgcccaggctggagtggagtgcaatggcgcaatctcagctcactgcaacctccgcccctgagttcaagcctttctccagcctcagcctgccgagtagcctggattacggtcgcctgccaccatgcccagctaattttttttgtatttttattagagacggggtttcgccatgctcacgcctgtaatcccagcactttgggaggctgaggtgggcagatcacctgaagtcaggattttgagacctgcctggtcaatatgctttatctctttctgggactttgacataagaagagatttccaaaggttgtattctgctaatgtagtctggtatttgagaatgagatatatcaatgctcacattttataaggatgacttcatccttgatatgtgctaccccaaacattgcagtcgcaagtgcatgcacaaaataagggccagttttcagtgactgccctatcaccctacggaccttctcatgcttgagagagccactggtagccatctacctttcctttccttgtcagtataaatttgggggatacaaatataattttgttacatggatatattgcatagtggtgaaattagggcttttagtgtatccatcaccagaataatgtacatggtacccattaagtagtttctcatcatccacygcccccaacccttccaagtctccactgtctatcattccatactctatgtctatgtgtacacattatttagctcccacttgtaagtgagaacatgcgtgtacccaatttcttttttcyttcttttttttttttttaagacagagtctygctctgtcayccaggctggagtgcacgggcacgatctcggcttgctgcaacccctgcctcccagattcaagcaaacagattcaagcaattctcgtgcctcagcctcccaagttgctaggattacaggcctgtgccaccgcaccaggctaatttttgtatttttagtagagacggggtttcaccatgttggcaaggcygktctcaaactcctggtcttaagccatccacctgcctcagcctcccaaaatgctgggattataagcatgagcccctgcacccagctggtgtgtaccaaatttctgactttaaaggaagggcagttatttgttccctgaaagttgagcacaaaaagaagaaataagctttagtttccagtgattaaggatttgaaaaatagttactggtagttcaatttactttgttttttaactatgcctgttcatgctgatcacrtacaggttatctctatcttgtyactggaattggattgtttctcattggcttaattaartttattgcacaggaagagtcttcctggaacatttaagctatacctgatttattaactacagctctctcattttcttataaattaattaagagtttgatctaccattcctcttctgaaaagaaaacagtgtttctctacctttttggtagaagagttactaaaaaaaaaacyagctattatttgtctcttttttcaacctggcaaagcacagtatataaatattgtttgttttatctataaccaaatttaattgccttggaatattactttttgccaagtctactgccaagttaattttattagggtataattaacagtygtcaaagaaaagctacttaatttatttccacaggaattcagaagaaaaaaagaatatgggtttaaaaccaattactttcctttaaaattgtaggtaaaattcaaagtcgcatatgttaaaatttagaacacagaagtagaaatgatcaagttctgccagctcattgaatagactaaccctcttttccatgtcctctgtacctctgtcagaatgtttgctgtcatttgtatgtatgtgagccaggaacagtgggttgtacaaaacaacttcagcatcaccataaacttcagagaaatcatgtttctcacaacaaagcagctctgtgcatggcctttagttggctgcctggaaaatgactgcactcgacaactgccaggtcaatgtaaacgttcatgttaatttttcaagttgggaaacaacatgcctattgttaggggatagaaacgtgagagattaagcaatgagcaactttacaagcaactaactgaaggaagcttgattcagtaagaagggagaaatagtagcttcacttaccattattagtttattgcttctgctactcagagaagctggaggagaggagaaaatagatctggtcgatattatttcagggctagttggaaagagaataaatgcacaaaggagcttgcttggagagatgacccctgcatgtgaatgttagaagagctatgtctgcaaggtatgaagcttcattggatttatttgtatttttaaaaaatagaatatagtaaaatgaccatttataaggagtatttcaggacacatcatttgccagtttgaactaagtgttattaaacttaatgttttaaatagatatagttgagagtgcgaatataaaaaaaaataggacaggaaagatgttttttgttctagctattttatttcttatataatcttgatacttaaattactttcttttggattcaaaacaaaaataatacttttaaaatatttaggctgggcttagttgctcatgcctgcaatcccaacactttgggaagctgaaacaggaggatcacttgagcttggaagtttgagaccagcctaagcaacatagtgagaccccatctctactaaaaatttgaaaaattagctggttgtgctggtgtgcacctgtaatcccacctatttgggaggctgaggctggaggatcacttgagcccaggagatcaaggctgcaatgagctatgatcatccactgcactccaggctaggctacagagtgaaaccctgtctcaaaataaataaataaatatttaggctatgttttctaaaattttatacattgtgctgaatgctattttcctcgtaatgaaaagccaataaaacatttctgtcaattttcttgttttctttctttttttagagacagtcttgttatgttgctcaggctggactcaaactcctggcctcaggcaagtctcctgctttggcctcccaaaatgctgagattacaggcgtgagccacaatgcctggcctcttgtcatttttctaaggctttcctaacatcctggtttcacctttgaatctacaacctagcttactttctgtgtttcttacttccctgttcttactttcagtatgagcagtaaaaggtgtagtcagagaaatgtggctcactcttcagctctgagtgtctrcctctcaccttgtatttgtgcagttggtggctgggtatgtggtggtaactggatgagtgatggagtccagaataattgccatcatttgtttaatgtctcccatgtggcacgtaatgtacatagtgtctcactagtcctcacaataattctgtaagaaggggcactgtaaaaaggacattagtggcaatttagagaagaagaaagtgggcctttwagagtttatataactcccccaaatcacttaacacatttagttaagaagcrgggtcagrggacagcagcaatgaaaaacacaagaattcctttctgagatgaaacgggagtgaaaggcatctcaaaggtctgacaatgtaattcccagacccaagcctccctggaaaatagaaaatgcaaaagaagattagagcagaagactaaatgtggaacaatttgggataaataaaatctgagggtcctggtgagaaagcaattaagaaagctagagaaggtgtctagagcccatttaatttacatttcattgaataacaggagaatgattatgtgagacttgttaaaacttgcattttgttggtaaagtttatcctctacttccccattgtgatttgtagcagtaacccttagaaaatttcagaacagccaatgtttattccagggactgggtaaaaagagagaagcctgtgttcttttctgcatttagctgtgatgaacagaatctctgatctgaggcagtaactgatgtcagtgcaataggtagccagcaggtcaactcctgtccctaaggatttataccagatgaaggtcttgtgaccttccagaggaaacagaaaggacagagaaggaggcaacgaaactactttaagacttcggtgacagtgctgctccctcagtgccatccctctaccccactacctttctccttctttagcttttgttctaaattatttctcagagtcccagtaaccctaggtgttatctctctgctcattctaggtccctttccttccagaacccttgaagtttgagtttacatttttggaaggatgccagggattagcccagttagtagatcaagcttctaagggttaaactagtggagggagactttttacctctacctgtggggtcttcccaaaatctgatgaatatgcagagcccgaaactgagtctggaaagccagagaggactttgaacatattctaaaactaaggactctaaaaataggtcttaaaagccaggaatcaagggttaggggaagagaaaaagagttgcaggtttagagtaagggggcagcgggcctggaaattgccaagaaccagcattatagtttaatagcaccagagtaatgggaggatgggttgggggtggacagtgtgtgtggagagaccaggaaaggcgcaaagttcctgttgcccatcaggctgaggaggagaaagaaatgtattcctgacatctcacgttgagatttagaatacctttctccctaggaaaaaaaatacgtactagattagatttctaggctagcctgctaaaatagtttcctcataatgaacttgaaatacagattctaagtatcgtgagaaaaatcttggtagaaaacagtgggttatcaaatgaacttttgaattaggttccactaataagaggggaatcacctgtaaattagaattaaagaagagttagccatactttagtagtttatcatggcttacacatattcattaagattatttactgttaattctttaaaaagtttaaaaaatagtgacacttttgaagagtattgattagttattttatcaaatatccttcagtttgtcttatctgatattttctcataattggaatgaggttttgtatttttggcatgaaaactacaaaattatgttttcttttcagtatgttgtatcagggttcataatattgatatgtgttattattagtgatgtttaccttgattattttattatatttgccatctactaggaaataccttacaggttggaggagacttaagagaaataactaaatgcaatgtgggttctgacaggaacctaggaaaaggatattagtggcaaaattggtgaaattaaaagaaggtgtgaagtttagttaacaatattccaatgttccaattggttccaagtaccaacgctcatttcctgttctagataattgtactatggtcataaaagatgttaatattaggggaagaggagtgaaggaaataaaggtactctctgtactatcttctgtaaatctaatattaactcaaaataaaaagttaaaaaataatgctatcctacacttatatagtgcttcctatttgccacatgtactctgcatctattaactctggctcttttcaacaaccctgtgaggggaactgctattatcactatttgacatatgaggagacctagatacagagaggtaagaagcatgtccagtgtcacatggctgtgaattggtcacatagctagaaagtggctgagttgggatttgaactgaggcactttggatccagaaatcaattacagcatactggctttcaatgtgctatatatgcgcatagtttaaaaagattcagttatactcttctgtgaagcaatctctgttacaagttttttggcttttcttttaatccttcaaagaataatttactttcgaacattgataggaaagcaactcaytttggtttttatttgtaatattcagagctgtgctatgaccatgttttagtctctcttcagaatcttctgatggcatgctaacaattgtagatggcaactgtgttggaaactaggggatcccatctgagttggtcaaagtctgtgagtaaagtgctaattgctcatgattactatgttatgattaagtacaatatgattaagtagactcaaacttcattcagaatttaaccaaattctgcagttkytctcatgagtactttggttagtatgaatgcctttttcattttactattggaattacattttcttaactcaaaaactgtcagctattgtaacaatgactttgtttgtagtctttaaaattgaagaaagagtacaacatgaattactatacattagacctttgacagtctgaatgaattgcttgagtttggtctgattagtgtacctaatgtagagactgagcttccttaaattgccagaggtgtaaagtttcacaaggtactggttgctgtaaaggaagaatgactttgagttaaatagagagttgattaaatgcatatattgacagttactgactcagtaagcttcataattctaggaatcaatcactgctgattcatatgtttagatatattcatttctgtctttctgtttcttaggccaaaaagaaaaaagaaaaccaatatttaagaggtgagaaaagtaacaggaatttcctatctatttatacacatacacacaaacacaacaaacctgtagtctttgctgcagaagcagcttgtttttcattccatagggtatttttttttctgtgcattgaattaaaatttgtaaacagcaggaattgtggcttgttaaaagaaaaaccttagacaaattaaatttagcagagcttaattgagcaaagaatgatttgtgaattgggtagcccctcaaccagaatagagaggttccagagctctgtgtggtgaaagaagattatggatagaaaaaggaaagtgacgtagagaaaatggaagtgaggtacggaaacagctggattgattacagcttgaagtttgccttatctgagcatagkttgaacagctggctgcccttgattggctgaaacttggtgattggcacaagagtagattacagtctgtttacacatccagttaggttacagttcactgtgtatggagaaacctttaggttatagttcacaatgtatggagaaacctttagactgaacttaaaatatgtaaagagacagctttaggctaaacttaatttaacagactttttggttgcctttggattggtggggcaggggaagaatctaatagcagatatttgctttgcaaggtccaaagatcaattttgttttcttgctgtcttytcgttattttctcttgttttttttttttcttttttttttcctragctttatttgcatctccagtccttttctctatccttactttttaattgactataatatggaattgaattttttaaaaaatctgttaaatttatttttaaaagtttatttcttggtcttgcatttaaaaggctgtgaattgaacctttcttytctttaactaaaaaaaactgtaattaagtggcttttttcttaaatatgttctcaactaattttcctccttgtaggtagcttaaaggaaaaagaaatgtcctttcagtactctcattacatattcaggcaatcccaatttgtatggacaactaaattaaagtaacaagtgactctgacaatttagagaaatgaattagtaaagtttagtagcattaagcacaggaggatttacttaagagaaaaagcaggcaaactttataaacacaagttggagaactatcaagtttgtacatgtctcacagagatgaagaatacagaataaaccactggccaaatataagttagatatgtaacactaacacatagaattagcaaagaggatgttgtgggtttatatggaagaaatctgtttgtgagtcactggttaggaaatcagaacctactttcctatagatgtcaaatggtaagggtgattgttcagtctgagaggtccctccagggcaaggaaccttgtctratttatcttccatctcatcctgttgccttgcatggagtcaggtcttaaaaaactcatttccgtagttcctggtttataaagtctaattaacatgtaagataccccmaattcaagcctttgtcctattttcttcttaasctactgatgtcagatgtttttctattttggaacataatactgttgtagaatattgtggaatcataagttactgattaagttactgatatcataagtacattggtaatatataaccaagcccaaagaacccttatttcatatcagtttgatttattttggcctgtgacaatcaactgttttctctctcatgaaaatctcttktcttgaggcttcttattctccttctcaatctccttcttgaaatcttgtctctctctgcacctaaatgctagtgttctctagggtattatgctctctatctgcaagcctacacacctattggctaacatggtaggcagaataattattccccaaagatttccatgccctaattcctggaatctgtgaatatgttatattacatggcaaaaggaacactggacttatagttatggacctcaaaatacatatatacattgggtggacccactgtaataacatgggcacttaaaagaggaagaggaagacagagcagtcagttagagagatgcagtggaagaggcaggaggtatttgattatgagagattccacttgctgttattggctttgaagatggagaaagtrgaccacaaaccaaggaatgtgggtggcctctggagtctgtgaatagccctcagctgacagtcaacaaggaaacacaggtctcaatcttaagtcttcaagaaactgcattctgctaacaacccgaatgagcaaagaaattgattctcttttagactctcagaaagtaacttagccctgccaacactttgattttagcctacagagatctatgttaggcttctgatctaggaactttaagataagaaatgtgtattattttaagccactaagtcatgatagtttgcacagcaacagtaacaaactattgcagctaatgactctcaaatttaaatgactatctcagatctttctctgaactagtcagttgcctattggatagcttctctacagtatctggctggaacctcaaactcattacattgagataaaactcttttccctaaaacctgctcatattttttatcttgatgttgctcctaaccattcagactccttagccagaaatctgggggtcagtttaaactccttttctcaaaatacactatttctctacacatccctatgctatataattgataccaaatcattttgatttggggtttattaccactgatttaggtcaagctcccaccacttctcacttggatttctcaggtaatctcccaacacatcttcctgcctcttgttaaaatgtcttggtaatttattcttctgttctatgaaagtgaccttttcaatcagattatgtttctcctctacttcatggtttcccattgccatttcagtmaagttccaatttctaagcattacacacaaggcgctctttatgatctgattcctctttcctccccaactttttaactctttgtgttccataaaacatatcatgctgtccagctgtattaaatggcttgcattttcttgaacatgtgctatgtatgccatcagtgccttgtacatacttttttatctgactggaaggccctcctttctttgtttccctaactcctacttctttagtcttcaactgaattgtcactttagttaggggctcagtaaatgttggtttaaagagtaaatgagaagaatgccaaagaataagaattgtgaaccactgaagtggatttttacacgaatttctagagtccctttccctaaaggacaattttagatggcaatgtttctggaatagtttgagggtagccttttgttagttttatgtaaatgctaagaagagagcatttgagtttggtatttggagtaggaatagacaggaactcactaaagagttacttcagaagagaaagtcattatggatgatggtctcgtataagaaagctaccagacctactcatgtaatcatccactgttcttatctgcaagagggattaccccttttagttttgcttcctattttttaaaagctaagatatcctgttccagagagagtaagcttacattaaaaagcattaagtatctttagttttcttttaaatttgacttatgttctaatgattgttacttcatgggggtttccaaccttgggaaaaaagttaataactatttttttaggtttattatgagaactatacagtttagtcaatataaaatatacagtgccttgtgtgtaattaagtagttaataaaggctagctattagttgttataaatkatcgttattgctaagcatttaaaaatgatccaccattttgcagagatttaaacatctcagagcatctcatccttatgtgaaagaaaaataaatctttttttttttttttttttgagacagagtctcgctctgttgcccagactggagtgcagtggtgsgatctyggctcacggcaagctccgcctctcgggttcacgccattcttctgcctcagcctcccgagtagctgggactacaggtgcctgccaccatgcctggctaattttttgtatttttagtagagatggggtttcattgtgttagccaggatggtcttgatctcctgacctcgtgatccgcccacctcagcctcccaaagtgctgggattacaagygtgagccaccgagcccggccccaagtcacatttcaaatgctcagtagctacatgtggtggctagtggccattgaacaatacacttctagctattctctctgtaaggaatgctttcctacagctaatcacttgtttaagtcccttacctccttcaggtttttgctaaatttcactctctcagtgaggcctaccttgaccactctatttaatactatagtgtgccccaactccccacacttcacacttcttcattctttatctctttcactgygtaattactaatttattattttcattgtttattgcctgccttctttttctctactacttcatggacggaagcttcctggaggcagggatttttattttgttcactgacaacatcccaacacctagaatagtgcttggcctatagtaggtgctcagtaaacatttgtagattaaatgtaatgaaggaatgagtcattgcaaaaacttgttacaattataaataagcatatactagattcaagacataattcagraagagttaaaagcattgctgaccaaatctctcttaactaggtcttgaatatattctctgtaccttataccattttaagctgggagtaatggggagagaaatgaggagtttaaaatgagattaaaagaagcttataatctgtagttaggaagacaagattcacaaaaagaaactaggaaaaaatcctgaattttgttaaaaaaattagaaaatggacttacaataaggtctctccggttgtgccatatatattcctttgatgagaatttcccaataggtwtttaagtagtcatgtatttatatatcattatttgacagagactcggagaacataaaaacaagaaagctaaaagtaatataaagcctgcacttgaaaattagtttaaaacaatgatagtgaaaaatagaataattttggcaytaaacattgaatttatacaaatcttttagagtttcatgtattatacaaagttctgaggaaaaattattttgaacctagaattatatactagccaactgttcatcagattcacatttcaaaaatgaaagcactgaaaatgtttatcttccatgcatcctttttaaggaaataatttcagaatatattcctacaaaacaaagataaatatgaagcaaaaagctgtagatgcagtagcatgagataaaaaataaattaaaaaaataaaaccactgtagagtacaagaaatggaaaaagtacccagggattcaattgaaagattttctagtctcctagttgttggcctggagagcagtttgtccaggttagaactggtcttcaagaataagaacaaaayggattccaagcaatagaattggaaatagaagcatattaggtacacgatggagacaaatactacttttcccaacaaccaccatgatcaccactaccatcaccaccaaaaaaggcactcagaaactaaaggaaaaataaaaaattttagtgatctaaayacaaaagagacaaaagtgaggcatgattttaagggattagtggagtatgggaaaggaatattcatttgatcttgacataaaaatgttttgttttgagtgtgaatagtgatcatgacattgaaacagcagagatggaaataaaatcctaacttgtgtcttgtctttatactaaagaatatatagctggttgcaataaacttgcagtaaactatacttttgatttttaattttagaatagacctttacttaaagcatggctacagaacaaaaagcaaatgttattacattttgacaacataaagataaaagaactactgatggaagctgggaggtgaaaggcagaaaggaggtgaagggaagggtaacagtgctaacgtcctcttattacaaaatgagtaccaraaagagaatattgaaagtggatgctttaaaatatactaacaatattgcttcaattatcagtgttggtagaaagatgggagttggaatattgagtaaattttttttttttttttgagacagggtctcactttgtcacccaggctggagtgcagtggcaagatcatgggtcacagcaacctccaccttccaggttcaagcgattctcctgcctcagcgtcctgagtagctgggattacaggcacctgccaccatgcctggctaatttttgtatttttagtagagaygrggtttcaccatgttggccaggctggtctygaactcctgarctcaagtgatctgcccaccttggcctcccaaagtgctgggatcacaggcgtgagtaatggtagccatagtggtggtgagttcaatcaaggaggaagtgtttgcaaagcaaaaattgtgaggtgcacytcttaacaccacaaagttcaaaaacaaacaattacaaatatggcgagctcactgagtgcttttgtactgaatcatttaatcttgtgcatttgtattattattgtatacttttggaatttttattttacaataattggtgttcattcattcatttccraacctgttcacttaacatgccgatctttgggatgtgggaggaaaccagagtccctggagaaacccacacagacatggggagaatgtacaaactccacatagacagtagtcctggctgagaatcaggtttttttctcattaatggtataatgaaatggccttattcaaggacctcctgaacctcccacactctgatataaccctccaacacacacacacacacacacacacacacacacacacacactcgttgaaatcattaccatagagactccttgtccttgataagaatgtgtctctctcactgaaatagggggaaagaaagttgagaattaaagcctagaggcctaaaatctaccaataggatttgtccacaaatataatattacattataataatatatacatatatgaatatgttgtattatataacatcaatatattaaatataataaagcaatctaatcattatatattgaatggtgtagggataatacgcattattttgaaaatactaaatagatatatgtttcattccctttataaagtctgtctgtactctgtaacctttaagattatccttagtagtctgaaggaaggaaaaggttgataatgccagaataagaagtacataggataaaggtgaaagaaatagcacataggaagcaatgcctaacaggaactgggagtggaagacctgattctagaacagagaaaaggagaaaagagaattcagactcctgtggctcctctggactgaaaccctagaaagcattgatgtaggggtttagaaacaccctagtaattttcagggaatcttttagcagcagagattttttcttttcatacttctccttgtgttataggatctttggggtgttgattttcttcccctgtaaacctctgttgccagtggggcctttgccccatttcttgtcctggtccaggaagaatgaggtatgcagrcaaatgaagggtgaggaagaagaagaggagatttatttagtgctrtaactgctcagaaggagacccacagtgggtagctcccctctgtgggcaggcaggtcgtctgtcaagtgttcagctctcaacagagaggaggccctggagatggcagcttctctctgctcgctggtcatcctgaggtctgcttttctctgcaggcaggtcattcggcagtctctgcagatctctgaagctattagcagagagcgtaattagcagagagggtagctcctctctgctgctggtcatcccatcktctgctcagctctggctgagcccggctatttatggacctcagaggggaggaagtgcacactggttggcccatgggtggtcatgggcaggcctggaaaaggcaccagtgtccactccagtcagtggaactggcagcctgggccccagccttcaggccctccctgacctgacagaaggaccttactggagacccacccccttccacgtgggactctgcctcctactactcatgacgcccaggctcagcctgactttgctccaagattggagcaggagccaacagcagggagaagccaagcagtgggagcaggcacttttaagcttgtgagggcagggrggccttcccaggcccccaagagtgcagggatacctgagtctgctgccatagtttgggcagttgcacccctgcccaggagggcagggctcctgcctgctctgtggaacaggcagccctggccacaccttcctgccacagctgggatgatggcaggccaactggagtggctgccaccatcacttgggcaaactggagaatttttaaggtctcttagaaaaagcattatatttaacaagttgaacataacaaagtagcagaatgagttgggaaaggacaaaagattctctccagttttctaaaatcaaagttgtcatgatagaattcctaggtttccctttgggcttagggaaggtaactggggtacaaaccagtttatgatcttctttaagaagatgccckccaagggcaaaggagtgcatcttgagtttgtgggaggcccaccgaacagggtgaaaggacatagaaattgtttgtctttagaatgcccaatgccaggaggctacgatgggggaatttagcaaacattttcccaaaatctataaaaaaacactaaattactgagctagcaattaaatgtcaccattgctggagaccagactaacagctagaactaacagagaacagagaacaaactacaatttttcccagtgtcagtatgtcatagtgtgaggaatcatgtgcaaaaaggaatatgtatttctctttattggaaatcaacgtagttcacaaacccccatgtaaaacactaatcttgtcagttaaaatttggtaacagtaaaaacacttaatcttgtcaattaaaatttagtcacttcaaagttgaaagttttctttgaataaatatttaaattcagagttctttttcttcctaagagcagtggcctgccattgaagaaatatcttgttctggtgctgacctctagcggtcattggccttccccgaggtatctgatcctgcttggtctttggctgatagaaatttgcactcaccactgtaatgttgtgccttggcatccagtctctaaratataaataccttgtatttatcttaccacaaccctaggctcctttgactcacctagttctctttcctcatcwttcatgggccattgcattacagatactttactgtggtagtcttcaaattgggatacatatatatctgggggtacacaaatttcagggagtatgtaggcaagatagtttttgttgttgtttgttaaaatttgccttatttaggtatgacttatgtaaataaaattcacaaatttgaagtgtacagttctgtgacttttgacaaatgtatatcatcatgtaacatctactacaatcatgatataaaacatttcatcacccaaaaaatgtgttccctcatgcccatattgtggcatstattaatagtttattctttttcaaagcatgtttattgagatacaattcacatacaataccattcattaaggaagactggataaagaaaatgtggtacatatataccatgtaatactatgcagccataaaaaagaatgagattatgtcctctacaggaacatggatgaagctagaggccattatccttagcaaactmatgcgggaacagaaaaccaaatatcacatgttaccacttgtaagtggaagccaaatcatgagaacacatggacacaaaggggggaccaacaggcagtggggcctacttgagggtggagggtgggaaggggaagaggatagaggataaaaaaaaaaataactgttgtgtactaggcttagtacttgggtgatgaagtaatsggtacaacaaacccctctgacacgagtttacctatataacaaacctacacatgtacccttgagcctaaaataaaagtttaaaagaaaaaaaattcattcatgtaaagtattcacttgtatgggttttgtttttgtttttgtttttaagaaatgaggtctcactgtgttgccccagtggcattgaactcctaggctcaagtgatcctcctttagctactccaaccactgtgcatggcttaaatagtttttattgtgtgtacagatttgtgcaaccatcactgcaatcatttttagaactactgatacatgcaacaacattgatagatttcatagtgttatgctaagaagttagtcataaaaaattacatactgactgtatgataatagttaacatgtcatgctgggaaaggcaaaactggtgacaggaagaagatcagtgacttccagagccttgggtgaagggaggagattgactacaaaggacatgtggtgacttttttggggagatgaaatgttttcattactctaaaaagaagcctagtacgcattaacagtcttcctcatttccccattatacgtccagccctaaaaaaatcaataatctactttctgtctgtatagatctgtctactctggacatttcatgtaaatgtatcagtacttaattccttttttttttttttttttttgagacacagtctgtctctatcacccaggctggagtgcggtggcactatctcagctcactgcaaccttcaccttccgggttcaagcgattttcctgcctcagactccctaatggctgggattacaggcacgcgccaccacacttggctaatttttgtatttttagtagatacacggtttcaccatgttagccaggccagtctcgaactcctgatctcaagtgatccgcctgccttggcctcccaaagtcctgggattacaggcatgagccactgcatccggccttaattcctttttattgtggaataatattccagtgtgtgggtatatcacagtttgtatatccatttactagttggtggacatttggactgaaatctagaccactttttgactattatatttatagatatatttatatttatattatattatagataatactgctatgaacatttgtgcacaagtgattgtgtgcacatataacatacccaagatgtaggcctcagagtggaatttctggatcttgggcatatacccaagatatatgcctaggagtggggaaatttctggatcatgtagtaaccctatgtttaacattttgaggacatttgttcctttttattgctgagtgttatttcatttgtttatccatttaccagttgatgacatttgggttgtttctaccttttgactattatgaatcaacctgctgtgaacatttgacaggtgtgaacatmcactttaatgaattcctgttcttttaagtataatgaattcctgtaagtagaattacggggtcatatggtaaatatataagtttaactttatgaaaactgccaaattgtttaaaaaatagctgtatcatcttgcattcccatcagtaatgtatgaaagtttcagtagctccatattctcatcaacattttatgttgttagtctttaattttagccattctagtggatgtatagtggttttaatttgcatttacctgatgctaataatgttgaacatcgttttctacttgtttgtcatttatatatcttcctttgtgaagtgtcagttcagatcttttgcccgtaatcattcaataaaataatcattttatccttgcttgaaaaagctacagtctttattcaatccaatttagcttagtctgcatctaccatggaactgaacgtagctggagaaaaatacaaccatcttaagtgatttcatttwaaattcargtagccccttaatgcagcccagcaatcataaggcattcactcttctccttttctagatgactatttcattctttctccaatttcttcaagtctctgtcacttaaaccatcatcttttgttactacttttttgagaaaattgaagcaagtagaaaagaatttttattgcaacccacttctttccagcatctgccaatatactgtgcctttcctcctgttcatattagatgaacctctcctgctcttatctaaggccacctcatctgcttgtatgctatgtctcatccccttttgcctactcaagaagattgacccaatcattctaccctctctttgctatattattagttttttcctctatctactagatcatatccaacatgctggtttttttctgtctttaaaaatatttctgaccaagcacagtggctcatgcctataatctcagcactttggaaggccaaggcaggcggatcatttgaggccaagaattcaagaccagcctggccaacatggtgaaaccccgtctctagtaaaaatannnnnnnnnnnnnnnnnnnnnnnnnnnnnnnnnnnnagttgaagatattaaccatctccaatgtctccaattcctcttttcattctttcttaggccattctaaccaggcttttatctccactcctctatcagacctgctcttaatcaaaactttcaatatcctccacattgctaaatccaatggtcagttctcagtcctcatcttacttgacctatcagaagcttttaacacatttgatctttcctttcttttgtaagtattttcttcacttgagttccaggatactttttccacacacggtcttctccatgtcaatcaatgacaactccatccttccagctattcaagctaaaaatcttggaactattctttactcccctctttttcttgcagcccacatctagtttgtcagtacatcctattgcctcaatcttcaaattatatcctgcatttaagtctaaacatttttttttgtttttgtttttgtttttgagacagggtcttactctgttgaccaggctggggtgcagtggcaccatcatagctcactgtaatctgcaactcctgggctcaagagatcttcctgtcttagcctcccaagtagctaggactaccgacatgtgccactgcacctggctaatttttaaaatttttttgtagagacaaggtctccctgtgttgcccaggctaggactcctggcttcaagccatcctcctgccctggcttccaaatctctgagattacaaacactttaactgtataataaattgatatctttatagatcatttccatttacttttttgtgagttattacatttttgaaaatacagtagacttttagaacccacaaatgcttttccttatcgtatcaggaaatactgtgtctaatctacaaaagtcggatttttaacaggctcaaataaaaatggcctgtttctaacaaccaaagaaacaacaaagcaacaacataaacatacactcagacatccacttcataccacctcagcaacagcaacaacacacatacacacacatctacttctcattacgtttaatgctgccttcctgattcaagccaccataatctctgcttgcattattataataacctgtcatttagtcttcttacattcaccctacagaccattctcagcataacagccagagtgatcctcttaaaaaataaatcagatcatgttatacctctttttaaaacctgtgatttgctccttttctcttagagtgaaagccagtgttcttacagtggcctgcaragaytgacatggtcttcccaccaccccyttacatctctgaccttatcttgtactactmtaatgttccaaccatattggyctgcttactattcctcaaacaaaagtaggcatattcttgtctcagggctttagtacgtgctgttcactgtgtttgactgccacagtcttcatggctgatctctttcaagtctttgctcaaataccacctttcagtgagtcttccctaacaatccaatttaaattgcaaacactccatgcgctcctagtctcctttgtgctacttataaacaaaagccaaaaccatagcactcactacattctaacatacttgcataatttacgtacttattttagttatttgactgccttccctcacaagaatataaacttcacaaaggcaagatatttatccatttcgttcactggtatatctctagtacctaaaacagttcctagcacattttaaggactcaaatatttgttcaatgaatgaatgaaagaaatttggttaaaaactggaacaaaacaggaatggaggccagcgacaggagaacttctctacctcatttcctgtaggcctacatgcttggaacttaaaagcaggttgttgtgagcctaaggcctgaagacatgcaaactttcttttttctttctaaccaaactcctgctttttaaaaaatcatattatttctgggagtgagtctgtgctgtgtatttaatcttggattgccaagccagtgaggtgggaaaaggttggaacatatctctattctaaagagtagagttggattttgtaaatataggtgtatttcatgataatttaaaatgttttcttgaagtaatatatgtgtgtacaaaaaaaacacatatcataagtatatagctcactgaattttcacaaactgaatttgtcaatgtaattggcatccatagcaaaaagcagaacccagctaacatctcagatgctcctctgtgccctttccagttactagctactacccagggtgaccactattctgacttctcatgccttggaagtgttttgcctaattttgttcttgatataaattaaatcatacagtataaacatgcttgtatctctttttttactcaaaattttgtttgtgagatttatccacattgttatatatggtcagagtttgttcgttttcattgctatataaaatttcacttacagtctaaccattctactgttgatggatatttggtttccagtttgggggttattatgaatagtgctactatcaacattctattaatgtattttggtgtatgtatgcgtgaatttctttggacatttttgtgttttttaaatccacagtcagtgaaccctaagtgttcctcagcattgcagtcagtatatttaccatgtatgcgttactcaaatgacagctgtagttgcaggcattaccaaatccttccctccttaatgttatcactggactttgtctatacttgggattcttaacatgttgtattttggttaagtatgcgtattcatgttttttattagattttgagtgctttttagtactttgttttacttgcttatgtatcccgactcctgacraggtacctgaaatatagtaagctagttgagcgaatggtgatagctgtcaccattgccagtgattaacagagcaagtttccctagttatgtgaatcacttagcctagagtaaaatccatgctttagtttgatatctcagtgtcaaaggattaggaatgggaagtcatttctctctgagagaagcccagaactgtgggctcagaactgaatgtgctgtgtggctaaagggaattgctatggctttacaagcctcttggagatttaaagtgttaacagcagtgattccaaggcatagtgtgggggggccagatataaatagcagaacacaagtagcgtagtgtgccactgccaagctactgctgggggtgtttataaaaagaaaagcattcctgtctcagctctcactgtcaacaacatcccatcctgaagacttgcttaccacaactgagagtggggagtcagtttgaggcctagcatcacttaaacttcctccaaaggcacaaaagccaggtaaaccttttgacttatttacactcagactaaagaaatgaacaatttttaggaaaatcctgatcaaagcttgcttaaaacatattgccttgtgacagatatctatcatcttatattcaaatcttttttggaaagagaagtttaacacaaagtagcatgttggtactatattttagtatttttagtaaaaacaaaacaaaactgcttctgaagaaatatgggaaactgaggccaaaatgatctataaaagggaagacttctcccttcccctgtgctgttcattctcatttttagaatccagaatatggtgattggtagggtaaaatagaagcttcatttgagttacattatcataaatactgggatgaatattaggcattcggccaatagttgtataatcttagaattgctgcctacccagttccttcttattcttgttcccgccttcagaaagttatgtaagacacttattttaccctcgggcttctcttgattgtatttgggggaagggggccatctctgacaatccactgctttgtaccactactgacctcatcatctcctctgtcccactcaaaagggcatgacaatgtgcaaagaggatagaagaatggataatgtgcatggacatattcctggggaattcttagaaactgggagctaggggaccaatttgagactgctgttttttagtctgattgtgttatttcctgtgcacgctgaggggagatttagagatgggaagaaaatatgactcccagtgactgtggtgggagagatgacatgtctggaggagtatggaaatgcacagatttaatcttgagcaaatcactgaaattctaaggtgtttttgtttcctcgtctgtagaatgagagcattagaccactagataaagcctaatggctcttgtagcccgttaggaatttattgataatcacttcctgaccatcatgctatccactcacattctaaatgaaaaaatacrcagtgtcatcctattctacttccctacacctcttttttgagtctactgaattgaaatttctttattttaatttagaagagaaaaatgaagacgggacattttgaaatagtcaccatgctgctggcaaccatgattctagtggacattttccaggtaatgttgggaatgggaagcatgtggtcattggaatggaaattcgtttttttttttttttgagacggagtctctctctgtcgcccagactgctggagtgcagtggctcgatttcggctcactgcaagctccgcctcccaggttcatgccattttcctgcctcagcctccccagtagctaggactacaggcgcctgccaccacgcctggctaattttttgtatttttggtagagacgggttttcaccatgttagccaggatggtctcgatctcctgacctcatgatccgcccacctcgacctcccaaagtgctgggattacaggcgtgagccaccgcgcttggcctggaatggaaattcttgatataacattacctgaggcatctgtgtggcttgatggtggaaatgaaagtaggtaggataggtaaattaattataagtagctcttttcattttaaatatgtgacagattaactgtaaaaagttgaaaaaattaaaattaagcaaaaagaggaaagtaaagattattcataattcctccactcagagggaatgattcccaacctgttggtgtatacaggcttcttggcttttttctatgtgtatactgtttttaatttacaaaaatgggttcacactgtacatagaattttttctttgcattttaagttaatactatgctgcatgtcacgcatgtcatcagatattctgaatatatgtttttctccaaataagataatgctgcattgtttgattacatgttttttaattaatgaccattttcccacattttttttctggcagaacttttatgattttatttgcaattgactctttaagcatcctgtaacatatttttatgtaaaatataatatttcacttgattttttttccccacgttgttagctgccacattacttgtgggtatttgtgcaccattttagatgcctttttaaaaatatcttaaattcttaaactgttatccttttttgaatttaatattctaatccattttctatagaatcattgtgtatcctgtttcctgtgtcgcagtatgttttttattgaaatataatttacataccataaaaattcaccatttttagctgtatacttcagtggtttcagtatattcattatgttctgcaaccatcaccactatctgattgcaaaacatttccgtcaacccaaaaagaaaccctgtacttattagcagtcagccccaattttctccatcccccattccctggcaaccactgtctactttctgtgtctatggttttgcctattctggatatttcgcctaaatggaatcatacaatatgtgaccttttgtgtctggcttctttcacttagcataatgttctcaggagtcctatcagtacttcattctttcttatagccgagtaatattctattttatggccgtaccgcatcttgtttatccatttatcagctgatggacatttgggctgtttccactttatggctattacgaatagtggtgttgtgaacatttatgtacaagtttttatgtgaacatgtgttttatttttctttttaaaaaattttctaatcatatagtcttgacatattgagatactacaaacactatttggttatttggtagcattacagagtaaagtttacttatatataggaaatatatatgtaagaatgaatttgggggttatgatttatgattcatagcaaaattacctattgttgtgaacatgtttcacttctcttgggtgtacacctagtagtggaattgctgggttgtacggtaattttatgttaacttttttaggaactgccaaactttttcacactagctgcatggtattacaatcccaccagcagtatattaggattctaatatctctgcatccttgtgttacatgttacttggtttttcatcatttatagccatcgtagaggatatgaagtggtatttcattgtggttttgatttggttttcaatatactcttgcaacataatttaagtgtatttgttctgtaattgtttcatgatttgcttagccagtttctctccttgacctttaggtcatttccatatttttgtaagaaatttttggtaattgaatttcattagtatgggctttttttctcggtggttatatcagagaaatataatcagcttgttcacctagccttttgtacctgttttttagtatctgttcagttgtccctgaatagtggtggcatttatgaactttgtcactgctcaaggcacgcaccatacaaaatacacaatcagctatggtgtctggccagaaagacttgatgtctaaaattagacatttggagactggttagaggcatagggaaaagacaggaacatagtagatcaactctgatataatgtaaggaatgtgggaggtgttttcagggtctggtgtcttatacggtgttgaagtcttgaagataaatcaggcattggcacccaagctgcactctggtacattctgtgctgtggaggaaagtgcatttcttggctatgagatggcagtgatttgatctcctgaagctcaaattcccatgtcaggaaactgacctacaaacccaggactacgggggtcttaatgacttccatggcagaattctctgtggctagtaatcaagatagtttctgaagctggcacaattccctcgtttgtaaaatggtgttaaytattttttgtttaaccttttataaatgttgtaatgaggacagaattacactctttttcaagtgctacataaatgtccatggtcttcataattggaaacattctgattctttagaggcaacagaacagtttggttaagaggacaagacggccgggcacggtggctcacgcctgtaatcccagcactttgggaggccgagaaaggcagatcacgagktcgggagatcgagaccatcctggctaacatggtgaaaccccgtctctactaaaaatacagaaaaattagccgggcgtggtggcgggcgtctgtagtcccagctactggggaggctgaagcgggagaatggcgtgaacccggcaggcggagcttgcagtgagccgaaatagtgccactgcactccagcctgggcggcagagcgagactccgtctaaaaaacaaaaaaaggacaagactctggaattagactgcctgagatcaaattccaattccatgtaagtctcaatctcttagtttcctcatctttgttaaaaaaaaaaaaaaaaaaaaaggcggggggctaataatagtacctacctcacaaggttgccgaacacttagtgcctggcatatagaaagaactctggagatgtttgttaaacttggtgatagagtgtccacccagtgtgtctgagaaggaaatatgtaggaaaagttcacaaatgaaaaatggttttaaataagaaccaggtcgttgtggctgtacgattgtaagtttcgtcttagacatgttacgtatgaaggttctttgaacattcaagtggaggtgttaagtaggcagataaatttgatatataggactggcacttacaggatagatcagatatatttagatcataattgaaactgtaagcatgtatataactgcctggggagcgtagagttgagagttagaaaatacgtagccttgaggaactccaacatttaatggctaactggaatatgttgggtctgcaaaagagtctaagaagaaatgctcccttaagtgagagctgtttgggtggagaaatgggtgggaagccataatggggagggttgagctatacgtgggaaatgaagtggagatggcaaggacagacatctctttcaagatgtttgttcgtgagggagagaagagagatgggaaaggagatacctagagcaggatatggaagcaagttttgttttgcgtttacaagttagtatctctgtctctctctctctgtctctctctctttcactctctctctctctcacacwcacacacacacacasagagagagagagagagagtttttaagtatcattcacatagaacctgtaactttttttttgaatctgtaactttaacagcttctagctaaatatgtctataaagtctccaactgaggtccctaagcagacttatgcaactatgcaccatacaagtatagactaatggaagaggcattatccttttatttgtagaaactcataaatggtattcctggggagatttgatcatcttattttttgatccataagccagagtacagggttctaatgtagttcacttgaatattttgccaggttctgtgctaggtgtgtaggattcaaagataaaaacgatacagaycgtacccttaaggatctaacagtataatacatatattcctagcatgaaataatacaaaaaaaccacatcacactggagaaagaccttatgaaaaaataataataaccacggcatgttaaagacttgatatgtgccaggcatggggcagagggctttgcatatgttcattacataatttaattctcacagccatcccacagttaaatactatttcctccactttgtcttccttttttaatttattttttattttttgagatggagttttgctcttttgcccaggctggagtgctgtggtgcagtctccgctccctgcaacctccgccttctggtttcaagcgattctcctgcctcagcttcctaagtagctgggattacaggcgcctgccactacgctcagctaatttttgtatttttagtagagatggggtttcatcwtgttagccaggctggtcttgaactcctgacctcatgatctgcccgcctcggcctcccagagtgctgggattacagacatgagccactgcacctggccttttatcctaattttttttaaaattgaaaacttgaggattagaaatgtcaagtaactttcccatacctagttagtaacaaatgggatttgaactctgatctgcctggcttcaaagtggtgttaattacattacaccaccctgcttcttatgttatgtgaacatatgtatatgtataatttagttgtatgtggtattatgcctcttcagttgtatgtgactgaaatacagttcaaactagctgaagcaaacagggaatttattgattcttacaactggtgaagagtacagttaggcccagcgtctaaagtatgttttcgggtcctcatctctacctctcagctcagcaagccttatttgttgctttattttaagacagaattctccatgggactaaagaataactgttggaagccctaggccaatattatccttagagcttacagctttagaggaagaaagatccatttttttcctctgggagctctgattgctagactttagatcacctgcttatccaggaggtgcaaaatcatttctacccaggccatatggacaagggagggggcaaccccaaaggaaaagggtaatgtttgtcattatgtgttatagatcatgaataatattttgcatatgatacttcaaattcccaacagccttgaagggttgaagaaatctagctaagatgttcaaagccaggactgccacccatttctttagcttcacatccattgttctttgctctgtgccataatgtccagataaatgagctacaggcacaatctcacccatacctctcacccactgacatttactctttcacacaaatatggcacagctgagaaaagttatcaatagcaatggaatatacttcctgcataaaaacctacccaaaattggttataagtcaggcgagaattttggcaagggatgagaaggtgggggtaataatgtgagagaaaatgatattcactraatttcttatttcaagartattaatttctttttcctttgaaggtgaaggctgaagtgttagacatggcagataatgcatttgatgatgaatacctgaaatgtacggacaggatggaaattaaatacgttccccaactgctaaaggaggaaaaagcaagccaccagcaattagatactgtgtgggaaaatgcaaaagccaaatgggcagcccgaaagactcaaatctttctccctatgaattttaaggataaccatggaatagccctgatggcatatayttccgaagctcaagagcaaactcccttttaccatctgttcagtgaagctgtgaagatggctggccaatctcgagaagattatatctatggcttccagttcaaagctttccacttttacctcacaagagccctgcagttgctgagaaaaccttgtgaggccagttccaaaactgtggtatatagaacaagccagggcacttcatttacatttggagggctaaaccaagccaggtttggccattttaccttggcatattcagccaaacctcaggctgctaatgaccagctcactgtgttatccatctacacatgccttggagttgacattgaaaattttcttgataaagaaagtgaaagaattactttaatacctctgaatgaggtttttcaagtgtcacaggagggggctggcaataaccttatccttcaaagcataaacaagacctgcagccattatgagtgtgcatttctaggtggtaagtgtctgctctgtctgtgcttggctgggagggaaggagtgggattcttaggcttagggaaaggtcagtgaaaggagagtgagaggtgtttgaaaggtgaaatgacattccgtctagcttctttcatactatctctttacccatagttaattttatgaaaattgtacatttacagtattattaaaagttaaaaaaaattagcactataaggcagtggttcttaaccaaaggcagttttgccctgcagggtcatttggcaatggtcagaaacatttttggttgtcacagttggggaaaagggggattgstactgacatctaatgggtagaggccagaaacactgatagacaatgcataggacagccccacacaacaaagaattatatggcccaaaatgtkggtagtgctgatgttgagagaccctactataaggcttacaataaataaatagtgcagcctgggaaacatagggagaccaccatttctactaaaataaaaataaattaaaaattagccaggcatggtggcacatgcctgtggtcccagctgcatgggaggctgaagtgggaggattgcttgagcccaagaagtccaggctgtagtgagctgtaatcacaccactgcactgcagtcttgcagcagagcaagaccctgtctcaaaaaagaagaaaaagaaaaatagcagtcgccagccccacctttcctcaatttccactcctcagtggcatccagttttcattcttttagctatttcttcaggtgcttactgtcatgtttccaagtaaataacatgcttcaacatgttatttcttggtttttaaatctttagacatcatgtattgacttcctactacagagaatgagtatgtaaccctcatctaccgtgtattagttaagaattttttatgtgttcagctgtaaataacagaaaacctgactgagctttcatttaataagtcttagaggcaggctgttcagagtcagcgcagtggctcatccatgtcatgtcactcatgctctttctttctgttccaccatccttaccatgttttgtttgttgattcatgtttgcacttgtgactgttgcagctctaggcatcaatccatgtccaagacaaaaagaaagtaaaggggatgacagccaaatctacttgttcagtaaggaaagtaaaagttttcccagaaacccttactaaactcctgattacaggtcattgacttgaacagtttcttggtcacccatagctaccagagaagcttgggaagggggtaattatcctttctccagccaagggaatatagtgtgtgggggagacaaaggaaaagggaattagaaatggctgttagatcagtaaaccaaaagtttctgaaagccaacaccctccttcccaatgtacgtccatttcccccttcccattctcccagcatagtaaagacaggtcatagctcagttagagtggtttttctgtgcttaaatccctcttttaccccagggttattctatgatttttttgtttgtttccttagtttttttaatatccaatcagtaattcacctccaaatcctttgacagaaatataaatttcttctttcccctggataattccctcatcatactgctctatgataagctctttaggcctgctgaacatcctgaaatctctcattaccattctgagatattgcttcttccctatgagagatctcctatttcttggatttgcaactctttcttggattactactttgtttggtgtggtggggatgggggttctgcagaagtttcggagaaatggtccactaaagaaaattttctaagtctctgcatctctgagagatctgcctttaagcttgattaatagtttatgtagatttgcatttctattttagaaactatttttccttggaattttgaagatattcctccagtgacttctaggttctgtagctgttgttgaaaggtatgaagccattctaattactaaaactttgaataagactttttaaaaacaaaaatctggaaggttttaggttgttttctttattcccaacattctgaaattttatggtgttgtgccttagtgtgtgtgagcaaagggttagtaaactccttctcctgtctkctgtgaaaatggcctcctggtgatcttccagcactctctctgcaatctatgaaaggtggaatgacagctgtgtgaccttacagcattgcctgtggtaaacataacccttgattggtaaagtgcatctgagctgggaggattgtgaatgaactataaatacttgaggagaagccatagctttgggctttcctgaatgtggtgtgacatacccaggtgttcttcttgttgagtcctggaaggacagcagtactctcgtaccaatcctgcataggttcaaaatatattgtattttatatgtggcatgaggctactaagctagagaggctcctacacccacctgtgtaatcttgtttccttgaacctgagctgtaatttggaagcaaaagaacagccctggactcctgtgaagacttgcattaaaggaacacatctgatgctgctctgctgctagacagtatgctttattcactgctgtatattcttctgcaaaactgagtaaactggtgaggggttggcctttttgggtcttgaaggtgtgattgcctaactgaaccaaaaaccatcgctgctgggtcaagtaaagtgtgcagtaggcctcaaagtgggatagacttttagatcttgactaaatgtagccaaggtactatgagataaaaaaggctgggtggtagggaagtgctaatgagacattgatgtctgggtagggacagatccacttatgattggatggcagaagctgtgtggctattgaggtgcctagggtgaaaattttaaggaagtcctcactcttagggctgtacctgcacttgtatattcctgagagtgcctccttaaattttctctaggcaccttatttgcctcaccctagtcctgcatctgagttgcacctgagaaggacgattctagttagagcagatgaaagctgaaatgagtaaatttggttgaaagaaaaagtgtttataaaaagataggggaaaaaagacaaaagacragatgagaaatgctggctagggtttggagaagagggaaccctggaacactgttggtaggaaggtagattggtgcagccattatggaaaacagtatggaggtttctatctttaaatagaaattaaaaatagaactgctggtcaggcacagtggctcatgcctgtaatcccagcgctttgggaggccgaggcgggcagatcacctgaggtcaggagttcgagaccagattggccaacatggtgaaataccatctytactaaaaatacaaaaattagccaggcgtggtgccacgtgcctgtaatcacagctacttaggaggctgagacaggagaattgcttgaacccaggaagaggaggttgcagtgagctgagactgcacaactgcactccagcctggtcaacaagagtcccccccccgctccctccccgcagaaaaacagaactaccatatgacccagtaatccctttcttgggtatataccccaaagagttgaaatcaccgcctcataaagatatctgcactctcatgttcactgcagcattattcacggtaaccaagatatagaaacaacctaaatgtccaccagcagacaagggggtaaggaaaatgaggtatatatacaataggatattattcagccttaaaaaaagagagagattctgccatttgccacaacatggatggacctggaggacattaggctaagtgaaataagccagacacagaaagctattgcatgatctcagttatatgtggaatatatatgagatcaaaaacgagagaatgaaacagtagttaccacaggtgtggggagaggaactgaagagatgtagatcaaaggataccaaatagcagacaggtaggatgaacagatttggagatctaatgtgtaacatgaggactaaagtcagtaaaattgtattttacttaaataaggattttagctctcttgctacatatacaaaaatatgtgagatgatagctatgttaatttgcttcactatagtaaccattttactatccatatgtatttcatggtttcatgtaaaccttaaatatacacaataaaattcagtttttaaaaaaggaaaggtgctcattctcaccaaccatacattggacctgacccaaaaccaagccagctggggccagtttagacgagctcatgggaactgatcgtgggtatgcatgtcttctttcctgctccccctatgtgacagtagcctgaaattggccatagtttagagttataccatggaaatcagaaaacactgcaaaccagggtctccctccctccctacaccaatcttgtgaaactttatcagcatagcacagccaaaaacccggctgcagctgggctgacagaaatggtaccgcttttggtgtttttgatgcctttggccagatgccgtttgtggaaccgttagttatatcaaagccctggctgcagtggctacaagctaaatgtagcacaggggtctggttgatgggctgaggtgggcaatggagcccacagactccatgtttgtgagtgggattatgaaagaaccaaagaggttctattggattgattctgaaaatgccagagttcagacccgcgtggagaagtgcgggtcattgtggaggcgcacgtgtaccatgtgtttagggagctatgacagtcagccattgtactcgagtgtgttgatttaaccctgggctggagtcctctgccgccatctagagatggaaagtcaggatcaaaaactccctggagtaacctttaaagacaggcagtttgaaacagtgtgaagaacaatggccaagtgttttaagagccctagctaaggagaatgtagtgagaatcttgttccattgtgactggatataactgagcctttggattaaaaaaagacaatgtttctaaaaggggtaaaaaaaatttttactgcgttacgtttagtgtgctaaacatagtcccacaatgttttaaacttgcctgtgatttccaagataaaaatatattgtgagtttttcaaaaactagttagctgaaaactttgttcgttaggaagcagagagaatatcaacatctctttagataatatagttcctggtggtcatagacattaatcttggtattaatccaagctgatgtgagtgaaaaggagtaacagaaacctttctccttcctcaatagaaaattagcccaggttaactaacttttatgctatttttctagaaaatgcgataaagttgaaatgttagctgtataatcaagctacatccattatcattaaaaattactccattggggctgggtgcagtggtgtgtgcctgtagacccaactactggggaggctgaggcaagaggatcccttgacccgaggaattcaagtgcagcctgggcaacataatgagacacccatctcttaaaaaaattactccattggaaaattatacctcaattgggaggacggtgaatgaattataaatacctggtgggaagccatggctttggggctccctgcaccctacagggcaaatatactaggtttataggaagaaaatttatatgcagagaaatagtagagcacatatcatcccctgaactctcttttttttttttactgaacagagtaggcagagattatctggcattttggtcaatgtttccatagagagaggcgtgcctgtataatgctctacataatttatagagtaagagggccagggaatattgttccctggctggaaagtagccttgatagaaaggaggagcctgtagactccagtggctagtagtattattttgtagagtttactgagacctgttgagccagctctctgctaagccatcaaaagggggaaagaaggtgagcctacaggactatccagatttatttgttataaatctaccccagcccttgtgtgcttattaaatgttaagtatctccattggttctgattggcacctttctttagcatttcctgggagtagcaaagtttctgtactgttgtctgggattgtctaagattgagacatcaataagatccatgtctctaggcctaataggaagtgacatatccaacaccataagaaattcgtacttctaaacagtggctgaaatgtccctgaatgctatagcaaattcaccaggctgccaaggaatatttttaaatttcaaaacagacaccgccatacttgatatttgtcagacactgggtgaactactagcttgaggtggaactcagtttcaaagttacatgttatatcatagtacattctgtttgatgacatcataaatttgcaaagctggatctttttagcaattgttgtaatgaaaccaagtatatgtgaaaatcaatgtggcatttatcaataccccaaattaataaatatttatatcttaacaccttagtaaacatttgaaaaaatagcacatactttttaaaagtactattattttattcttaacaataattacttgctaatgggatgtgtttgctttttggacattcacagcttctcagaccctggaatcagattgtgtactatctcatttcctgttccacactgattttcacatatacttgctttttgcgacaacaattgctaaaaagacctaccttgcaaatgatatggtttggatctgtgttcctactcaaatctcatgttcagttgtaatctccaatgttggagatggggcctggaaggaggtgattggatcatgggggctgtttctaattatttagcaccktcccctttgtgctgttatcatgatagagttctcacaacatctggttgtttaaaaatgtgtagcatcttccccctctccctcttcctcttgctctggccatgtaagacgagcctgcttccccttcaccttatgccatgagtgtaagtttcctgaggcctcccctgccacgcttcctgtacagcctgccgaatcatgagccaatcaaaactcctttctttataaattacccagtctcagatatttctttatagcagtgggagaacagatatatgtcatcaaacagtttgtaacatgatataacctgtagctttaaaactgagttctacctcaagttcacacggtgtctgacagatatcaagcctggctgtgtttttcttgaaatttaaaatattctttggaggctgggcgcggtggctcacgtctgtaatcccagcactttgggaggccgaggcgggcagatcacggggtcaggtgttcgagaccagcctggccaacatggtgaaaccccgtctctactaaaaatacaaaaattagccaggcatggtggtgggtacctgtagtcccagctactcgggaggctgaggcaggagaatcacttgaacctgggaggcagaggttgcagtgagctgagattgcgccattgcactccagcctgggtgacaagagtgaaactccatcttaaaataaataaataaataaaaatattctttggtagccctgtgaacacctcagccactgtttagaaaaaccacagatctaatggcaggtcagccacatgtttgtgaaagtggattaggttttagtagccaggtttggccctttattggaggtaagatttccatatgacagtggagctttcgagagttcgtccagccttatgggaatttagttcagagagaacgtattgcataataagatactggtttagtgaatcatgacttttctttcgataagacagtctgtctcaattaggcccagttaacaggctagcagtaacagccctgcagaaagaggaagtcctcgtgacctacaaattctgacgtagccttgttgccagagattctaatcagctgtgagtatagtcattgacatttgtaatttctttggatctgaaagagatagggaacttgtgggagggctttatttactcttgtccagactgcgtctaatgtttctaactgtagacttctctgctaacatgacagccatgtaatctccagtatttaacaagtcagggatgtggagggcttcttttggtagggaactagagaccagatccaaaacctagtcctgtcctgttcatcccatcctcataattaagaaaaaaaaatttaatagctttactgagttataattgatatgcaataaactgcacataaagtaaaatttagtaagttttgatatatgtatatgccaatgaaatcatcactacaatcaagacaatgagcattttacatttgttgcttacaaaagtttcattcctctttgcaattcctttctcctccctttccctgtttcccagtccccccaggcatctactaatgtacttgctgtcactacagattagttggcactgtctagagtttcattcaaatcttatcatacagtatattctcttttttgcctggcttctttcactcggcataattgttttgagattcatctgtgttgttgcatgtatcaatagtttatttatgctgttgtagaatagtggatataacacagtttacttgtctattcacctgttgatgagtacgtgggttgtttccagtccttggctattacaaataaaacttctgtgaacatgtatatacaagtctttgtatggacatatgctttcattacacttgagtaaatgcctaggaatgcattggctggattatatgataggtatatgtgtaactttggaagaagctgccaaatggttttccagagtacctgtaccattttacattctcaccaggagtgtataagagttctagctataccacattcttgccgacacttgatagatgtctttttaacagttctaaatagatatgtggtrgtattttattgtagttttaatttgcatgttcctaatgagtaataatgttgagcatcttttcacatacttatttgccatttgtatatatttactgaaacacctgctcaaagatttttgtccacttttaatgaggttgttttcttatcttttgagaattatttatgtattgtaggtacgaggtttttgtctgatatgtgatttgcaaatattttctctgaatttgtagcttatcttttttttttttttttttgagacagagtctcgctctgtcacccaggctggagtacagtggcacaattttggctcactgcaacctctgcttcctgggttcaagcaattctcctgcctcagtctcccaagtagctgggactacaggcatgtgccatcacgcctggctaattttttgtatttttagtagagacagggtttcaccatgttggccaggctggccttgaactcctgacctgaagtgatccacctgcctcagcctcccaaagtgctgggattataggtgtgagccactgtgcctggtgatttatctttattccagtatcatatattgatcactatagctatataataaacctcraaaccaggtagtgttcattgtattcttttcttgcaaagttgttttggtgattatatgttctttatgcttccatatgaattttagaatcaccttgtcaatttctacaatttctgcttggattttgattaagcttgccttgcatttatagatcaatatgagaagagttttaaaaaatatacttttccaactcatgaacacagcataacatctccatttatttaggtcttaatttctgtcagctgtatccaaatagtgttcagtgtgtaaggcttttccatctttcgtcagatttacctttaagtgttgtatgtatgaaaagtttatttcaccttcagttttgaaagctgttttcactgggtatagaattctagattgatcttttttttgtcttttagtagtttacaaatttactgttcctctgttgttttacttaaattgcttctgacaaaaaaatctgctgtgctcctcatttctgctcctctttatttagctcccctgctccccactggctgcttttaagactttgtgtttatcatacttatttggaccaatttgattatgatgtaacttagtgtcatttttttttcatgtatcttgtgcttggagttcattgaacttatggatttgtaggttcatagttttcatcatatttggaaagttgtgactactgtttgtgcaaatattttttcacccctctcttcttcctttagggattctgtttatatgtatattaaactgcttgaggttgtccccagctcaatgaaactctaatgtttcttgttattagtatttttctctgtttcatttttagatgttttctattgttttgtatatttcagtacttcattgctgccataacaaattaccacaaatttaatggtttaaaacaacacatctagatttattatcataaaattctgtatttcagaagcctgacataagtcttgctgagctgaaattaaggtgttggtagggctgcattccttcccaggagcttaggcaagaatctgttttcttgctttttccagcttccagaggttacctgcattccttggtttgtggcctccttcatccatcttcagtcagaaacagcatgttgatggccaggtgtggtggctcatgcctgtaatctcagcactttgggaggctgakgcaggaggatcacttgagttcaggagtttgagaccagcctgggcaacatagcgagaccctgtctctacaaaaaataaaataaaaaaagtatccaggcatggtggcatgcatctgtagttccagctgcctgtgatgggctgagatgggaggattgcttgagcccaagagttgatgttgcagtgagccacgactgcgccactgtgcactccagcctaagtgacagagggagaccctgagaccccatctcaaaaaagaaagaaacagcatgttgagtcctccgcacctcgcatctctctgatcatctcttctacttcttgttttttccacttttaagaatttatgttattagattgagctcacctggaaaatccaagataattgccccacctgaaggccagctaattarcaacattatttgcatcttcaaccattgttctcttttgccatgtaaaataacatattcacaggttctggggataggatgtagacctctttaagaagggtattattctgcataccacagtatgtcaagtttgctaatcttttttcttcagtgtctagtttgtcagtaattctatctggtgtatttttcatctcagaatttttatctctagaaattcaatttgggtctttttatattttccacgtctctacttaacacctgttagtagtaatgacatacactactgaatgtatcccccccaaaattcatatgttgaagccctaatcctcactgtgatggtatttggaggttgggccttcaagaagtaattaggtttagattaggttttgattaggtcatgagggctgggagtacccatgacggggctaatgtccttataagaagaggaaaggagaccatagctttgttctttctctgacataatgaggatatagtgagaaggtggctatctgmaagccaagaagaaagcctttaccagaaattgaacctgccattaccttgatcttggatttcccagctctggaattatgagaaataaaaatctgttgtttaagccatccagtcagggtattttgtgtggcagctggaggtaagacaacacctttaactattttttggacacatggaatacagttgtaatgactactttaatttacttttctgataatactaacatttgtgtcagctctgggttagtttcattagattgagttctcttgtcatgatgaattgtattttcctgcttctttgctggtagtttttgattgggtgccagatgctgtgaattttaccttgttgtgtgcayggtaattttatatttctaaaaatattcttgagctttgttctggtacatagttartttactttagaacagtttgattgttttagggcttattcttcagattttctaggcagaaccagagacactttaatccagggctcattatttctcactgctgaggctgtacccttctcaatactctacctaatgcctgtgaattataaggttttccagcctggttgatgggaatagacactattcttgaccttgtgggttctttctctggccttgggtagttttctaacacatataatctgatcagcactccactgaatacttgagggaaaccctttgcagatctctggagttctctgtttgtgccactcctttctctctggtactctgtctataaaaattgaattatcttggtatattctttctggaaaaattttaaactacttaagggttggtaagttaaatttttctgggaatttgtccatttgcctttgtatttcaaattagtaggcataaagctgttcataatattctcatatctttttacatctgctgaatctgttgttaggtttcctttttcattccttatatatttatgcctcttcttttatttctggaccaattctcttatccatttttaaccctgctatttctttagaaactcaaaatagtttgattactgctattgaaaatgctaaacagaagattaaatccagagtttaaatagggaggagaaatgcaatcttaacaaaatgactctgtgttaaacattaaagaggccagtacagtggctcatgcttgtaatctcagcactttaggaggatgaggcaggtggatcatccaaggtcaggagttcaagaccagcctcgccaacatggtgaaaccctgcctctattaaaaatacaaaaattagctggatgtggtggtgggtgcctgtaatttcagctacttaggaggctgaggcaggagaattgcttgaacccaggaggcggaggttgcagtgagccgagatcgtgccactgcactccagcctgggtgacagagcgagactccatctcaaaaagaaaaaataataataaataaagatacccattcttttctattcaggaggccttcaaaaattttgtgcataaaaatcacttggagtgcttatttaaaatgcagatcacaaggcatccccctctagaaagtatgtagcaataatagtcctggctatggtcctggaatttgcctttttaataagcacccaggtgattctgaagtatgtggctggaaaactacactttgagaaacatgctctaacttgtgctacagacaaaaggcttttaaaatccccctggtgcctggtccccaggctgcacctttcaacttacatctgtagctttcttatccacaattcccctcaccttcaccttaccctcaaataagccctctggatgaggcttgtactcactcatctcctgctgagacaacatttttttttttcttttgagacagagttttgctcttgtcacccaggctggggtgcagtggcgcaatcttggctcactgcaaactctgcctcccatgttcaagtgattctccagcctcagcctcccgactagctgggattataggcacgcaccatcacgctggactaatttttgtatttttagtggagacggggtttcaccatgttggccaggctggtgtctaactcctgacctcaggtgatccacccgcccttggtctcccaaagtgctgagattacaggtgtgagccaccataccctgagacaacattttgtaataatctctagaaccaatttttaaatttctagtctagtcaaatgcctgagtttagcctcagggcactgtccagattctaacacatctgttatttcctggaccagtagaaagtggaccaaatcacctgggtttttggttcagacactcactacaaatggagcaggacttgagagcagattatagaagtatatatcttttttaggagccaggcctctctagggattctcctattgtaggtaaagaggctcctcctcaggtagctgaacttccagattagattagtgtgttcgycaggtatgaagtagagaccacgaggcatctagacctttgttatgcattctggtaggccttccgtatggctcatactgcacccaatctgtatactgtctcactaaccttcttaccttactgctgttggctggtagattcccctttctgtcaagtctcaggggaatcactgcagtgctgacaactttttctagggcatcaccagtgagagcatctagggcctttcaaaaagtactgtcagatgccacgttctgttctccaaatattgtggatttcctcatatacaaatgaatattctggggcatgccaacccgttttctttatatgaatgtgaaggatctttgttcaaatgttaaaggatgttgaaggtctgattgagattcttcttcttcaaaggataggaattgttgtagtagagggataggtttgctgttgaggacgtttagtatctgaagagaggattaattggacaggtaaattttctcctaaattttgccgactaattatagaatagaatgataaggtattagccctggatgggcccttgaaagtcatttgaagcagtctcctagtaaaagatacagataagaaaactgaattccggaaagcttaggtgttttgtcagaggtcatatggctgtttggtggctgtactataaatactaaaatataattgttctgcaatttttttaaataattgagatagggtctcactctgtcacccaggctggagtgtagtagcatgatcacagctcactgcagcttcaacctcctgggctcaagcgatcctcccacctgaccctcctgagtagctgggactacaggtgtgtgccaccatgcctggctaatttaaaaaaaaaaattgtagaaatggggtctccctatgttgcccaggctggtcttgaactcctgggctgaagcgatcctcctgcatcagcctttcgaaatgctggggttacaggcatgagccaccatgcccagcctgcaatttgcatcttactaattatgagtctgataaaccaggagctgacagattaggttaccaacagccatagattaattgaaatatttactagggtatattatgtctaactaataaagctttatctttgtgtttcaggactaaaaaccgaaaactgtattgagaacctaggtaagatagctttaaagtcttatccctataataggaattttatcagttacttctcatagctatgggtcagagctaccccaccactgtactgtcgttctgtcaaacatcattttctcaaggctaaattgtgctactactgctagtaccttttcaggtggagagcctaggagcctttgctgccagtccccactgccaccctcatccccaccccaagacttgcctgtggctcttctctcagacactgcattggcctgggcatgaagggaacacgccactgtcatctgagcctgaccttataggagtttaaggactccttaattcccctacatcttcagccatttcccacttgactcctatgcaaagagctagctcctgttcctgtattttgttatcttaggaaataacatttgggagaccaatgaaggaatggcatgaatataggtcgaggaaggaggagaatgggatgacagaagggtaatgcggtagattttaacttcctcggggaaaaataagaggatgtgaccaaaaaaaaaaaaaaaatctttcttagaggactatgggaaagatttgggaaggcagacagaaaattctaagagtattaaggaacagcattatcaaagaggcctaataaatttgaattaaagataccaaaaatgcctttggattaagacatgctctgggtggatccttttgaagatttcctcattaaaaagtttaaaaacataccaaaggtatcagaagagagagaaaraaagttcaaaagcaaggttctgtttctagctgtttttctggctagctttcctgtgaatttttttttcatgtaacttaaatgaatccacatccagaggctgaggcgggtggattgcttaaggtcaggagtttgaggccagcctgggcaacatgtgaaactggctctactaaaaatacaaaaattagccaggtgtggtggcaggcgcctgtaatcctagctacttgggcggctgaagcaagagaattgcttgaaacccgggaggcagaggttgcagtgagccgggatcgtgccactgcactccagcctgggcgacaaagcaagactcttgtctcaaaaaaataaaagtgaattcacatccatttgtctttgaattgaaattttatatctsttatagtaactgtatttttatgtttcttaaatataagccaacacaatctttatttttaatgaacatttaaaaatagactgatcctgacattcacatctgagcatagtaccatgtaatgaaaacatgtctgtatttcagaatattttcaacccatctatgtctacaaccctggtgagtatgttctaatttttaaaaataatcttggttgggcatggtggctcacgcctgtaatcccagcgctttggaaggccgaggtgagtggatcacttgagcccaggagtttgagaccagcctgggcaacatggcggaaccccatctctacaaaaaatacaaaacttagccaggcatggtggtgtgcacctgtagtcccagctacttgggaggctgaggcaggaggatcacttgagtctgggaggcagaggttgcagtgagccaagattgcacccactgcactccagcctgggtgacagggtgaaactctgtctccaaagttaataataataatccttacctggatgtttaatagctctttcttgtttagcaaatgtatttcttagctgaagaaaatttgcagatataaagcagtgacttggcctatatgagaggaaaaaaataaagaacctattctagggaaatataccttcctcaaataagagaattggcttcgtggagatctgaacaatatggaaattttccggggaatacgggtggtgagaatgaagagctagagtcattcttgaccagttatgagggcttcttaggtatagctctgtattcagtcattgaaatgaacctgtgtgactccaaatactcagacaaaaatacaaaactcagcatgtttgcatctctcaaatatgcagatgcttgatgtttactatgatttaactaaaatatgtaggtgattagatgctcttaaagtttccactgaaggatatatggcccaaatcatttctttgcacataagttccttatcatgtgtttggctcatgtggctacaataaatttttctttgttgaaaagagaagaggttccagcctttttaaaacatgcaatttatttcatgtttgggaaaatacttcctgtcctgatagaagtgaagcactttataccttgaagacttgcttagcagcccttctttttattgttccgttgcagtcacaggttctactgatcacttcccagggactttagctgactcttcaacaaagacattttctcggctccttgagatccctggtagacaagctatttgtaatgacttttcttaatagtaggggcagagaatgttccagctcattagccaaggtacatttagactctgaccgacaacttaagtttagtagggtagtttcctggacgtatcaaatggttctttatagtcatatttcctgaaaataattttgctgtagcaatagtaactgccagttcttttgttccattgttaaaactgatgaacttcttttytgtgactcaggtgagaaaaaccagaagcttgaagaccatagtaagacatttttataaattctgggggcttggccaggcgtggtggcttatgcctgtaatcccagcactttgggaggccgaggmgggaggatcatgaggtcaggagattgagaccatcctggccaacatagtaaaaccccatctttactaaaaatacaaaaattagctgggcgtggtggcacatgcctgtagtcccagctactcgggaggctgaggcaggagaatcccttgaaccagggagctggaggttgcagtgagcygagatcgtgccacagcactgtagcctggaaacagagcgaggctccgtctcaaaaaaaaaaaaaaaaaaattctgggggcttgcattttgcaagatacctccctttacaggtgggaatattttcatatttcttgcaaataattttgctgtagctgtagtaactgccaattcttttgttccttcgttaaaactgatgagcttctttttgtgactcaggtgagaaaaactggaagcttgaagaccatggtaagacattttttataaattctgggggcttacattttacaagatacctccctttacaggtgggaatattttcatatttactgaaaataattttgctgtagctatagtaactgccaattcttttgttccattgttaaaactgataagcttctttttgtaactcaggtgagaaaaaccagaagcttgaagaccatggtaagacatttatgtaaattctgggggcttacattttgcaatatatctccctttacatgtgggaacagggaagaatgtcgtggtaagaaaagtgggaggaaggcagagctcaccttagcttactggtttggtatattagagactctcctgggtttcaggtagaattctttagaaaaatgacatagcagctctgtttctcctgtctaacaatctttaggtcatcccaccaaatagaggaaggtgtgactaattattccccacattcttgtgacctctaggatattgggcagggcataacaaatattgttttttctaaattaaaatgactattctttgtatttatttctgtcaccagcaatctgattaatatatgccattagctatatccatttgattatttagtacattccaagtgtaacttatcctcaagtatttgtttttgttttatttttaatattactcaaatggccgggcggggtggctcacgcctataatcccagcactttgggaggccaaagtgggcggatcacgagatcagcctggccaacatagtgaaaccccatctccactaaaaatacaaaaattagccgggcatggtggcacacgcctgtagtctcagctactcaggaggctgagtcaggagaatcacttgaacctgggaggtggaggttgcagtgagccgagatcgcgccactgcactctagcctgggtgacagagtgagactccatcttggaaaaaaaaaattactcagatgtcctcaaggataccgggacaggaacagtctcataaattactggcgagattataaattggaacttttttggagagcaatttagtagtatgtattactagtcttaaaaatgtttgtaccttttgactcggttataacacttttggatatttgtcccaaggaaattagagatgaacacaaagatttgtgtacaaaaatgcctatcacagtgttatggtagtgtcaaaagacaaaattacaacaaatttaaagagatcaattggctttatttgagattctagaattgggcaacactttattccatagaataagcgttcattgagctgagcacagaagtttggctttaaagacagagaagagccaaagaaagtggaagcaaagaacagagtatattaattacttttagacagaacagtagaaaaataactgattagttaacatcagtttatttcaggctaccttttttgtgtgtaaggattgaagcatcgggaacttcatttatcaagctgattgaagattttaaaatggccaatttgggaaattctgttatttctttctcctgatttcttagaagttcagacaacttagtttagatgatgtggaactttagcatgggtgactccatttcgatttttagtctggtctgttggggccttctgcagaaacttagtctgaagcaatggcctcctataatttttatttgacagtagcaaaaatttagaaacaacctgtgtccaaccattgggtattgttaaataaaatattatctatattatgaaacactaagcaacttaaaaatcatgttttcaaaaccatctaaagatagaagaaagtactcttaatacaatggtaaataattggatataaaactgcatatagagtataatattaacttttaaaaatgtatatgtatatatatgtatgcatagcaaaatgattgaaatacaccagaaatgttaagaatgagtagagtatttccgagatctgcagttttaagagaactttaatttttaataattttctgtatttttccaaattatctataacgtattatatagttaggaagcatattttatatattacatataatgccaattttgggtcgaggtctttgggttgaatttttaaaaaacgaacaagaggtgcttaacctaggagagattctgggtcactagccttagttcttatcatcagttaggctccagtgggttaaatctcttctttttgttaccttgtcctctgccatttctcaaagcgttctgagttttctactacagaagtcaagtataaggtcaaattaattttcaagctgattgcatttttttactaaatagttcttattctcgtccttaggaataaaaagccagaggctcactgtttcacctgggaaataatctatttactgagactagctacatggttaggagacgataaggattcctaggattaagaacattgtgaaaagccagcacagtggctcacacctataatcccagctctttgggaggcgtaggcaggagaatcatagtgagttatgatcgtgtcattgtaccccaccacagcctgagcgactcagcgagaccctgtctctcaaaaaagaaaaaaaaatrttactgagcctggagagtttgaggaatgagttagacaagaacaaagggacttcatttattgagtaccttttttcgctccgtgcagtgtaccaagcacttttatgcagtctttccttcaatcttcactaactacaaacctaagaggtaaatatttctcttgcaaagtgagaaactaaagttaggagggattaagtagtctgcccaaagtcacagagctaataactataattacgatagagctaaaccaagcagaaatgtaaaaccagtagtgtttcatccaaaaactgatatattgggactgccttctgaagataaagctggagagacgggttagatcgtggaagttcttgaagtccaggctaaggagtttggactctgtcacatggagaatgaagagccattgaaaggtgtttttgttgttgctgtttcttttttctttccccctgcctttttttttttttgaaagttggaaatggaggaaatatagacaaaagaagagtattaacagtataagataactgattaatacaaaccaatatttatttctgcctttaggtgtgaaaatccttgaacccacccaaatacctggtaagacagctttytatttactccctgagcccaagaatgagttgagcaggattcccaggcatttaagagaatactgtcatgagactattattcatgaatatttcccttatagctacctgccagtcatctacaaatatttagctggggaagygtagagaagtctctttcctcctgtgcattcatgtgctcctggagcattgtctctggggcaggaaagttagttctgctctggatgttgctgagggaaaggctcctgggatctggatgcatcagtccaacaccttccaggttctacagctaaagttattcaatagaaacctacctttacgcacaagttgactgttagtcttggctaacatctcattgcctgtatctccaggtaacaaaacacgatattctcctggcataaacatgctcagtgaagtgctatggcagaagactcctctaatcatggtgtggatttgtataataagggtttacgtaagcagaacttttaaataaaaagccagaaactatagtgcattggggccttgggtgcttgcatctcttaagctcagcagacaagagtttgaaaattatactcagtggagcaaactgtaagtcattggaaacttccttctcatttaggaatgaaaattccagaaccttttccactacctggtaagcaactgataggcatgccagaggggaacatgccagtttggggagtacagtcacyattagatatgcatgggactttctatgcctcataattgtcatctatcaaatgtagccatcagtagtcacatgtacatgacaggaatatttgtaaggactataaaaccatggaatctcagggtgcaagccactgtccaatgcataaatccctttctcctgagttcatgtagtactttgaaatatttttttgcaggttttgttattatggaaatgatgatctgttaaggaaattagatatttggcatcttaaaaactatatccagccacacagtgctgaacttcacgtaacgctgctgtcaatggaagctgcgtgctgtataaagaaacagcgttttccattagttaaataaaggctcagagaacataggctcagagaaaagggtccaggacctcttttatattgacccaaatttgcactgttggatttatttggccacaactttgaagtgaacctctagtgacactgatgacacaccttgtgcgtctacatctcttcagctcgctagtcctgagtttgcacagtgccatcattggggtcttgctcatctggctatctgaaaggcagccaccgagcatggtgggagatgaacatgagctgtgtagacagatagacctggcttcaggaagtctctgccactttcctctgagtagctttatataagttacttcactttctacgcccctgctttcacatctgtaaaatgaggaaagcttctgtcttgcaggactgatgagataaagtacctagcaaagtacctagcaaaatgaatggtggtaacatagtagtaaatggtagctgcctttgttattatctgaaaacctctttcttgtttaggaataaaaatgatacaactgaatgaaaaacctggtaatatattctttattgggggtggaggcaccatggattctaagtcctttaccataatcattcagttagttcagtcttatggggtctggggaagacatctgggctgtacactttccgatatcccagtctgcaagccagacagggaaagtgttgagaatttctttcagtgtgagcagcaggctgctattacggttctctgggccaaacatcaaaaaaggcacttgatcttaaactggaacagttggcttccagctgggcctgtctattccagaatgaggcaggcttctcagggtgaaggaatctgtagacatagaaatagcatcatccaagaactgtgaatgaggactgtgcagcatgccaatactgggaccagccattctgtgtgctcctcaccacactctayaatcgtccartaggccactagattttgttgggactacagtgtattgtgccctctcctggaaagctatgtgtagctttttaaaaggtgatgtgaaaacagtacacaggagctcatttaatccaatamrataaatattattracacttcagagatgagaacatggaacataagaaggctaacaaatttataataggctagagacaaccaggactcaaacttttcaagctttgttcactttgtgctacacttgtcttccaaacagatttagttatccacttctatcctgggcacctagaattggtatttggcttcaaagctgttaaaatatggtaatatcataatatttctatgctaggcacacacttggtagtacagatggtctccaagttacaatggtcagtctgtaagaaacacgaaaaggtggcttgccagttaggacagatttattttagagaaaacaaacttgagaggcgccttctggccgagttaggttagaagcccacttttttacagactaagagtttttaaggatttagggtgggagagtttatcagaggcttggactgcttctgtgtctctttgttgtgcttatctgggagagagcgttgtgtgtctgttcccatacatcattctgcagctgcaggcatattccccaagtctgcttttagcttccctaacttagtgcacctgaagagaaaggaatgtgcttattaaggcccactgttttactggggcccactgtatgagggcgaagtttgggagttactcaagagactttccccccacctccctttgtgcccgagctgttttatctgtgttttactgtttgctccttctggctgcttgtagttagaagaggtgatttccttgaaatgcatgaggctagaaagggagctcgaatttaaagtggtggtgtttgtccaagatgacggtgctcctgctctatcaggttcaacttgggattttttgattttgcaatggtctgaaagccatacacattcagtaaaaaccatacttcaagtacccataccrttctctttttcactttctgtacaatattcaatagattacatgagacattcaatattttattataaaataagctttatcttagctgatttcgcccaactgcaggctcatgtaagtgttctgagcacgtttaaggtaggctaggttaagccatgatgttctgtaggttgggtgagttaaatgcatttttgacttatggtattttcagcttacattggatttattgagacacaaccccatcataagtcgagaagcatctgtatagcatagtaattcagagcaaatttgaaattagatatttctagcaccarttacmcccgtgattttatgcatggcattcctcaaaacatttcataaatgttttaaggaatatctgtgaaatatggataattatacctggctaataagactaagaagtaaaggtgacagtgtacrtaaagcatttgcacaatgcatggcacatagtgaacactcaatagtaggtattaatgtacttgggaatctaagttcaatatgtagaaaatactttttgtgaataaaattttaacttttatttttatgtaaacacatattgatgggaaaaaaaattcaaagagcacagatgagaacaaattaaacccttcccctaaccccacacatacccrtaaacctattaccctgcccctcagacccactcacagagataaccaagtttgcttaatttttaatcagatctttcttttctggataaacagatatacaatataactaactcaaaatctctttatattttagaagataaaagtcaaggaaatatcaacaatcctagtaagaagtatctcatttcctcagttgataaatgcctgcttctgtaatatagaaaaagtgagaaatttatttttcctcaataaagggaacaaagttgcaaggttttaaggcatcttaataacagagtataatgtcatatccaaaagcttgtgtgtgcatgtgtgtgttggggacaatatagctttgttttttcgataatcgttttccattgtatctagagtttctactcttagaacagtggttcttaccagtctgaagactgggagcaaaatataaaaataaaaaagaaaatatatattaaaaaaaaaaagaacagtggttctcaacccaattctccctttataacaagtattttataaagtccttatattatccagaaagaagatccatagatgagatgcatttgtacccataaaaatcaacatcatgtctaaagtagaccgatgtttacatttatgcaaataaayttgggttgaagagaagattggaagctattctatacaggaagtataagaaaatggagtgaagaaatagagtagatactaaataaaaactgatgtttaatgttthtcaaaactattaaaaatatacataaaactgctttaggttctgagtttgattattttaaataggttttaacttacatgtatgtctagcagtacatttgaaagttgtgcaggaagttggtcaatttttcatggtccagaactagagcactgcaggatatctatccctctacctccactccactgttagcaatgattaaaaaaaaaaaacaaaaaactcttgacaatcgtccaaactgcctcttggggcagtaatgcccccctgagaaccactggtctgtggtaacatacagtcatgcattgcttaacgatggggatatgttctgattaatgtgttaagtgattttgtcgttgtgcaaacatcatagtgtgtacttacccaaccctagatggtataccctgctacacatgtaggctacatggtatagcctactgctcctaggctataaacctttacagcatgttattttgttgagtactgtaggcagcggtaacacaatggtaagtatttgtgtatctaaacatagaaaagttatggtaaaaatataaaagataaaaaatggtacaggtgtatagggcacttaacatgaatggagcttgtaggcccagaagttgctctgggtggtgttgagcggatgtgaaggcctgggacactactgtacactcctgtagactttatacatactatacagaggctacactaaattcataacaaattttccttcttcaatagtaaattaaccgtagcttaatgtaactgttttactttataaacttaattttaatctgactcttttgtaataacacttagcttaaaacacacattgtacagtagtacaaaaatattttttctttatatcctattctataaagcttttttatcaccttttttttaactttttaaacttttgttaacaactaagacacaaacatttacattagcctaggcctatacagggtcaggatcatcaatatcactgtcttgcacctccacatcttgttccactggaaggtcttcaggggtagtaacgtgcatggaactgtcacctcctatgataatgccttctggagtagctcctgaaggacctgcctcaggctgttttatagttaacgttttttaataagttgaaggagtacagtctaaaataatgattaaaagtatagtaagtacataaaacagtaacatagttgtttattatcaaatgttatgtattatatataattgtatgtgctatacagttatacaactggcagtgcagtaggtttatttacaccatcatcaccccaaacacgtaatatgttacaacggcaacgatgttgctaggcagtaggaaattttcagctctattataawtatartcttatgggatctctgtcatacatgtggtctgtcattgatggaaacatcattatgcrttgcacgactgtactaatgcatgtgtgcrtctgcctatccayttctctgtgtgtatacatcyaactgcatgtttataactatggcaagtacaytgataatatgaaggcttttacaaatctgactggctatttttcttggttttatttatgaaatctgagtggtgatcccatttggatacttccagtcaacgcttccccgtagttcaaacaaaaagagtttaggtcagcatgaaacagtttatcctgtggatggactccactgctcctctccactagttcaaatgaaagggaaagagtttctccagcagtgtatgtatggagggaaaaacatttatttttttttatcatcttgcagagattagtgtttaaaaaacaatgcagctatagttagccctctgtatcctctgggattcaaccaactrtggatcraaaatatttgygggaaaaaataatacaaatttaaaaacccatacagtacaacaactacttgcatwtcatttacattgtattaggtattataagaaatctagagatagtataaggtatacaggaggatgtgtgtaggtatatgcaaatactgtgtatgctattttatttatttatgtatgctattttatataagggacttgagcatctgtggattttggtatcctcaggggttctagaaccagtccccaaaggatactgagggatgactgtatatccagttgtatgttggtggttatcttgtttgaaayagaagacacacagagttaaactttaccttgcatgtatatacagaaaatggaaatagaaaaattgctaaaaaaaatgctagagaacttgaacaacagaaaatcattatattggctatatagaaatgtaaaakcatgtgaaatcctacataaaacctagcgtagcagatcttgatgatatatagtcgacccttgaacaacacaggtttgaactgcatgggtccacttatacatggattttttttaaataaatatattggaaatmtttttggatatttgcatcaatttgaagaaacttgcagacaaactgcatgacctagaaatatatatatatataaaaagaaagtatgtcaygaatgcataaaatatatgtagatgctagtctatttttatcatttactaccataaaacatacacaaatctattgtaaaacgttagtatttatccaaatttgtgcacacagaccatatgtggcaccattcaaaatcaaaagaaacgtaaatgtaaagatgcggtattaaaacttaactgcataaaattaactataatacatactgtatcattgtaatcatttcatggccacctcctgttgctattgcagtgagttcaaatgtttcgmgtatcctcttaaaacaccatgtgttgctaaacatctctgaggagttcatctccagtaaattgcacatcacagcaaaaagtgatctctcacagttctcctgtattttttgtcatgtttggtgcaataccaaaaaccttgaataacaccataggactcaaaggaagtgccactagtgaggccggaagtctcacaagcagagagaagccatgacattacaagaaaaagttgaattgcttgatatatagattcaggtctgcagctgcagttgccagccatttcagacagataattcatcttataaacagatgatgtaaactttgggtattagtaaatacagtacagtactgtaaatgtgttttctcttccttatgattttaatattttttctctattttattgtaaaaatacagtttatttatttatttatttatttgagctggagtcttgctctatcacccaggatggagtgcagtggtgcaatctctgctcactgcaagctctgcctcccaggttcacaccattctcctgcctcagcctcctgagtagcggggactacaggcgcccgccaccacgcccggctaattctgtatatttagtagagacggggttttgccgtgttagccaggatggtctcgatctcctgacctcatgatgtgcctgcctccgcctcccacagtgctgggattacaggcgtgagccaccacgcccagccaaaatacagtatataatacatttacaaaatatgtgctaatcaattatttttatctttttaaaaatagagatggggtctcgctatgttgcccaggctcaaactcctggtctcaagtggtcctcctgccttggcctcctaaaatgctggaattacaggtgtgagccaccatgccccaaccagaatacagtatataatacatataacatataaaatatgttaatcaacaatttctattatcagtaaggcttccagttaatggtaggctattagtagttaagtttttgggaatcaggttacatgtaggttttcattgtgtgggggttggcaccccaacacccgtattaagggtcaactgtatatggaaatatagcctgaaatctgtaatgaattacacttatttgaaaattgcttttggctggaagtatttcaggtaagtttctacttcaactttagtgtcattgtttacatattcaggatatattttataggtggatgatacttgacataaaaaatgatgtgtcagtgactgtgtattcttgttaacagctccaggtccagttcctgttccaggtcccaaaagccatccttctgcatcctygggcaaactgctgcttccacagtttgggatggtcatcattttaatcagtgtttctgctataaatctctttgttgctctgtagtttgatgcattgtttatctttcttattctttacttgaaataactatagrgatmcacaggagatcaaaaggaatgatgtattttttacgtgttggccaaagtcactggataaaatgagaattgtatatttgttattcattttgcaaattcagaaagttggtccagatatatgtcacagaacttttcacttgtatactactcttacaatggaaaaaaatcccgaaaactgtatacttctgattaaattcaataaaagattttgattagatatttcagaattgccagtatgctcaatactgttagtgtttaacatcaatttaatatctgaattagaactttaaggatagtctactcatctctttgtcttagtctgtttgggttgctgtaacagaccactgtagactaggtaacttgtaagcaacatttatttatttctcacagttccagaggctgggaagtccaagatcaaggtgccagcagacttagtttctggtgagtgtcctcttccttgtcctttcctcaccatctcacatggcagaagggacaagagagatagagcactaatcccattcatgaaggctccaccctcatcatgacctcccaaaagccatacctcctaaaatcaccatattgagtgttaggatttcaagatgaattttttgagaacacaaactactcagtctataacacttgcttcgataactgagtctagttatctcaccagttatatgctcaaggaccacaggcctgccttatatatgcagtcaccagtgggacagaaacccaacaggatgactgggcctgcctttttaaaaggctgaccttaggccctgtctggtatatttatctggttgaactagcaaccagcaatattagaacatgaaaaatcaaaggctagagaagcgaccatggtatgcatgatcagtgatccatccactagattatatagctcagtgagtaacaattctcatcaattagaccaacaactcttcctactataagggggtgtgcagagggacaaaaactcctatacttggctacatgggtaagaatgatggacatgcagatcttctgggccacggagaaaatgtggacaaggcaagaaattcctgtcccaacactgttggtattgcaatataatgggtaggaaagaatgatgagagggtagtagagtagtgtaacaaatttacacaccataaacttggcaaaagtagctgcatacttctggcagtcaatttggaaagaaacaatcagttttaaagttcctagtcttggccaggcatggaggttcaggcctgtaatcctagcactttggcaggccaaggtaggaggattgctggagtctaggagttcaagaccagcctgggcaacataacaagaccccatctctacacaaaataaaaaataatagccagttgtggtggtgcatgcctgtagtcccagctactcaagagtctgaggtgggaggactgcttaaacccaggaggtcaaggctgcagtgagtcgtgattgtgccactgtaccccagcctgggtgacagagagacttgtctcaaaaaaaaaaaaaaaaaaaaaaacccacaaaaaatcctagtctacacaactgtaacctatacaactgaggagaaatctcttcagtggattctcagaggatggactccagatagatatacagtgcatcacactcttcaccatccccatagtaaatacaatagcaagattcatgggcctgtttcttctaacacctgtcaatacaagccaaagcatcacagagaagtgcaaagttaaagcatctcaaaagcggccaacatgatgcagcccaaatatagtgtagtcagaaatactgtttaaaatgatccactggttaaagacccactatttaacactacttaatctgtttaactcagattttctagtatttcgaatactaatgacatattagggaattcttaatactagatgatatctgaagtaagttttacttgccataccctaatcaaaatataacagcactgacaaaaatccctaggaggcaaaaataagacttaagactaaaattcctgacttgtgattatgaatttagtacctatgtggacaaaaaatggtcattcctcaaaagccaaataaagcaccagacagaattatataaaagtaattacaaattaagaatttatttataagttttcatctttttagaaataaaaaggcttaaaaaacaaaatggttgcaaaaatggttaagtarttttgttatatcctaattgcttaggtgtgctctgtaaattccaaataagtaaaataatataaaaatacattttcatatctttatagaacaaaaacaaaacattaaatgcttttggattttctttactcctcccacagatgagttcacaaatacaaaaactggtgtacatttatactcaagtacaaatctccaacagccaagtaattatagtttcttctgttatgtgcaaagtagattatttcatatttacttggtatggaaagcagagtacaggctcaatggacaataatcattaaacacagattatgtttaagaaaatgctgttgtaaaaatgtacaatagtacatacaattttggtaattatgcacttcttttaaagtaaatacagcttttagatataaatctttcaaaggttttctttgaagagctgtgaggtgactatttcagatttgatgaacagtaatttgtcagtaaacttctcaaaaaaccaatccaagaaagaattgttttctttttccctccatgtggtcggtttcattcttaaggaaggtctgatgcagtaagaagatgcatttcacaaacctttacacaagtttgtgaactgtcaactaaagacaccacctctgatgtggatggtttcattcaatccatgttcgaccagctttatatcttctagatcgtctttaatgatgctaatcaaatggctaaggccttcctgttgttgtttcaaatgctagaacaaattaagaaacaacatattaatgtattaatttcttaaaactgcaagctagtcacaggaaaaaagactccactttgactattttactagcaacacagtacctagtaagtgctctaaatatagagggcatgcatatttaaacatttgtactacatcttttgctaacagtgaaagacaaactctaaagaacaataaaatcaaacaaatatataatgaacaatatcttccaacaaaaatgttttttagatagctattccttttaccaacttttgataaaggcatgataataaaacagaactcaaaggaggtattcaaatatagatgactagcaaaataacattctgaaaactgagaataktcatgttttgaagtacaaagtacatagtgataatggtggtgatgactacagatgctaacatttttttaagactcctcctcatgggttaaggtgctgttttaacagtactggtattcactcacttaactcatttaaaatccttttgagccccctttggggtaccattatcatctcgacagttaaagaaactacaggtaaataacctgcccaaggtcataaagtagatggtgaaccatgattcaatcccaaaacaatacactgctcataattttaaaaaagacaggtgtttaaattattcccagttttattgcatatatcaactctatttaatacaactatttatttcaatatactggaacctgttaatttattgcaaatacttaaaacaatggaatataattggttatgtgtgtaatatccaagaacctggaagccaaagtagtttttggttgcataaaaccagccatatccattctaacataataaaattggatttgttgatgacatttataatctttatctaaaatcctcagggccatgccaacagtcattagctacctagtatgttccacaaagttcatcatcttcatatattttctttagatacaactgttcattttcattaaaccaatctgcatttatactaatgaaaataagccaaagcagtgtttcccaactttttcacacaatgtgaaaaccctagaaaagtggttggaggttctggccacctcaacctacctccatccagatctcctgagagcttaggggacagatcaataaccaaatgtttataacttacatgcgacatataggcagggaaggtattatctagagcagttgcttctcaaactttaaagtgcatacaaatcattctatgatcttgataaaatgcagattgagtacgtctggagtaaggactgaaattttgcatttctaatgaccttccaggtgcggctactacctacactttaaggagcaaggtctaggaaactttagtgtctctactacctctaaattcatctttttggcgaggagagggataattcacttttttaaacagtggcaaaacaggcataccataaaattttgcctgtaactatttttaagtatacagttcagtggcattaggtacatttatgctgttgtgcaataatcaacactatccactttgtttagaacttttcatcttctcaagttgaaattctgtaccagttaagttcctcccatcccctcctcccctcacaccctggcaaccacctttctactctctattaattggactactaggtacttttcataagtgaaatcataaatatttcccttttatgagtggcttatttcatgaagcataacttcttcaaggtcaaattgcattgtagcatgtgtcagaatttcattcttttttcaaggctgaataatattccattgtgtgtatatatactacattttgtttctctattctttgattgattcttgggttatctccacattttgactattgtgaataaagatgctatgaacatgggtgtacaaatatgttttgagtccctgcttccaacgtacttgggtatatatccagaagtagacctgctagatcatatcgtaattctatctttaattttttgagtaaacactacactgttttccatagaggctgaaccattttacattcccccaacagtgcaagaaagttccaatttctccacattctcactaacacttttcttattaggataatagccatcctaataggtgtgaagtggtgagctcacactttaaataatgcagcctcatgcaacacttacctgcttgatttctcgtaacagatctgcatctatgtaatacctttcttcagatctgactgctccaaaatgattctgcatcctgatttgagacatcaattcatttagtcggccctaaaagttaagactgagtcaaattacaactgccgacgaagacttgtaaaagacaatgttttcttctgaaaggatggtttcaaaaccatctattaaaaatttctatttctctctctgtacattatattcgaaacactaatactagccaaaagaaccatgactgagtttactttagaaaggaagttctaattggagataagaaacacaagtatacaaaattcctgcttgaagattacataactttttgtctgcagatccacctgaaacaaattttagaattatggtcttagaagtggttaccttgaactgagtaggtgcatttagttcaccctgaatcgtatccagctgaactcgcaactgctcttcatcagcctgaatggcataaccactcttcctttgaatttcctgtttgattaggacctatacaaataaaaaccaccaataacaacagaatcatctctttttagttatgcaagtagtagtagtacaattagttactgaaagaaatcagctgaaaatcaaacaacagtagggttcaacagttcaggatttgaattatgtttctgtccattttaactaggcaaaagttatcacataaatacaatgatatagacttaattgttttttttgagacagggtcttgctctgtctcccaggctgaagtgcagtggcgtaaacacagctcactccttgacctctgtggctcaagtgatcctcctgcctcagctcctgagtagctgggaccacaggtgtgcaccaccgcacctggttacattttttaatttttttgtggcggggtggggggggtgtctcactatgtggcccaggctggtcttgaactcctgggcttaattaagtgatcctccagccttggcctcccagagtgctgggtttacaggtgtgagccactttgccaagccaacaattttaaaactatggtatggcttggccgggcgcggtggctcacacctgtaatcccagcactttgggaggacaaggcgggtggatcaagaggtcaggagatt

SEQ ID NO: 93414 - DNA, 27889 bp, Homo sapiens
cacctcagcctcccaaagtgctaggattacaggtgtgagccaccgcaccttgccagcaacttacctttgacaagggtgctaagaaaacaatggggaaaggacagcctccttaataaatggtgctgggaagactggatattctcatgcaaaagaatgaaactgaacccttatccaccacacaaaaagtaacacagaataaagacttagatgtaagacctaatataaatctcctagaagaaagcatagggaaaagccgtttgacattggtcttgtaaatgatttttggatatgacaccaaaaacacaggcaacaaaatgaaaaaaaaagtgggactacatcaaactaaaaagcttcttcacatcaaaggaagcagttaacaaaatgaaatggcaacctacagaatgggagaaaatatttgcaaaccgtatgtctgataaaggcttaatatccaaaatatataagaaactgtcttagcccctctgggctgctataaggtgtctaagatgccaccagatttggtgtctggtaagggcttgcgtccttacagatggctgtcttctcactgtaaactcacatggcagcagggcaagggatctctggggtctcttttataagggcactactacaacttatgaccgcttcatcttcataacctcaacactccccaaaggcccacctcctagtaacatcactttggcagcttagatttcaacatatgaatttgggggagacataaacattcagttcattgtagaactcgtacaattcaatagcaaaacaaactaaaagcagccaaatagcccaggtgagaaatgggcaaaggatgtgaacattttcccagagaagacatgcaaatggtacaaatggccaacaggtatatgaaaaggtgctcagcatcattaatcattagggaaatgcaaatcaaagccatagtgagacattacttcacacctatttagatggctatgatagaataggtgaaagatgacaagtgttggggagggtgtggagaaaaggaagcccttgtatactgttggtgggaatgytaattagtacaaccattatggaaaacaatatggaggttcctaaaaaaattaaaaatagaactacaatatgatccggcaatcccaatactgggtattatatccacaggaaatgaaatcagtatgctgaaaagatactctgtgcttccatgtttattgcagcatattcatagtaaccaagatatggaaaccacctaagtgtctgacaatggctatttttattagcactcattttcttgattttcatagaaaattatttctttgcagactcagattttatcagttcatgcaattcaattaaattatatacgtatgaggcatacaatggaaatgaagtttgggaacaaacataactgactcttggggagtattccactcagctagtggaagcagatgtggaggagtaaactaaagtgaaggctactagctatgagtcttcagtattttatgagaatcagttggcatatttcagaaagggaatcaagaatattaagtagatggttagaaaaactactgtatgcacatatgtattttctggggacagagtccatagatgtcatttaatttttggagggatctatgatcactaaaatgttaagtactgttaacttaaaaattatacaatttataaatttaagaaaggagagaagaatttatttcttataaagtgttgcagcctgcaaggtgaccaacccacaggctgggaagtgtgcctccagccgagaccagagataggcactttgaagaaggaggggctggagtaggagctttatgctgaacaggttggctaaacatgcatgttttacaggaggagctatgaatattcatgaagctgatcctgacatgcatattgaacaaacatgcatgtaacatatgaccatgttcactttaggatggagagttaacatttaaatatattacaattaggccctatatgtcaaaatgttttttcaggacatgaaggcatatagatgtgcaacttctgtaaactgatcagaaccagcccatgggtcagtggtattcttatcaggagaaagttattaaaaccagtctttatccaatgaaagccgtagttgtggcttgtggaatagggggtcagttagcgtctggtggagctgcaaattgttttaatattgcttatctgaaggccagtgtttgtttagctgctagagaaaaagaaaaatcttgtgacagttagaacatagtttattctttacgtgtagggtacatgacttaaccctcgcctggcacgaccttaggtcctatttataatttggtattgtatcgccacaaagaatctgttctgccagttttatgatttctgttttaacatcaatgccggtcagtcgtgtctaaaaagggagggggtataatgaggcctgtctgacctcatctcatcatggctgggaactaagtttttaaggcttttctggaatccctttggccaagaggtggtctgttcagtctgctggggggtttaagattttatttgtagtttaaagtatcatactataaattaaaatagaatccatggggccaggttaaggaataaagactttctcttcctgtaatctacttttggacacttgtgcatccacctttttcatgaagattctcttctccctaaaaaataaattcatgcaaacagatgcttgtgagccagtggcccaacgagttcatcagaaacattcactctaaatagcttggtgcctagtgttcttagtacagtccagtgtgatgtaatgaagagaggttgatacattactgatgcattcagtgacaacatttcattaagaaggctgttctgttttacacatctgaaaaccagttagaaagtgacatgatttggatgtttcctcccctccaaatcacgtggtgaaatgcgacctccaatgttggaggtggactgagtgggaggtgtttgggtgttgggggcagatccctcatgaatgtcctggtgctgtcctcacagtaaagtgagttctcactctatgagttcacatgagatctggctgtttaaaagagcctgagtttaaaagagagagcctcctccctctctcttgctccctctcttcatgcgataggcctgctccccctttgccttccaccaggattgtaagcttcctgaggtcctctcaccagaaccagataccagcaccacacttcctgtacagcctgcaaaactgtgagccaaaataaacctcttttctttgtaaattacccagtatcaggtattcctttatagcaatgcaaacggacgaatgcagaaagaaagggtcttcatttcctaacttcagaaactacagtctttgtagtttcctttgtagtacctttgtaaagacaaaggtctttaaacagtttagtgcttagtgttctcattaaagtataatgttatataatgaacgtgggctgataaattattgatgcattgaaaggcaacatttcattgaaaaaaattcaaactcaatctcagtttagaatcttccaagtgaatgaggacttctaactctgttcaggtcaaatgtagccctctcagagaaactgactgaccatgctgtctgaagttaacagcttccgttaattttgattctcttaccccattttctttttcttcatagcactgtccgacattgtattatatatctatttatttattatcagttttctgtctccttactagtgtgtaagcttcattagagcagactttgttttgattatcagtatatctcctgtgcatatgacagtgcctgacacttatcaccattacataatgatttattgagtaaataaattgagtaatttaatgattaaatggtttgtttccatgttcatgttccatccagacacataggcaggtattgtggcttatctctgaattccttggtactggctggttggtaccatagacccttgcaaacaatgaataaataaattaccctgatccatcagtgtgcctggatagaaaagacatgtaggaatgctgcaccccaggatgtgctattaatacacttatacaccacggaatactatgcagccataaaaaaaagaatgagttcatgtcttttgcagggacatggatgaagccggaagccatcattctcagcaaaataacacagaacaaaaaaccaaacaccacatattctcattgagtatgtgggagttgttcaactgtgggagttgaacaatgagaacacatggacacagggagggaaacatcacacaccggggcctgtcagggggtggagggcaaggggagggagaacattaggacaaataactaatgcatgcagggcttaaaacctagatgacgggttggaaggtgcagcaagccaccatggcacatgtatacctatgtaacaaacctgcacgttctgcacatgtatcccagaacttaaataataattaaaaaatacacttaaatttatttttaaacaagattgttctcttgaggttaacttattactactttgagttgtcaggagtgattgcaaatttcttgggaatccctaagtcaccaagaataaagaccacttgtaatagctaaggcatattcaacaataaaattctagagattcaggatatttgatgtttgcttataacatttcacttttgagcttttattcgtttaataaatgttttatcatctatgctcaataacattttaaagtgtccattcaaatcatttcattgggcaaaacaatgttccttccctaatttccctcatcagaatagccattttgtctctgtgctcagcctataccaccaattactgtttatttcctgtccttgtaataagcaacatagttatttatacatgcccatttctcccacagcacataagctttttaaggttgggaaccatgtctttgtcattattgtaacatctctttccattcccggtgttcagtacgatgtgttaaacgaagtagacactcaaaactttttaaaatttatttttatttatataatgagtcttttttaaaaaaaccacctacactattttaaattcatttgaactttgtccagtatcctatgtacatttgaagtttaactaccggaaaagtcttttgaaggcagatcgaatcatgttatttttttcccttaaaaatccctcatttctgtcatgtattccccatattatttatgtaataggtaaagtggcccagtttgccactttgaagttgctgagctggtatcacaagtcagtcccctctgttttaatctctgtttaaggaaagtcactctgaaacgacagatcttttggttccttatttctgctttcctccgtcctcttctgcctgtgaagccaccctcctctgctcagctctgtttcaggaaatcggagctgctcgattcatgtgtagcaaatcaaagccaattagatctgcgttaaccttggttttcaacaacttgtatcgtgaaaaggtttctgtccatgtttaccctcatcttgtcaccatttagacccctacatacaccggctcgcggagcctccagccattcagcgctagaaaatcggggggactacgtcttaaaaccttgagcacctgtttgggaacatctgcacctcctcccttgagggagaaaacgacccagacattcgcgtcaaaggaagtgtcgtctatttccctcaacgcagggcacccgttctaggaatgtttgtataaacaccgtaaacctgcctggtaccaccatgaatgacacaagagctagtttaaaaagaaagcaaagaaacaaacgcaaaacccgaaaccgcatcctccaccgcaaaggtactcggatggggcgcccgccctccccttagtcagaggacaaagggggcgtggccgagcgcgcggcgcccacgtgaccgcggagagctgcgcgcaggcccttcgcgcgatctgccgtcatatcagcttatggcgccggtcgctgattggctggccgctccagcctcccggcccgcttgctggctgcccagctgctaggacagtttgcagagcagtggcgtgcggagcggcggcggaccacctccaggtggggacggtgggtgggcggggaaggaagcggaatacacctgagcgggctgggccggggggcgatggaataaaagaagatggagagacttcagcgcctgggactcgggtgggcgaggcggaaggtgtcctcgcagcacggcttttctccgcgccgcggttggttagcgagtgccctctgggtgctaggcgttgggcggatggtaggatcgcggtagcatacggatccgagtcctgcgccgagtgagaggagaggctggcaggtagcctggcatcccgaagactggcggcgagggctgggccgggggacctcggggcctggagggctgcgccacctgggagtccgggcggaggggccttccgctcgcgctgggaggsatcgcggggccgatagggaggcctggacttgaaggagccgaccgtggacgggcttaaagaaaatgcagtgtttgatgttgggtgttgcagatctcttactcaagggaattctggtctggctgctgaacacgaatgctttacttttcccttcgttctgggagggtttttttcttttaaaggccagaagaatcaggctgaagaactggtcggtatcagaactcctgaccattgcaagcctctgttgctgcggcgtaattagaatgaagggacagcaatctggggctgaggagactgaaaggaaaagggaaataatctgttccttttgcatcataaaaggaaaaataatgtatactgacatccctgtgttacagcagagtagatttggaggtggtgtaagtgaagaaaacaagacctcagtacatagagtttccaaactggaaagtttgtggcagctcggtacttttagaggaaaccctctggaagttatttgtctttatatcactatcattttttaaagtttctaatgattgatacctartaaataataactgatccttgatcatttacagagtgcttttccattcgttatgtaatgtaattaattagcatggggtggtactcagaatccctcatctgcatataaaacatcttgagagataacataacgtggtagcaaararaaaggttgtggaatgtacatcccagctggttttttctgttattgttgcttgctactgaacaagttatttaaatactctgacctcagtttccctatctataaagtggggagcatagaagtacctatctcatagaggtatagggattagatgaggttatacaaaaataatacctggttctcaataaatattagctatcattttctatacttttaaagtagggcaaaaagataatggtagactgagttgttctaagcctaatattgttattataactgagttttaagaagaagtttctttaattctgcaaggacaaagtatttaagtttctgtttgaagcagtggtacttaatttagggtccttgggacccctaacttcagggcttataaccccttaaaattatatgagcttgtagaggcactgaacatttttaaaaattcaggagttgacgacttgaagtagtggtgaagaggctatagaacttggcagaagttcacgtactttgcaactakattgtgtgtatttgaatcctagctccagcatttatttactcttatgaccctatgcaagttacttaaaatttctgtgcccagcttcttcatctataaaataatactagtacctacctttgaggcttcttgaaagggaaaattagttaatatatttaaaatatttatattacctagtatatattaaatattactatcaactactgtcagttatttttcaaacaaaaatcaagtggcacctattttatcttctattgaagtaattttgacgcatttttgacggccttaacagtgataatcatatagatgctattttattgagtacctttcttgggtcaaatgtcaaaagtctacttagtctctaaacctcacagcaatcaaacatgtttgtgttctttttggttgcacgatactattctaggtattgtattgaagtagggccacatggcactgtggggaacatgtagattggctcatcagctgttaccaacctttagtgatatagcaatatccttttcaattattaaatgtttatgttatctgatattacgtartaccctgtccctgctacaccacctcccttggcagtcttcacccctataacttcaactactacctgtatactaaccaggctcgcttttgaacttcacatttatatttacatgtggcctattgcttatatctaagatagaagatgagccacagataattaggttttaagatctacattgaacccgttttgaaccccagatatctgagacaggtctcagtcaatttaggaagtttattttgccaaggttaaggattcacccgtgacacagcctcaggaagccctgacaatatgtgcccaaggtggtcggggacacagtttgcttttatacattttagggagacatgagacatcaatcaatatgtgtaagaagtacattggttgggtctggtaaggcgggacaactcacagtgggggcttccaggttagaagcagataagagacaaaggttgcattattttgagtccttgattagccttccactgaatgcacacatttcgtctggctcagtgaatctgcatgtttacataaacaatagggcagaggaagcaatcagaaatccatttgtgtcaggtgagcctcagagggatgactttgagtcctgtctgtcctttatccacaaaggaattttctgagggcaaattgtgagggagggatgtagcttctcatccttgtagctgtcttatttaggaataaagcgggaggcaggtttgcctaacatagttcccagcctgacttttctcttagcttagtgattttggagtcccaagatttattttctgttcacaccatcattccttacccaccccctattcctaccctacccaaatctgctagctctgccagtattccctatttcaattacaatgacatcaccatctacttagaccagctaaagtctcacagtcatcctagatttctctctctttcacttcccagcaaacgtgggttatccaaatcctgtgggtgtttttacttgcgcgaaatctctgctggctagtcttaacagccactgcccgaggtcaggctatcattttctctgggttattctaccacaggaacaaccaaactagtctccctgcttctcaccgataacccatatttcttttctttccttttttatagtgacggagtcttgccgtgttgcccaggctggtctcgaactcctggcttcaagcggtcctcctacctcagcctcccaaagtgctgggaataagcattagccacttcacctagcctagtagtccagatttctaatggaatggtttttatgaaatgtgggtctgattgtatctttttcctacctagaaatctttagtgtctcctcatagcgtgtgagagaaagtccaaattcctcagcaggacagcagatccctccatgcgtagtctaacaaatctcctttacaagtccatcccctaacatgtttttccctctgctccaccccatcaccctgtctaacacccaccaaccacacgcagtgagccatgaatgcatcatgctcttctcttgctttgcagttgtgacttctctttggaatggctatccctaaccttttctttctggtgatgtccttcaaagtccaaatctaatatcatattcactaggaagccttttaccataagctgaggtagttgtgttgtcttttctgatctcatagaatttgcatatatatctgtattgcagcacgtgtcctattgctagaattgtttttgtagttgccctacctttaagactgatttagactgtgtctgtttaatgtttgtatgctcattacctagtgtggtgcttaacaataagttcttatttgaatgaattaacaatggcatgtatgatgaggaatatatgttaatatctggcatttggtgctaattaaatttttcttttcctgacaaagtgaggaaatgttcataattcatatcataaacaaagggccaaactccctaatatataaggagcttctagaatttgacttttataaagatactaaaaactcagtgggaaaacgggcaaaggataaaaacagataaacacagaaaaaaatataaattattctaaatatatggaatgatgctcaactttactcataataaggtaaatgcaaattaagtatacccgagatagcccttctttcttgatgaatatgtgaaagtttgatgatatcccctgctagtaagattgcagagaaataggtaaggtactgtcctacatcgtttgaggactacaaagtagttaaactcttatggagagcgatgtagcaatatctaccaaagttatgagtgtataactctttcgctcagctcttcttttagaaatctgcctaatgagggcctgtcattgtagcattatttgtaatagcaaaaaatggaacctatccaaatatctagatatgtgttaagtaaacacctatataacagtgaattagacataattcagttgaactcacagaaatggacacaggtccatagtccctagtcacaatttggaactctggaaagccctgtaaaaccaaaaagttgttttctttttgctttaagttcrgctctcaaaatcatttgatgacaaattctcactccatctgaccgaggtgcccattgtgtcttggcacacctaccaggtattcctggtgttttttattgttttgttaatttgggtttaacgtggcagtgtgggaactaccaccacatgtgacttaaagaatagaaaaacagatcgtggacgttttatagtggtagtaaggactaagaattgatgaaaaatagggagacattgcagaggactgaaaatgaagattctaaccatgtttcggttaagtggatttcacaataggaagtaaacagatgccactcattgctttgttgatgatggaaaaagctggcatatatgaagacctgctactgaaggatgtatttagtattaacaaggaagaattcagaaacttaggaagcagtgtggtgaaaaatatctaaaagtatgacaagagttaattgaaaatttactttctagacagctcttttatgcattctcctcaactgtaggttatagtttttaatcatttacttttacttcactgtgaccagaatacagcctttttctttgggtcttgctctgttgcccaggctggagttcagtggcacgaatatggctcacggtagccttgaactccttaagcaatcctcccaccttagcctcctgagggtagctgggaccacagggctgtgctaccacgcccggctaatttttgtatattttgtagagatgggatttcagtatattgcccaggctgttctccaacctctgagctcaaggaataagcctgcctcccaaagcgctggtattacagtcatgagccaccatgcctgaccagaatacaatctttttctccaaggagtgctacactctgggaaaaagcaagtatattgcttgcacagttaagggaggcctaggaatcaaaacttcctttaagagttcagttgtaaagatcctgttgtcaaaattacttaatgcttgaaatgatgttgataaatcagcaataataaatgtttaacattttagckgacaatgaggtttgaaaatgaacctgtagatattttggaagattttctatcactaatgaggtgatgatacctaatctctttaattataccatacatttaatggcccaaaccataaatacgtcaggagaagctgatgttgaagaaatgctgaacattaatcctgatgcttctgttcggcactttttgggtgatggggacattgctgaaaggtttctaaatgcacataattgtcacgcacgtccatgtgaagagaccaccaaacagcctttgtgtgagcaataaagcttttttaatcacctggatgcagtcaggctgagtccgaaaagagagtcagcaaaaggagttaggggtggggcagttttgaaggatttgagtaggtagtggaaaattatagtcaaagggagttgttctcttgcgggtcacaaggtgctcagtaggggagcttctgagccaggagaaggaatgttacaaggtaatgtcatcagttaaggcaggaaccggccattttcacttcttttgtaattcttcagttgcttcaggccatctggatgtatacgtgcagacttgggctcagaggcctgacaatagcgggaagatagtaataactacatgaatgattaaatgatgactatattgtgaacacagatgggaagatcactgaaggcattatgtaaataatcattgcttaagcagaaatatattaataagacagatgacattggtagaaatcttttgaaaaggttatcttggatattgttgctttatcacttgagaatcctgatcctggcccatgaccaatgtctaattccaacctgataggcccttctctttaagattctcaagcaatcagatgtaatgaacatttattgcgtgtatgtatacatatacatgcacaagtatttaactttgattttatatatatttgaaagtttactgaatttttcttttaaaaagagaatacattgtttattgtctgtaccagtctattttccatttgtcatttgttactccatacataattacataaattgttaatatacaaatgaattataataccatttacagtatgtacttatcccacttaatgtgaatattcacattttctaaacaaatatttgatatgagctggtcatggtgactcatgcctgtaatcctagcactttgggaggctgaggtgggtggattgcttgagtccaggagtttgagaccagcctgggcaatataatgagcccttgtccatacaaaaaaattttttcttaattgactgggcatggtggtgcccacctgtagtaccagctcctcaggaggctgagtcagaaggatcacttgagcccgggaggcagaggttgcagtgagctgagattacactactgcactccagcctgaatgacagagcaagaccttgtctctaaatgaataaataaataataaaaaagaaccaaaacccccaaatatttgatttatttaatgacagggagaagttttgacctttgcaaaatgtatttataggaattttgaattccgaaataacatctgatgccaaatgttttaagtaagaatggtagtagacctgtattataaaaaaggagatggtgacttccaaaacagcagagtaagaatctctgaaaatctcttctttataaaaagcaacaaaacactgacagaagttgtcagaatcagcttttttagagctctaggaattaaaactttatgagttaaagctttacaataatcttagcagcctttatttgagaaaagtagttgaatctcagtaagaacaatgagctttggacattttccgtcctttaccatctcccttttgctgacttcatggtagccttgaaaactaagccttacaacacagtaactatgaaaaacagcagcctggatggaaggtacagaataggtttgcagcctcaccaaaggccacaacccagaaaatcatcaccacttgatctctctggcaattctcaaggcttgtgtttatatgacctgtcttagagcttgttcaatatcatcctgtcccagggtgttttgtcaaggagagtcattatttacacataacaggtcttagaggcactattatcagctggcactaacaaaagcctgaccaaaaatacttaaaagggaatactgagaaatgagatatccctagggggctttgaaaagctctgttttcctgagaatctagaatgattcccatgagcagggctgttgcacatacccaagaaaggggagaaggccctaatttcccctttggctgaccttgagggtttacgcaagcagtaagttcaggccagtcaattttagagtgacaactaaagtattgaaagcatggcccaacacagcaccttggcaaaggctgggggacttaactggttcaaagcacttaagaaaatcactccagtcattagtaagagacttgtagctgcacacaacaaataaaacaggtatgtaattagttcagagaattacttaacgcacagcaacaacaaaagcaacttaaagccctggggcagggtgggcggtggtgcatacaatctgatttcaagagttaccccatcatattacttaaaatatcccattttccataaaaaattaaaaaacacaaacaggaaagtatggcctgtacacacaaaaaggcaatcagtcagtagaaactctctctcagaaagcccagatgttggacttacaaggcaaagactctaaatcagctactacaaatataaaagaactaaggaacaccacgtttaactaactaaaaggaagtattagaacagtttcttcccaagtagagaatatcaataaagtgataaaagttttttttttttttttttaaagaaccaaatggaaacgcaggtgttgaaaagtacagtgactgaaactgtcttgcttaacagcagatttgagccaacagagcacagaactggaagataggtcaattgagattaaacagctgggaagagaaagaaaatgaagaaatacaaacagagacttggggacactgtcatgcatttccacataagcataatgagagtcctaaaaggagaagagagaaagtcatagaaagtttaagaaagagtggccccagactcaccaaatttgatgaaaaactttacacatcctagaagttcaacagtatagggttggggtttatttttggggtgctgaaaatgttctgaaacttgatagtggtaatgattgcatagctctgagaatgctaaaaaactagtcaatcatatactttagtgaattttatggtatgtgaattatatctcaataaacctgtttctttaaaaacaaaaaaaggaggagcatgatatttatgtagggatggaaagatctccaagatatatattcaattaagaaaaaggaacttcatggtgtatatagtatgccatgttttgtaaggagggagagaaaaatttgtcatcattccatcttacattaacaaacaccgtaaggattctcaggaaactaatagatatggtcacccagagaggtggaaatgaaatgacggtgtggtttacagtgacatggatggaagcaaggctttgcattgtatgtcttttcctgtcagtttctcattttcttaaatccctgtgggaatttagtggagaaatctcatagggaatctagtgaaggaaataggctacaaagaagtaaataagtattttcagaattttccttacctgtgggctattttgtttcatgaattgatgtttattaacgtggcccaatatgtaggagataaaggccgtttgaacacctgaaatctattgtgggtaggcaatttgcagattggcttcttgttcaaaaatttcagttcaagtgagagacattttagatgctgaacacgttttcttgtgcgaacaatgcaatgagggatgagtgagtcgatcataaatgatagattccatagtcagatcacaaaagctgaccacaatatcaccgaactgtattgtaacaggaccatgagtatagaatggacttaaatatgtactgaactgactaatgttttttagagtttaagcatctgaaacaggagttggcaaactatctgtaaatggccaggtagtaaatgccttcggttcaacgggccatactgtctctgttgcagtgatactataagcccacctttgtagcagaaaagcagccacagacagtatgtaaacatctgggtgtcgctgtgttccataaagatttttacaaagcaggctctgagtttggcccgtgggctgcaatttaccaactcccgatctggaatattgattagaggtagagaaataaatgtattccagttcttaacaccaagaatacatcttcctttgttctgtcaatgggagtgtcagaagaacagatagtcccaattctatggttgtggtggcagcatggatatcttttagggaatttatcttaggtgtcagtgctgaagcaaaaatctctgaagtatgaatccttgaaggagagagatgagctgaaacttgtagctgaaagaggaaactatttgtctgagtacctagtcccctgcattcccatctttaccacttgccatgctgccataggacgcggtagggaatgacactgaaatggaattccatctgggcttgtgccacttagcagcttgatgacctttcctgggcctcagtttctctaactgagctttagcatccccatacatagtatgaagagattggactagagatgatatctaagatcccttctggctctaaagatggcatgtaggggattctgatagcagcagatgtactgcatatgactgttcttaaatcaggaacttgagatatagtgtttctgaaaaatttttgcctggaaaaatagagacatggtaactaattgtcacacatgcttattttttaggggctaagtgatggatcttgtactccgtgttgcagattactatttttttacaccatacgtgtatccagccacatggccagaagatgacatcttccgacaagctattagtcttctgattgtaacaaatgttggtgcttacatcctttatttcttctgtgcaacactgagctattattttgtcttcgatcatgcattaatgaaacatccacaatttttaaaggtaagaaatgtttttacctattttctaacgattaaagtaaaaataacaatatgatatatttctgagatttttagattaagctgattatatgtaaccattaaataaaattttggagaccaaccacaaatgggttagatattttcatgagggttaatccctgctctccttcccttagtttaagcaaatctaactttttaataaaactataagtctagtatcgtatcttgctagatgcatattggagcatttttatgctgatattgatgagtaaataaatgcatacatttatgtaattattttaatatatgattttcacaaactgaaatgtgtttttttaccatgttttgttttttggctagataggggattcaaactcagtagttttaaagttgtttacaatcatttttaaatttcggttgtttgtacttgtcagtgactccaaggactgaacagcaaaaagaaaaaatagagaggattggggatggaagttaattaggaaagaaatggttattccataaatagaagtttagaatgcagattttggaggaaggaaaaaaggtttcagaatttgaaatacttattgcattttctcagtacaaaaggaatgattttcttacatacctatttttatgtatttaaaattttaatagaaacagtttggaggtaagccccttcatgtaaaagagattttaaaaatccagtccagaacagttttatgctagttttgtttaacatggattttgtgatttttaagtattggaaatttcwctttcagaatcaagtccgtcgagagattaagtttactgtccaggcattgccatggataagtattcttactgttgcactgttcttgctggagataagaggttacagcaaattacatgatgacctaggagagtttccatatggtaagtaaataacacgagtgtcaggaagagagtagtctaagcacaggttagtttccttaaaaaaacaagtctgcccttttttttttcatcttttaaaataattacaaattattcagttgttttttaatgttctattttcatgtgttcaygtcttgccacatgtgcatttctttagtttttctatcaatctgaaagtctgctgtagatgagattgtgtctggcggaagattggagtgatcagagatgggtccttgcatttgttttctattaattattgaattcaaccttctaaaaaaaacttgagtagcttatgtcattgctgaaagttaaaaacagatttttaaaatgcattattctgcttcttagaaactgtaactcttctggcatacaaccacccacttttctgtgcctgtatacttcattgtttacattacacaaatgaagtcctgaggtgcatagtggtttgggctctgaattttgtttctcttagcaacttacatggttgtattttcatgtcaaaaaaatcttgagattatgtaatatattagtcatagtactgtgcggatattcataagttatgtaaatgatacctaattgttagaccttcagattgttactcttttttgtattataaacagccctgtagtgagtaaacttttgtgaaattctgaaactttttcaagatacatttctaggatctagtatgtaaaaagcaagaatcatagtatttattgaaggctgatatgtgtcagtgacagttctcagctcttcacaagaatcagtccattgttttcctacaattctatgagataggtactatcactgtgctccttttataggtgagtcaatgaggtgtacagagagtttcagtaacgagttggtggtagatctgagacttggactcaggcttgcaggcaccagcacccccacactttaagtaagaagttagttattgccgggcgcggtggctcaatcctgtaatcccagcactttgggagaccgaggtaggaggatcacgaggtcaggagtatgagaccatcctggccaacatggtgaaaccccatctctactaaaatacaaaaaattagcggggtgtggtggtgcacacctgtagtcccagctactcaggagggtgaggcaggagaatcccttgaacctgggaggcagagattgcgccactgcactccagcctgggygacagagcgagactccgtctcaaaaaaaaaaaagaaaaaaaaagtcagttattcagaagaaggaacaaaaaattatatactagagtaatgaattggctgggctttgaaaaatggatatgattatgagttaaaataaagggagagaggacattttaggttcttgaacccctatgatgaaagatacagaggtaaaacttccaagacagtgggaggacattgagtaaacctgcctggttagagtagaaatacaggagtgatgaggttggaaagatccgaaaggggtggagtatggaataaatgctaaatttaaagtatttagtggaaagtatattttaagcagggagataatgtgtaaagatgggttttaggaagattaatatgaaggaagtgatgattcccagagatttaaataataaagatgtcttaggagtatcctgtctcacaaatatctttatagtttaattaagaagtactttaggtagaacatttcaagtacttatgcgagggaaatgaggaaatgaccagattccaagaagccaagagagattagtttataatatactgaattagccagaacagatcatttataatgtttgagtctaggatcccattttgcactcagatggacatgtgaaaagtgaactctaatcccaggagctgagttttgattcttctgtttcccgttttcttttctaggattgtttgaacttgtcrttagtataatatctttcctctttttcactgacatgttcatctactggattcacagaggccttcatcatagactggtatataaggtaaagtcatttgtggtgaaaagagaaaaaaggttacacatttcagcaatgtatgattataaattctgttctctatttccaagaatttcctctacccatattaaatgtctaagtagccataatcataacaggtacagggtgcattttgttcatattcttctttatgggtctaaggggctgtcttaaaattcgtctgttccggtaacaggtacacatggacttacagagggaacaatagacattagagactccagaaggtgggaggatgggagaggagtgagggatgagacgctccctattgggtacaatgtgcactcttcaggtgctaggtacactaaaagccagacttcaccactgtgcagtatatccatggaacaccactgcacttgtactcataaatccatataaaattatactgttttagggcgaagaaggacattttatagaataaataattttgctgatctctacaggatttgttaggttgtttccaacatgagtgtgagaagctaagttgaatgttgcacggggtaaagtttgcagtgctaattgtgtccttttctcctgcagcgcctacataaacctcaccatatttggaagattcctactccatttgcaagtcatgcttttcaccctattgatggctttcttcagagtctaccttaccatatatacccttttatctttccattacacaaggtggtttatttaagtctgtacatcttggttaatatctggacaatttccattcatgacggtgattttcgtgtcccccaaatcttacagccatttattaatggctcagctcatcatacagaccaccatatgttctttgactataattatggacaatatttcactttgtgggataggattggcggctcattcaaaaatccttcatcctttgaggggaagggaccgctcagttatgtgaaggagatgacagagggaaagcrcagcagccattcaggaaatggctgtaagaatgaaaaattattcaatggagagtttacaaagactgaatagattattgcccagttattcttaagtaaggacaaagaaggaaatatcatcgtatttcttttttttaataaggaaaaaataatmtccatacagtcaagatacatagtaaatggtatcatttggaaatcagcatcgtgggcactgctgaggaatgatcctagtggtaggtcagaagaagatgctgtgaacaccaggactttaatcttatgcttaaaatgccagatgttgttcgggggacaacttgtatctttctagcagcagatctgtagtttgtatagcctcaacaacaattttaaataagatggagaataaattattgaggggactaggctatatgcatttgccttcatccacccatgtttattaagaatcattgtgcttaataataccaagactaagcaccataaccaagaaatactaatgtaaagattgtttcttgtttcaggaatggttaattcttcaacgttggtatgataatgataacttgttttgacttgaataaagtactacatcagtgtggaaaaaaattctgatacattagcagctatgtaaatgacctaattgatagcaggtgtaataagactatcgtcttcctacacataggaggctcattctctggacacactatcacctattacattttactgattaacaaataaattggaatttaaaaatatcgatatcaccatgatttaatccagatctgggattatgtagctaaacattgtgatgattattatttaaaaccattatttaataagagtaaraatatgtgaatctggatatatttaaaaaaagaaatttgatgcccagataatatattaggcactactgattttttagttaaattgatgcactacacttttgatgtttgaagttacaaacctgtaatttttttgtaaaggaaataattgccaaatacctaggcccattgctgacgattagttctaaaatcttattcctcctcttctcccctcacttttccctacttcctctgcaaaaagatttaacaaatacattcataaggaaatgtgtgttgtaacaaatatattgcaaaaacatagtttgtaaaggcattctataagctatttatgtaaaatcaataaaagttgatcataattaaactgtatcagttgagtattatagcagcacaaagtattctttgtacagattttgtgccaatttgaagccacagaaatgatgtggattgttaattgtgttttagaacatccccggacactcagtgtcacagggggaaagaagtgggtaccacattctgtttatatttcacattttaactagatttgagtgtttttagcaagaaatcagtcttaaaatctaatgtctgggatccagaagaaaatgtctttaatctgtgagttattgtcacaatgtcatcttatttaaatgtaccaattagcattttgtaataggcaaatgtcatttagtgcttttcaccaatcccactcacccccggtgctccgccttgcctaagaaaaagaaattaaggagaagtaaactttatttcctaatataatgtcagctgatatttattgagcttttcctctttgcccagagactaggacccaaagaagttaagtaactattcccaggtttatttctctctcatatgatgtcccatgtggatgtttgtggtcagtggacagctttccacctagtctttctgcgacccaggctccttcctcttggggctctgcctttctctcagtccatagagccctctttgttgaaagagcacataggaaaagaaggaaaagtctgtgtggaaaatgtttctgggtcaggcctggaagtggtgcatatctcttccgcccatgttcctttggacagaactccgtcacatggcccacctagagagattttgggaaatgtgtccagctgtgtgcctgggaggaagggggcaccattttcttgagcagctagacagtttgccgtatttgtggtgttctcctcttgttgatgttgaaatggtgaatgagccataaagtatttcaggttatccacacactaatcatctcagtgtctttaattcttaactccaatatgaatgtttaaagcttcctctagattcttattcctatataactaatagagaagaaaggacagcttcctatggggaagacagaggcttcctcatagatgttaggaataatcaaacttgcccctgccctttcacccgtctcaaattctggtcttttaaagcagcgttatgttaagtagtcctaacattgtaatatacagtactgccacattctcctactttctattagaggaagtcagagaatatttatggaagtgaggacccaaattaccttctacagatgacttttatagttacaggacagaaagtgaaaatcaaggttacgttttctacttttgtggtagaaattgagaagtgggtggatatggttcgagaagacctttcagaaacacagagactgagtctttgtcttccatgctgtctctgcagtactgagtgaatttccttatacccttgtatcatgttttcctcccatcttctagaagctggggacagatttggaagagaattacacaagttcagttttttgatacatggattttacagtgcatgcaggttatttatgtagagaggaggtctgggagaaagatggaaactagggagatgactgagaacaaagatatttgggattaacacagatagaagaaaagtttgaaaccatgagattgtcacagcatgaaaaaagatattcaaagacactaaccaacttgaggggtgcagtggtctgaatgtgtcctccaaaattcaaatgtggaaatgtatttgccagtgagatagtatgtagaggtggggccttgaggaagtgattaagtcatgagggctctgggattaatgacttaaaaagaggtgtgaggcagctgttcagcccttctgtctcctgtcccttttttttttttttttttgagatggagtcttgctctgttgccccaggctggagtgcagtggcgtgatcttggttcactgcaagctccacctcccgggttcacgccattctcctgcctcagcctcccgagtagctgggactacaggtgcccgccaccaccacgcccggctaattttttatatttttagtagagatggggtttcaccgtgttagccaggatggtcttgatctcctgacctcatgatctgcctgcctcggcctcccaaagtgctgggattataggtgtgagccaccatgcccagccccttctgtcccttctaacgtgaggacccagcaacaaggtaccatcttgaaagcagcaactggggactcagcagacaccaaaccaactggtgcttaaccgtgacttcccagcctccagagctgtaagaaaataaatttctattatttatagattacccagttgaagatactttgttaaggcagtacaaatggactaagacaagggggaagaaatttgcattcctgatcttcccaacttcttcaaattcacaacacttgaatgacagtcttatttcagcacttactgctatcacctattacttttatgtgtgtcttacctatttgagatgccagattccttggaagtagagaccgtgtctgaatcatcattgtattaaaccactcatccttaacaaatgcccaagccatggttaaagttcaataaatactttgttgaatttattaataaaatggcagaaatgtcattctcttccatatatgtttaataaatccctgataggtgctaagcactgcactaggtaaaaattctcttctgatgctgtctttttggccaaccatttttttatcatttattcattagctgacatttgctaagtgctttggaggggtcaaaaggggaagtaatgagaaatcaaagatggtccctacatcaaggataaactatctttttttagtcactcaaagtcataaccctttggaaacaaaacccaccagtaccccagattttgaccacagatgaatcagtactacaaggactggttagagggttgaatgaatctgtatactcagcacttaacacagcactctgggtaaaagaaaaaagatcctcaaagatattagttggttacatcaagaaaggacaaacttaggttaatctataacttcatctcagaggaacaggaactttggagataaacagggctctgccacttgcaagttgcaccatccctggtttctccatctgtaaattgattaaaacactgcctatctaataagattaaataagttagaagcattcagttaaatgtcaactgaaactattgttcatgtaaattgtgcttgatgctttttctttctagattcaatgattattgtcattttacctccataggccctcaatagaaatcagttgcagagggcagaagcctagatattttcaccttaaaattggagggtgaaagacattgaggtgaagtagagatagagggtacacagaaaaatcgtataagtaaaactaacatcgttaacattatttactgtaagttatctttgtaagagtggtaaaatacattgtgttgttaaataatttcatttaaaaaatgcatcactttgtgtgtttttatattgctaaaaccataaggccagtctacaaggtttgtagataaaatagaaacataccttccttgaaaagcagaataaattttttaaaggcaggaaggaagtgtttgaaccatgtgtcaacaagctttactgtcaaagcaggcttttggtatgggaagaaaaatacttataaatacttgttttaatatttgctttattaaaatacatttaaaatacagcatttttaaatctctaagctcaacttgaagatataagaacagtaaatttgataaaaatgagaaattacattcccatttctttaacaatttgtaaattccaattatcctgaacatttaataccatttacatattttattaatcacattttcttaaacatttgataagagatttaatattttgatccaactaccaaaaaagcagacttgtgtacttgacagatttttctaaacacttcacaactcacgattcaaacaaagacaaaatagcatatcaaaagttaatcactcagttggaaagcactcataccataggcttttattcatttcttgaataattttgttatatcttcctcttttaggctgcaatgagctataattgcactactgcactccacgctgggtgacagagcaagaccctatctctaaaaataaaaaagtatatatatataaaaatatcttcctctattataatttaactcattaagccatttatttagatgtaaacttgcccccctgacatgtggtatgaaacaaatagaaacctagaaatttagtgcatattcaaatattaagacagacactggtgtggtgacttttgtctgtcgcttcattgggacgttttttctttctgatcaacttaatgaaattataatttactataattaagtgtagccatttttactgtagagttcaatgatctttgatgaacgtgtacacccatgtaaccaccacccccaatcaaagtaaagaacattttcttaccagaataaatttcctctccgtttgcagtcattctccccagccctaggtcaccactgatccaccttctgttactggaaggttagttttcttccctgatttagaatttcatataaattaaatcagatagtatatactcttgtgtttagtttctttagcttaacatgtttagagatatttgctgttgcctgtgtctgtagctttttgttttcattgctgaatagtatttcattgtaatataccacagttggtttatgtatttgctgatgaatatttgtgttatttccagcgtgggattattatgaataaagttgctacaaacatttgtatacaagtctttgtgtggctatatgttgttatttctcgttggtaaatatctattagatttgctgggtcatagggaagagatatatatgtatacgtttaattttataaaacactgtgaaactattttccaaagggttgtaccattttaccctcctgctcccaatgatgagaattccatttttcccgcatgttcactaacacttagtatcgtcagtccttatttgtaaccattctagtgggtgtgaggtagtgtcccactgtggcttaatttgcattttcctgtgactaatgatgttaagcaccttttctcctgctttttttttttttctttttcaaactttttatatcttttgtaaagtatctgtttaaatctttggccattttaaaaattaggttgttttggtgttattgacttataagattttgtatatattgacaaaaattctttgttagatgtatgtattaccaatatttactccaatttagcttgtcttttcatttccttactatcttttgataaggaaaaaatgtttaatttttattcagaccactttatcaatttttatctttcataactattgcattttctgtccaacctaagaaatctttgccaatcccaaagcaagcctggaatttcctttgtgacaaggtttttgataatgagttcatttcttagaagataaagacttcatgttttcctctcttcctttctcaattctgatacattatttttcaagaaattgtttactacatttaagtaataaaatttttttgccataaagttgtaacattccctatttcccttttaatgcctataggatcagtagttatatttcctatctaattcctgatattgatgatttgtgtttgctctttttcttgattagtctgagatgaaattaattttattgattttttttttttttttttttttttttttttttttttgagacagggtctcactctgtcatccaggctggagtacagtggtttgaccacagctcattacagcctcagcctcccgggctcaaacaatcctccctcctcagcctcccaaatagctgggactacaggcacgtgccagcacacccagctatttttgtttgtttgtttgttttgtagagatgagttctcactatgttgccagggttggtcttgaactccaggactcaagcaattctcccacctcagcctcccaaagtgctgggattacaggcgtgagccactgcgcccagcccas

SEQ ID NO: 93415 - DNA, 48439 bp, Homo sapiens
gaggaacctgggaccacagaaagaaggctgtaatgggctgtgagaaagagaacacagcccctgcttacctggtgaggggctctccagccattcaccagagggctttggaaatagatgggaggctagtgctaaagggaatgaagactgagcttggaatcaagaggccagagtttactcccaatcctgccactcgctaacctcatgatctcaggcaagacagttaccattctgggcctcagtttcctcatttgataaaacaaaggggaagatcacgctgattgctagggccccttgcagggctgagattctatgagtcctctgttctcaggagcaaattcaacgttttctttgttaatatcttggattttacatttttttaccaaaagcttcacttacctcttttcccgatttgctaatattcaaaaagaagcccactagtaactatctctcttagcaatttcctgagcatgtttagttttttcaatcaagtacagcataaaattacgacttccttttgttcatttaatttttttcagagtggaaaaagcactagcaaaatatatcaagtataatgaagtggtaaatgaaagaagtcttaaaaaccccaatttaaacatggtcatttttcaatattcaaatatttgcatatccaggatccattctgagtttaaaaacctggcaagatactcacttgagggcaaaatgagacttaggttaactgacttgttcaaagtcataaagcaagttaatagcaaagcccaaatctttggactaagatgcccggaagtctttctaccatagattgttatcttcctaaacaacctgtctttctagattctctgctactatttcttggtttagaaacatacacttcacatactgaagactttactgcaacaggactgtggccagaactgtacttgtctcattaggcttaccttgctaaggtaagaaagtgatctcactcaaaggcattgcatctccactgaccttgaataggaaatacatattcatatcttgccaagagttcaagtgccaagtcaatacatactacgaagtctatggtttggaggagactatgaaatgatgacatttcccatgcattccaaatgtattaggatgtatgactgaattaagtgggacatgcacctggagccttctcaccttcacagttgacagccatgaatgaactggccatttgtctctggaaatctgcttccgaggaggaaagcaaatgattttttaaaatgcaaaacaggaaggaactaaaggcagcatggcatgagcctcattttttccccaacaggtcaacactgagacatcacccctccacttctacttgagactttgttactttccatggctatcagggtgtgtgtgtttaaatatttctacatttggtaagcaggatctgttacccccttttctcaaatatgccctaatgagacataggaaacatgctgtcactctcccaaaatgaaacacacatgaagactgtataacttttcctctaattaagagtaagctttacccatgtattactagcaatttttctatcactgtaatctcaagttacaatgtctagaagacagatgaagacctgctggccagactatgacagtattctttacagatattcttcatttctatcattattttattacttattttattattttttagcgatggggtctatgttgcccaggctggactcaaactccggggcttaagggatcctcccacctcattcttttaagacaaggtacaggcgggacaaatgcaaagtgtttaaaggaaacagatctacaggcaaaacggtaactgactttgtacatttcaagggtgctgggctaatggtgaaaatgcaaaggaaaaggcctaaaacatggccatgtctgcttaggactgggaacagaaggtttcctgctgggcttttaagagctctctatggctgggcatggtggctcatgcccataatcacagcactttgggaggccaaggcaggcagatctcttgaggccaggagttcgagaccagcctgaccaacatggccaaacccagtctctaccaaaaatacaaaaattagccgggagtggtggcacacacttgtaatcccagctactcgggaggctgaggcacaagaattgcttgaacccaggaggcggaggttgcggtgagcagagattgtgccaccgcactccagcctagacaacagagcaagactctgtctccaaaaaagctctctgcaacatcagcaccacagactcagcattgccctgaagctcttttgtaactggcttttattggtttaattaaccaaggatgggtgggacagagttactccatctctgtcatgttattgttgccggcttgtggctagcagcagctctttaccttttgtatttgatacctggcctgcacaattagcaccttattataggctggcctctcttctaattgccacgtctcaattgagcactttattttattgtcttgttcatgcagtagttcgaggtcctgggctcccccactataataaattctaaactacttttaggcaggtgttgtgttttgagtttatctctttatgcccataagaacaccagggactcacaggcatgcaaacacactgtctggagtttctagatatctgagtatggcatacggttggaatctgggtctccatgcatgctactcaaccctagtaccagatctatcagccatctttgccattgagggctctctccttagctacttggagttaagctcttattctgctcatatataaccttttaccttgtttaaaatattgggttgcaacagacacagcaacatcccatcagcaccacattccatgttcctctagaaaaatgattcaagggatatgagtttatgcttgaacagacttcttgcttttggaattaagattaactatatagttcataggacagttaccaacgccataacaaaattgggatttccttcaccaaataatctggtgaatgtaataaaacctggggggaggctgtgtaaggtgatggttaggagtatgggcaggagagctagactgcctggtctcaagtcctggttctgccatttaccaatgatgtaacctgtgaccctggttaaggcatttaacctctctgtgcctcatttcccaatctgtaaaatagggataagaatacttgcatcacagggctgttgcaaggattgaatcagttattttttatttttatttttttttgagatggagtttcgctcttgttgcccaggctggagtgcaatggcgtgatctcagctcactaaaacctccgcctcctgggttcaagcgattctcctgcctcagcctcccgagtagctgggattgcaggcatgcgccaccatgcccggctgattttgtatttttagtaaagatggggtttctccatgttggtcaggctggtctcaaactcccaacctcaggtgatccaccggcctcggcctcccaaagtgctgggattacagatgtcagccaccgcacctagcctggttaatctttataaagtgcttagaacaatgcttggcatacaataagcactatgtaaattagtgttgaaaattagagtataaggttttagaatacacaaacctacagaatagtatgccccaattcatttattcattcaataaatgaatctaatagtgatggaaaaacaagacggtttaatactgtgccatccttgacttcttgatttttttggttatcatatgttctttgaattacttcaatacactaaaaaagaactcagaatttatggattttaaagacgtccaatgcactattacagcaaaggtgataaaaatgttctggcagcatttaagccgaatgattagtgaagactgtcattgttttagtagacaatttaaaaaggaacattctactgtttacatctctcttacctacttagcctaatatataagacatcgttcataacattatttagcaaatactgcagacccttgtccagtatggaattcccgtcaattgtgagggggggacagttcaaatacatgttctatattttaagacattggaaaatctttatataaagataactccatggtatctgaactcaggcttttcttcctgtgtctttctgatctgtccatttgctgtcacctcttaaatcctcagtctcctcagatatcctagcttctaaaatcccacttccagggtctctcctttctgagcaatctctagcacatctagaaaatatcatttataacatcagcaatctcatgttatcttatcacaacagagctcctcacataaaacccagccgtccaaccacacacaaacacatctaagtgccacaacaggtggggcacctgtgccttcattagggaggaaatccttccggcttcacctctttcagtttccctggaaggcaaagtccaaccctgcaagctgtcttccttttaggtgcccctgtggagaattacgtagagacataagaaacatctaatgtccagtctacgaagaactgatcatcaattttggagctcagcagtttaatgcttaagaatgtgagcaagcacttcctctctataaccttatcagacgacctcccaatcccactgtgcccactgatgcgaccatcatagctctaaccaccatgatctgtggttatgttggccctggagccttcatctgcccagggaacttctctgggcatagtatgttttacttgtcttgtgttctaaaggtagcacaaagcctatctatagtaggctcccaatagttatctgaaactgtatttgaacccactatctgataaataccatttttttttttttttggctgagggtcctcaaaaatggaacatcaggaaagtcatcagaattgctttaacctgccctccttgcttcaactaatttgggttaactttctcccatttatccacacggctcctttaaaacttgcaccatactttgtcagccccgccttaatgagttcctttggtgaccccagcttcaccttgcagatatcctctccgggtatccaatgcccatactcccactcggccatcgcaaggggttggggttggctttttttcgggcaactgctcacagctcccagtaatcacttccatcaagccggggtttccagttcccgctaggaagcgttggggacgtccgggcactgcgcacctcgccagtgccggttaccaagcgcctcctcccccgtctgtgggacaacgctctggtaagcacccgaggcaagaggtcccagcaaggtaatgggacagcgttcggtcacagagagtgagcgagccagcgagagatattcctgggtggaggggtggggacgccttaggactagtgtcccccattcccggacccttcccaccaagaactacctagggagggctgcatcgcctctccagccatcctagggactagagaaatggaggggagaagagcagggaaacagcacccccgggccaatcacgacgtccgcccctccttagtcggggtctctctctctctctctctctctctcacacacacacacacacacacacacacacacacgctcctaagtcaactccagctctgagcaactacgccgcacgcctctcccactgggagtcccccggcccgtgaggctcgcctcaccccagcttcttcacccctaccccagtttcccttcccaactgaccgtgaagccggaggcagttccccagtcccagaccccggtggggctcccgccgccgccgccgctgccttcccctgcagtccccaacccgggacccggcctcgggcttcggcgatggctcctcggaacgaggcgccgcggctctctggactcggccagacaccgggcggcgcgcaggagaagcccatcgagctctcccggcagtggcggcggccgcggctgcaggagcggccgccgcgcaggttgatgacgcgctgacgcggggcggkggggggtgggacgtgggggcgcggtccagaggaggggacgcgcgcagatgacgtgcggctcgtggggcagctcggcagcatggcgtccgtgacgctgagcgaggcggagaaggtgtacatcgtgcatggcgtccaggtagctacagcagcggcgttgggtcggccgccgggttcagcctggccctgcgggtcgcggcctgccctgggtttgccagtgaggaggcagccgagctgcggcgactctccgtttaccttgtgattaaacggttctgctgccggcgtttgcaattcagagctggcaacgtggacgtttttaggactgttagcgcatttgcagttttgcgggtctataagattccgaacccgggcaggaagcttgggcagtctcggaggccttttcttagtgagagagcatcggccccagggccatccattcggcgttcgcgcacagatcttgtccgagcctcagttttctcttcgaggaaatgggagtttggaggtgggcttctggcctgcttttcctcacctcgtggttaggagggcgcatgcgaggtgaacgcactttgaaaatacaaattgccgtacaaataaagggggaagggtttttaaaaagcggctaggacgcctgtaatcccagcactttgggaggccgaggcgggcggatcacgaggtcaagagaccgtcctgaccaacatggtgaaaccccgtctctgctaaaaatacaaaaaaatttagctgggcgtggtggcgcacgcctgtagtcccagctactcgggagactgaggcaggagaatcgcttgaacccgggaggcggaggttgcagtgagccgagtctcaaaaaaaaagcggctaggcagccgatagcctaagtgctgtttccattttgccaatgaagaactaagatccctaggcagctataacctaatgtcctctgtgttctatattaaatccctggttatgaccactccagaacgagggttgaaaaatgttggacctggtaacgagctaccctgtatcctcctccggctgtgtctccacttgttaacctacggtgtggtcctcctatcagagttcttcatcccatccttggcagagttctggcgacagctcctacctcttttcctcatgcctttcctctgtcagtaccaactgcaaagtcagtggtcccgtgatgtagccatcggattgaagcggccagctatcattgaagtcccacaacgtgagttaaggacatgtccatttaaaaatcgtgacctgccgttatcttctgggccctttatatatgaagaaatgccaatatttagcatattatgcctggataataaagtcagaactcacagttgcatattttagttataattcaggattarcaacagtgggacatatgtgtgtattacagggtaacatgtatgttatttgtgtgtgagggggcataaaaatgcccaaaagcagttagatatgtctttccctgctatatttttgtatacactttgttcaggtgatttttatcctcaaagtatttttttagggacacattacggataaccgttttcctctaaatttaaaaacctttggtcttctttgttaccggagcttaccatgatgtagtgactctgtcatgtgtcctattttctctcaacatttcatccctgaaagtggcactgaggcatggatatatctgtaacctcaaggttagagctttctccccagcacccttaattcccacggcagttcattagctatccagcagcagagtcccaccatggtcattagttaattttatttaccaacatatatctagctcctggcatgttatgtgggaaacagcagggatgccaaaacatggttgtgaaataaatgaaagataggagggagacaaacagagagtaaaagtgaataaaataaaaacaaaggtaatgtaagatctatgccaaggaagtggtatagttagtggaggttgaagttaaagtataccaggggccgggcattgtggctcacgcctgtaatcccagcactttgaaaggctgagatgggaggattgcttgagcctaggagtttgagaccagcttgggcaacacagtgagagcccatctctaaagaaataatttttttttaataaataaaaagaattccagggacttgtaatgctctgaaggcttccctaaggaggtggaattgctcccctaaatccatgtcaaggattcctcctctgtatcttcaggactcagtattcattcattcaacacagaactgagctagactcaggggctaggaaggaacctgtccttatatagctctcatgctagaaggaagatgcagaaactataaatgtacttgagtgtttatatataaaattgtactgaatgctatgaaggaaaaaacggacacgatctagactgggaggtcagaggaggcttccctaaggaaatagcatttgaactgagttctcagcatgactgagaattaagtaggcaccagtgttccagaaggaaggggtggtgagtctgtaaatcctcaggtggaggacatgtggagcccaaggggtgggctgggggaaatggtggaagatcagcttgcagaggtggccagaagcacgatcctagaggtcttagaggttcagtcattcgctcatcatggatcttggaaggcaatagcctgttgacttgtctgtatgggggacccttaaggcatagccagtgtctagcacttggtaggttcttagtagcattgaatgggtgatgtaagctttaaagggggaatgagttggatggtgtttttattttttaaattaaacctccctctcaccagtaccatggacatatttgggcacagttgttggtaaatgctcagctctgtgtatcacagagccatgcagagtaatgggcttcaaatcaacgtcttcataagggcttattaatgttggcccaaaatatgccatatgtatagaggagcaaaacacaatttacaccatccaaataaaggtcaggatgcaggtgaatgagcctaccatggaatctcaactgattcagttctgaaatctcctaaacttttgttgcgttggttatagagtgccggcagtgcaccttaagcagtgcctgcctgaactcctgttgcttgtatagtcctagtcattttgtgttttacttttcacctttggtccagtaacgtccatttcagcttctgatgtcactttcccttcagcctttggttcttttactatttcagggaatatttcatcttgttttggtgatagttagaagcagttgaaattaacctcacgatgtgttgaggattcagttgctagtaatggtaaccaacacatcggctcaagcaaaacagtatggattacaaggctgcaagtgtttctccaggaatcctaatctctgctggttttttttttccccctctttgctttgtttttgtctccctacagattggttttctatttcttgggccagtggtagaaaaaatgtggttccttcccagttcctctgtaaaagagaccattccttctcgttcagttctgaactcatgtttccaagagaaagaaactctagttcttttagggggttgagggaaaggatggacagaataattaggctcaaacatggccactagaggatgtgtcacacttgggagaagtcagtttgtgagaagggagggtggatcattttagttattggcagaaaatggaaccctcttcaggtagttcaggagacttttatgatgggactctagagcagtatggggggggtttcagggaaccaataagagatgttgaggagccccaagacaactactgggagtggctactgcccctattccaaaggggccaggggaggaaacagtattaccacatttcagtgatagctggaactgtggaggaagggctgcccaacataagtcatagtcttcgatagatgcaggcactatcagaaatgtggccactagattgggggtgaggggcaccctctgatctggtatcttccactggacaaacccaaccagaagccagcaaagggagtctaggtgatacaatttgagtcaacctggtgaacagatcccctctcccaggggagaacagagaatcaaaaaggtggattaaatcggtattttgataaataatttgattggtttctgttaggttctctttcagtctttgaaggctatatcccattcttattaggtacatattataatttttatttcattgaatatttacaacagttctgaaggtaaatgttatctctatagatgaggaactgagctcgggcaggttgagtcgcttgtcaaggtgacacagtaattgagtggtggcactgggatttaaatccagacctgtctgattgcaaagcccatacttgactctgaggccaccttcctgctgcagtgaaagtcatttcttycatttcctcagtagggatccagagatcaaggcaggagagaatctttgcttcctctacctccttttctttccccctttctctaaaagcttgtggggaaactggaagggaaagagaaagttctaattgacacctcccactccccagtttttctagagcttaaatagtatatggcatatactgctgtattgttttggttgcatttttcccacattgagtataagttcctttagaaccctatattgcatttctttgtatagcttttgtcttactagtatcataaacgatttactctgcccataccatgcagaacttggagcagacttcagaatttttagaatctaggatttatcctcttttctggcttactgggctagatgtgtgttttcctcatccatgagaagccattgctaacctccctcttagcccagggattctgaagccttgaagtgcattttactcacctacaaaatacagattctgaggctttaccccaacattctgaatcagactctctggggctggggcctgagaatggacattatcataaagtgttgggaaatttgggggcagccaccagacattggcccatgggtaagccactgaccagagataaagaaatctctgctctctcctgctgaagtcatatggtttcctgcctctttttgaatgaggctttggagtcagactgagcaggcaccttcaccatttacaataagtggttttacttgcataactgaacctgcttcccttgtgtaaaatggggacttatgcacctggaagtagaatggggttatgaggaatgatgagataagagatgtcaagcacttgggctgtggttaacacagaaaaaatgctggctccctttcaagtttgtttttccatcagaagtgtgactttgtcttaaaccatccacactagatccccagccttcatagtgacctcattaaagattcagcctgtggctcctgagaattaaacctcttttgatttgaaggaatcgggatttttcaattatctcaagaaaagggataggccaggtgcagtggctcacacctgtaatcccagccctttgggaggctgaggtgggaggatcaccagaggccaggagttggcatccagtctgggcaacatagcaacaccctatctctaaaaaaaattaggtgtgtggtggtgtgtgcctgtaggcctagctgcttgggaggctgaggccagaggatcgcttgagcccaggagttggagatttcactccagcctgggtgacagagagatactctgtctcttaaaagaaagaaaaagaaaaaagagaagggggatctgtggcaagagctggaaagtccccagacagctctgaggtaccgcctctcatgggctccgtggattatctcatggcctgtgtggctgtctgtctttatctctagtgacatctctgcttttctctgccaagatttatcccttctctgcagccacttgctgtccagcttcccttctttgtagaatctgcctctgcccaatacctttactttcgtgtggcctctctgggctcctccatatcatgacctgtcagctcctctttaactcctttcttctctcaagtgtttctcagatcagagaccagattgcaatgagagaatcagtttggtctggtagtatttcacgccaaaaagagttggtcaccctttggattatatgcctttggttcaggcacctacccctggtcctggctgttggggatggatggtgactgttatgtggcctttacagggctttaggcacaataaagctttcccaggttcagcctactgagtgctatggctatgacctggacattaaactggccctcataggttcagacctggccatggcaattgacgaaccctaccacagggctcttggaaccctgtgaaagccattttattgtatgttcttggctgttgaagggagttgtagcccagctgatggcttccatttcttttctgtggatcttgctttcatcataagcattgtttaggggtatagcatggaagagggagatcagggcctcagcctggttttcaactatgagattgagcagtcagtattcggttgctcagtctggccatgacagaattggagccrgccctcaggactcttgatttttagctctctgccctttctgtttacagacccatggcacagaaagccttatgcccagacactgcaggatgcagagttatggagccatatcctttcagaggaatgcctggctactcaacagggttggaaagtcaaacaaggatcaacacctacttttgcctgctgtgtgatgggcccgagcctgcaaagctggaccaaatgtggcccctttcctaagggcggggggcagtcaccttctagtaggggaaggaatttagtctcacttctcctttaggaatctggagtattagacaagtcaaagcaagttaatgaggggttaacataacctcagaggaccactttgagtctaaagtccttccagatgtgtcagattggtagcgccaacttgtcagtttctattaagaagtaataggactgggcttcctgggtgtgagggaaagtaggtctgtgcttaaatgtccttccactctgtcacaaacaggagattgaaacttaggtgcctccattcttatctgtaacctctctcagggttgtttttgaggatgcagtgagttaatgcatgcccccagaagcaggggaagggaactgctttggggggactcctatgtgttacactgaaggactcctttaaatgctttatgacgtttctgttctcttgtaactctgtaaggtcggggttatccctgctttctagatgaagaaacaggcttagagctatttaggtcaaggtcacaaaactggcatgtgacaacagagatttaagtataatttggaaggtggctgtttccaccacaccacaccctactggtagggttgttgtgatcacatgggtaacagctgtgaaagtcaccaagagctttcctggcatccagaagcccttgatctagaggcacatcagtctccyctgctgagaaggaggggacaccactccatgctgttgacatctcttgagttttaaaatggagcttttacttcagggtaactcctatttaagtgttcacacatggattaattcctttgctcgtgactgctgcagataaataaaaactgtggtagggcaccaggccctgagctaggccaggcaggtttggacaatttcctaagccttttataaggaaaactgggtttaaaaaaaaaagttgccctgggtacagtgattcatggactggttaggttggtttttttggtttgttttcctcctatcctttttttatatggaaaaaaattatgcatgcttggaaaggaaaatttgtagcttttcatttatcttttacttatcacctgagcctttctccaggaggcagagagtgaattaaaggctggaaaagcagtatctgatgaggctcagttttctgacagcccaccagccccttcctggaccaagtacattttcactacaaagaggtgtgactaatctttcagagcaagtgatattttagaagcagtagttggaccagatgtggtggcgcatgcctgtaatcccagcactttgggaggctaaggcaggagggtcacttgaggccaggagtttgagaccaacttgggcaacatagcaagaccccatctctacaaaaagtaaaaaataaaaattagctgggcatgttgacatgtgcctgtagtcctagctactcaggaggctgaggtagaaggattgcttgagcctaggagtttgaggctgcagtgatcaccactgcactacagcctgggtgacagagtgagatcctgtctcaaaaaaaaaaaaaaaggaagaagcagcagtagtaaaccctgtgaccttgtggccagccagttcatcctgtgaaggaggtctctgctgagtccttttgtaaagtgaagacatcctttagaatgcagtggactgtgtagcatagcggttaagagctctgacttgaggcttaagtgctacttactggctgtctgaacttgggccattcatttgacatcttttaacctcagttttctcatttgtaaaatggaatgaataacactatcgtataggattattgaaaagattaaatgcattaactgcagtattccttgcacattatctggtatatagtaaatgcacagtaaatagcagctgctattatttattgcaaataattacagccattttaatttatagatctgtagaattagagaatcactttgagactaatttaatctccatcttttacaaatgaggaaactaatccagagagggaaggggcttgtcctaagtcaagtggctagttagtgccaggagctggcctggaaccatgagtcatgttcctaatgattgttcatacttacaccatatttacaccccacaaagaacttcttgtcaataacctttctgggctgggtattcactttcctagctggggagtggggcacatggaggtggagagggctggagtgttagagattgagctagaaagccttcaggttctatgggtgaggttgggaagagacacagttacatagttatgggtcttccagtgaagagggatcaccttctggagttctatcctaaaggcttactctcttagacttgaaattctgttgctttttgaatccatctccagactcaagatagggatattgtgtctggaattggtgggttcttggtctcactgatttcaagaatgaagctgcagaccctcgcggtgagtgttacagttcttaaaggcggcgtgtccggagttgttccttctgatgttcagatgtgctcggagtttcttccttctggtgggttcgtggtctcgctggctcaggagtgaagctgcagaccttcatggtgagtgttacagctcttaaggcggcacacctggagttgttcattcctcccgaggtgggttcgtggtctcgctggcttcaggagtgaagctgcagaccttcgcggtgagtgttacagctcataaaggcagtgtggacccaaagagtgagcagtagcaagatttattgcaaagagcgaaagaacaaagcttccacagtgtggaaggggacccaagcgggttgccactgctggctctggcagcttgcttttattctcttatctggccccacccacattctgctgattggtccattttacagagagccgagtggtctgttagacagggtgctgattggtgcgtttacaatccctgagctagacacaaaggttctccacctccccagtagattagctagatacagagtgtagacacaaaggttctccaagtccccaccagagtagctagatacagagtgctgattggtgtatttacaatctcttagctagacatagaggttctccaagtccccatcagactcaggagcccggctggcttcaaccagtggatcctgcactggggccgcaggtggagctgcctgccagtcccctgccatgcacccgcattcctcagcccttgggtggtcgatgggactgggcgccgtggagcagggggcagcgctccttggggaggttggggccacacaggagcacccatgggtgggggtgggagggcggggaggctcccgcatggcaggctgcagatccggagccctgccccgtgggaaggcagctaaggcccagcaagaaattgagcacagcagctgctggcccaggtgctaagcccctcactgcctggggccagctggctgctccagagtatggggcccgcctagcccacacccacccgctgagcccatgcccacccagaactcgcgctggcccgcaagcactgcccgcagccctggttcccacccacgcctctccctccacacctcccagcaagctgagggagccggctcccaccttggccagcccagaaaggggctcccgcagtgcagcggcgggctgaagggctcctcaagtgctgccaaagtgggagcccaggcagaggaggtgccgagagcragcgagggctgtgagggctgccagcacgctgtcacctctcaatatcttccagggaggaaaggtgctgggggaaggatgggctgcacaggaccttccacctgatttgtgatgtttattttctgtcattgaaaagttaaacgggtgaaagacctgaagcaagtatggcagagggtgatcattggtactgtgtggtgctgcagtgttttgcttttttctgtttaatttctcaaaaaagtcagtcacatatgcagttagccaggcagtttaaagataaactgtcagtcacatactttagagcagtgttttattttattttttatgtttctgggaagcatcaactccttggagaatctgattaagctaatgattctttttctgaaaaaaactgcttttgaaaaatgtttacaaagaatgagaaggagctccatgagccaacgtggaatgatttcctgcatatatatagttragtgttaaaaaaaaaaaaaaaagtaagagtatctatagtattccacccttcatataagaaacaaggagatattaaaaaattcatgtatttgcttatttgtgcagagaaaatacaagaaagataaacctgaaactgaagagaaacctagggtgaatgggaagaaaggggcatgaaaatagcataatacggaggagagtgacatttctctgagcatacttttctgagttttctctcagaactatagtgatagctcacaaactcagaaagtaaataagtaattaaaagtaaccatgatgtgggggaacccaaaatggaaaacaaaaatttacaaatgaaaattagccaggcatggtgatgtgcctgtaattccagctacttcagaggctgaggcgggagaagcgcttgaacrcaggtggcggaggttgcagtgagctgtgccacactgcactccagcctgggcgacagagccatagtctaaaaaaaaagttacaagttacaaatgagcctgtgttacaagtgagtaatgtaaccacactgaagggcacgtagaagaaaagaactgaagtaactggaaaacagtattttgcctggatactctgaggctaaagacagaactttacacaaatactgtgtgctattagtaaatttgtttctcacaggggtatgggttagaagttcagaaactgtgtatactaagattgaacaaatacagaaatacatgttagataataagagccagctttctccttctttgagaaagaagttacaaataagaaacagaggaaggttagaatgaaccatgtgatgttagattggaattgatctatcagtatgaactcttggctttttaatagatatgtagatagatacagaattaaacagatttgtgtgtgtgtggtgggggtggttagtatacataactgtattttctagctctgtctgctgagaagttctggaagaaataatactccaacagcaatgaacttagagcctagttcctggttttaagtaccattccccaataaaagcaaccagggctccttggagaaaggcttgatccctagggctgggcagagaagacacaagaggatagatatcttgtgttgcagaaagtagataattactcaaaaagttggaggcatgttgaaagagcacaaaaactaacccaaagaagcccccagtggccaaatttggaacactttgagcagcaaaataactaatgatagtagtggattataaccatagcataaaagataccaatgagttgtactgatacaagtaattgaaggagtaaataaatgggcagaaggaacaggcagcgcgtagaccaccctgaaaaccatcttctgccaaaagagtcagcaaacttcctgtaaaggactggatagtaaagatttggggccttatgggtcatatctctggcccaaccactcagctctgcttttgtagtgcagaaacaatcatagacattacctaaacaagtgggcatggctatgttccagtaaaacttatttacaaaaacaagggaccttagtttgttgaccctgttctagagactgcctctttagaagattaggtgtctttcactatttacacagtagatcttgttgagttttaggggtaggagggcttcagttgagatgattgtactctgtagctctgacaacatatacttcttggtgcaatttaagaattgcagatttrgagagaggtggcttattttgtctcttgttcagatcttgtttttgtgtgcatattctatatagtggtatgtagtatagattttgcaatcagacacaactggcatggaaaactagctttgttttcactagctgtaggaccttggacaagtcgctcaacttctctgagtctccatttcctcatrtgtaaaatagtaatgttgttgttagctacaaggacagaattttagatgatccactaagaggaaaagagatattctgcatatatcttctctagggggaaaaygggtgagtccgtttaggagttattgttgatctgkggtgactataggactgtggttgttaacacctaggaagacctccgtgtggatggccgtggctgtgaggactaccgatgtgtcgaagtggaaactgatgtggtgtccaacactagtgggtccgccagggtcaagctggtgagtactgtgaccrtggttcaagcccaggtggagaaatgagtaggccctaaggaatgagctgctgacgctgtctggcttttggaatgcaaattgctcttggggaaatcgaagatccgagccaaactcagggagkgggggtctatccagatctgaaaagactgctcacctcctccaaagaccactttccaagtcttagcactgctcctaaaagagtcccccaggggtgtatgtccagaagaggagggaggtggtggagtacctggctgcatactctgagtgaggactcttcttgcatgtgtctgcagggtcacacagacatcttggtgggagtgaaagcagaaatggggacgccgaagctggagaaaccaaatgaaggctacttggagttctttgttgactggtcagtactgtctatgcagatatttctaaagataaatgattttaaagatgaagattcagaaaatgaacctctggtttgctgttgaacccacttttatacttatcattcagccatccagcaggcatttgctgacctcctcctatgtgccaggtacatagtcaggactcttggcttgagtcctgccctagtcttaaccacctggctattgctggccttgttttccctgtccgataaaggaggacatttgccaggcagcctagcacatgattgtgatgagggtcaaatgaaatgattgtgttatggtgctttgaaaaatatacacagtaaggatcatttggtctaaaatgtgctgtttctcttcctactctagttctgcagaaaactgttcatgatttgcttgacagatgaagcctagggtcagccaagcagcctgacaggctgaggaagtggcagctaggcaggcagtatgggtgctgagaagagagagggctctgcagtgtctgcagccagccttgggccagaatgtcacttccttctctggccagctttgtgatctcaggctggttactcagtctcactgtggccaaatttcttcatctaaaaaatgaggataataaataataccatggtgatgaagaggaaatgaatagagtgagtacctagcacagtgactgacttccagtgggctttcaataagtgttatttctccttattttgtcaataagttcaataagtattattagctccacattctaggggtcggggctttttatttggttgctggccaggtcccgtcttctatcaattactttgcttctggaagccaggccttcttgaagtgggtaaggatctctgtgggctcatgctgggtgtaggtatataatgttgaccctgtatcaagatccccaagaccacctccacattcagagatttgctagacttagcatatagtgatactcacagctaaggtttattacagcagtgaaaatgcagtaacttatttgtgacatttctgcccaggaaagcccattagagactcagcacccaagatttttactgggagctggtcacatagacactcgatgcttaatacataatgaagttttctaaaggaaagcaaatgttcagcataaatcatattatttgcacaatataggcacagtggactacccccatcagtttactattgcctgggagccaggttcccggatgccagccaagggccaaccctgcaaacagacccttctgaaaatagcacctttggactgcaatggcagcccttttttgcacaaatgttaacccacttttgtagggtgagttacagtcttccagtctgaacttccatacacggaagctgattctcatagtactcgtataagagaaatgacaaatgagttcagagagagtaagtgactaccccagggttacaaagctaaaaatgccagctcaggtctgtccaacctgtgaatctttgctcattttacttcatgcagcctatggaagccagctttggagggctgctcttggggagtccaagaactatccatgttcatttttctggtcagttttttttccagcccattcctgtcccctactctggtcccccaagtcgtctctcctggttctgctcatcttctctcaccagcctgagttgtcccatggaattggcccatcctttaagtcactgtggatgatggtgaccttgttcaagcccccaacttatcttttcctttgttcttggaggaagcagaatgcctctggtggccttgatctgcctaattcaatgcagtaagcagtcactgaggagcagacaatgtgtgaggaactgtaatttgctttctttttcatctccttcattaccttctacctcattcattttaggcagaccaaagacattcagcccaaccacaccaaagagagggtgttgccctcagatgcttggtataggggatacgtttcattgtggctctgtgtctaaatatgactccaagttagcctgctgctcttatccctttcttgtcccagctgtaaaggatgagtgactctagtgtgagaggattctttgagttgcctcttcccaagatctggcttctagaagtagcctatctttcctggcttagagtggctgcctgctggtctcttttcctcctctgtgggtctcaaaaggatccccacaggcccaagagctccagtatctaggtagttctcctgaattgatttctcaagatggacagtctcaaagtggcacactttaccttctttaagtggctcagctaatgtaatcagccgggcaagtagaatcaccatgagagagtcacaaaaccccatttcctacagagatgggagaggttaccaagcactgatcgctgccacctgtatcagaacctcaattgagtcttcaaggagcataattattttaattgcataaacaagtgtgtccttttattctgaatcagtgaataggaatggcttctggacacccgtggatgtgcccagcaataagggtgccacacacccactcccacctggactccaggcatagggcctctgctggagagctcaaggcatttgcctatccacaggctgaaacatagttgctgcccagtggaaggaaataaattggtggtgatggtggtggtgatggtggtgagggtttcttctgctgctctgagtctagtttgatttaacttcttgttagcaacttccagttttaattaaattgccaggggtagagaggtctcagaaaactaattgattttctgccaacccatttcacttggttttgtctacttgggatgataatacatggagccaagatagacactgtcgccacctccataatttaccctgtttcttgggaatgacgaaaaatctttgatatagccctcacagccctttggaaagactgctgcactgaccctgagccctgttccagagatgcctggcagcactgtcactaaactgggagcaaaatctgaccttttcatgtctttggtttgctggttgtagctgagagtaggctattttaaatgagaatttggaaactttaggaaaaggtggtttctatctaaagcccaaaggaagggaagattttagtgagctggtgtgtcaccctgcgctgccactaggcggcgagccatcaagttgcttctcagttctccgaccattgtgttgatgggtttaggactgtggtttaacctcttagagaggcttgggtttttaactaggggagtttaggagaacatttttcattcataaatgtttcagaatactcygcacttgtcacttccctttgggatcttaactatttttcaatgtgaacacttgtatttttcactaaaattgaaccagaatcttcaagcctgcattggtggttggagtcactatatctgggttccttgcctgcttagtgctgctaaaggggacactgttcctggctgaggggctgggggtgggtacaaagcagagaggcaacctgcagaagccttttgaggctaattgtaatcaaagtctcccaagctgatgagataactctcgcagacacttcaaacaaaggcttgtgatgaaaacctcagaatatacttactattggtctggtacccatttacagggaggcttctacaggctcagacatgagcacatgtacactcagaggaatcagccttagggcctgtgttggggctagatgactactggaggggtaaggcccaggtcagccctgcctaggtacccactagatcactttttctgctgtgggcctggcctgacctggacgtaagacttcatagatttgtaggctagattgattgccaggcaagcaacagtgggcccagtgtctagagtccctttccaggtaggcatggccttgatctcagcctaccccagttaaaccagagatgttccaagcaggagggtagaggtgatgagtcagaaggggtggagagctgggaggggtagcattcccaggatcttaattagtttatccagctcagtaaacaatttcccacaactctggaagagggactggtcatgctttatgaagggtcagaattggttttggtaaatgcagaaagcatttggttttatgcccaaaagaccaagtgtgtacaccccccactgaaggagtagattgtgatgcatatgagcaggcagctacaattaccagcctgtgttttctttctctctctaacagagcagagcagctttttatttagggcttccttggtcaacattccttgactccaacatttgttgtctagtgataagttccaagaccaaagcatacattcatttccctgaggcaaaaggtaaaaccaaggaaagtgaacctgactaatgttagactataaaccaagcttgccaaattacagattcaaggagagtacagggaagcatagaagataagggccaggctgcctgggttagaattttagcttaccaggcacagtcatcatgtggccttggacaaattacataacctctctgtgactcagttttcttgtttctagaatggaatccatacctcctagggttgttgtgaacattaaatgagttaatacacctaaagtactaagagtggtgtctagctcatgctaaacattaaaaaaaaaaaaaaaaagataaggtctcccttcttgtaaaatgagagagttagaccatctggggtttcacagtgtcatcccacaggtcagatcccacctgggagatttttgtttcatgtagggattttttttttttttaaggtggaccttaaatcagggctagaaagtttgccacagcttccatcattctctattagttatatgtggccctttgttcagatacatgtagtaaccttgctgacccctatagccatttgggtttttatcctctggagatggtctctaaggccttttccaggtctacatttctgtctaaatttgtcagaaagagtccttgggctgtgagtgcccagtagtgaagtggaatcctcatttctctattccagcctttgtcttcacacatcagcagaatatggggtctgtggctttcttatgttgcttaaagcattgtaccccatcccccaccctgaacaattgctttccgttttcctagcctcctccccagagtcactgcacagctatggcaccatccagttacaggagagttccttgggctcatgagtctctaaaccttcctctctgtctgactgctggctatggtggaagaatgggtgtgtgtgtgtgtgtgtgtgtgtgtgtgtgtgtgtgtgtgtgtgttttaagccatttaaaaataggtaaaaatttccactttaacccagtgtcaaaaaaaaaccagtggggcatgggtttgttgttgttgttgttattttgagacggagtttcactcttgttgaccaggctggagtgcagtggtgcgatctcagctcactgcaacctctgcctcaggttcaagtgattcttgtgcctcagcctcctaagtagctgggattacaggcatgtgccaccacgcccagataatttttgtattattagtagagacggggtttctacatgttggtcaggctggtctcgaacccccgacctcaggtgatccacccgccttggcctccgaaagtgctgggattgcaggcgtgagccaccacgcctggccaggggcatgcatggttttataggtagattaatttagacagttggacctgggaagctctataaatcatctcccaaggctgtagaagagttagtgcattaatcccaaagaaattagtcacacccaggaggatgtgcccactacattcagggaaaggtaaacattttgagtgtaagcatctctggctggatttgtgtacacagaaatctctgtagatgtatttttaagcacttaagacctgggacttaatattgattgcttagtgtttaaattagaaacaggttgtgttttgctggctgtgcaaagtaaaaacctggtccctgttgacttgattatttcaccataaatgagctgcttttcttggctcagtgcctgagtccagcaaaggcagggaacagcgaggttgctatggcagtaatgaagtctctcttggggactttaaaggggattctgctggctcacagtggtaaaggaggagtacataattagagaggcaaaattttatgtaacaacatagtctgattaatttgggattcattcttccacctatattactaagtgagatttcttttagtgttacacaaatagggtgggcactgccatgggcgttcacacaggttttgctttgcctggaatcttcctgcctctctggcctgaccagctctgctcatcccaggtttgaggtcgcctttaaacctgaatgctaattgacactcctgtgcccctactcccgcttctacctcactgtttgctccctatggtgaaactcccctacctcactggaactgctggctttgggtctgcatccacctcacttagtctctaggtctctggtagctggtgcagggctgggtgccttccagatgggcaaggggtcagaaggctttaatatgtgattttatagagtccatgctgaaaccactggcttcttacctttctagtcctttactgttacagtaaaataattactagaatgttacttacctcatatacatattaagggtttgtttgtattaagccaaaaactctcagaaatgtcctgttaaacacttcagtgtttttagggtggctaatgttgaatcctgttagttttgttgaggttattgggcataaatatcaagaagccaaaaagggaaaaaaaaagtttttctcttgaaaaatatcaaatgaaggaggtaacctactacttacaagccaacaatctttcccttgctttctttcattttccttctcttcagtacagtgatatctaaagtttctgacaaagctctgacatactatcatacatgtcttttaagttattccagaaaggttattgtacttacattgtggtttttatattgagagtatcgtagtgtgttctaaagctgtgaaactagaggtggtgtatatgacaaaacccctctgtaacccagactgcttcattccctaggcctctcagtttcctaggcctgccagagaagagtatttattatactctgaagataagagagttaattattatcggccgaggttcacattaccatcactctcctgtttctctttgactaaagatggcttctgttagatgctattgggaaatcccatcacacacactgacaaatccaggtcacagtgctggtctggttcattacatgtgtctggagtcaggaaaagtggcagatgccatcctttcctcatctcagtgactttctgtcgagcagctggctcttccagcattctacagggaaactggaataaagctttgcctctttgctttttgcacttggaaagactcacccagtttttttgtttctgttttgtatagttcagccagtgctacccctgaatttgaaggtagaggaggtgatgaccttggcaccgagatcgctaacaccctctatcggatatttaacaataaaagcagtgtcgacttaaagaccctctgcattagtcctcgggagcactgctgggttctctatgtggatgtgctggtgagtatcatcgtgctgtactggccacattctacctttgttggaaagactagttggcctattttccttccagtgcttttttcctcttcaggtggatgctttcaacttatagggtgggattagttgggaaaagatggtctcctataataatttttttaaaaattaaatacaacatagatgtaagcagcatatatataatgccattctatgataaaattatagtcatatcatgatagcacctaaaattgcccataaaaattgtccaggaagagtaaaacaagagatggtctctggatggtgccagacagagttcatgggcagaatttaagcaggttggtacattctgtgtggaaggatgattagctctttacatgcattttcatttaaaccttataaacctgttacaaatggacactgttatatttcccatttataagtgaggaaactaagacagacagaggtaaatcaactagcccaagaggtctcagcttgtgagtagtgctgttgagtctcaaagccaggtctgtatgatgtgaacacctggtttgacttcactgtgccattgtttcttttaaacacctcagaacgtgcctgcctttagtttcctgggtgaggccccagaggccctgcctcctcccacacagagtctactcccctgggagtcttttgagtccagcccgtcatttcttcccttgtactttgcctcccaaatactcctctacccaggttttggcactcgacagtaacttctctgtgtagctctaattaatttttttttgtttttttgttttttttttttttgagatggagtcttgctctgtcacccaggctggagtgcaatggcgtgatcttggctcactgcaacctctgcttcccaggttcaatcgattctcatgtctcagcctcctgagtagctgggactacaggcacatgtcaccatgcctggctcatttttgtattattagtagagatggggtttcatcatgttggccaggcatgtctggaactcctgacctcaagtgatccacctgcctcggcctcccaaagtgcggggattacaggtgcaaaccaccgtgcctggccttacggggattacaggtgcaaaccaccgtgcctggccttaattttgcttttgtataatcacgtagcagttggttgcttgtttatatataggctcttgttgggtctgttttgaaccatgagattagcaactacatcttccacttcagatgaaggacaaaaagctaagctattggccaaatagattctttaatgaatgtgcagataaaggagatctgtgaactgatggtgaacttcatgaaaagaaacagcctggctctgcatgttggctctattgagacagggtggagttttctagatattttaaaattaatttgatattggatggagcatagtcaaaaggtagcagtggtaaccattatctagcaggttactgttgcaatgctaccactaataggtaaaaataatgaaattacaaatctgtttgctttttttccatctctgataagtgggatgtaccttgtagtatgattcctactaagttggcaatttttcaggtcctgggtttgagaaggtgggacctggcagcctgtagtccttactgaggatggtagaggcaggcttcatagttgcccagggaggtgcagccccatgacgtgaactctccagttccatcctgtgtctgaagaagtttatgtcccctcccctccgccactagagaaagttaagacacaagtgtgtgrcacactgcatttgtccttttgtaatcctttgttcatcctcagtattcatgcacacttgtagttttgtaggatggcccagtgatggggactgatgtgcttttgattcagtcagttaaagtcaaagcaacagaagcctgttctattagggaaggcttttacaaaactgatgactacygggacattatctcagctcagaagcagccctcttcagtgagcaggggatggatacatggtgcgcaggaatatccaggggaatgtgtattgtgtccctgtcatctgtagacctttctttttaagactcctggcatttggatttcttctgaaatatttgttttaagggttttgcttattttggaagaagacatgagcttttaaaatgttgtcattttctgaccgggcacagtggctcacacctgtaatcccagcactttgggatgccaaggcagatgaattccctgaggtcaggagttcgagaccagcctggaaaacatggtgaaaccctgtctctactaaaaatacaaaaattagctgggcatggtggtgcccacctgtaatcccagctactggggagactgaggcaagagaattgcttgaacctgggaggtggaggttgcagtgagccgagatggtgccactgcactccatcctgggcaacagagtgagaatccatctttaaaaaaaaaaaaagttgtcatcttcagaaaagtttttaatgaattagaaaagcatttttgaaaattgtattattgatgaggccgatccattttttggcattcacatagttttcatcagtggatgggtgatatactgaatagattgagtccatgtttgaagcgaggtggtggaaatctgtgaagcaatccttgaagcaagatagtagaaaagaaacctcctaatttctttttaccaactggtctggttagtcctcagacagagcccatgttcaaacagatatttgctgggcaccctgccatgttttcatacttacttacttcaaacctattacagtcagatgacccacctgtttccagtattggtttttttcccctcagttcggttattttatgagagtgaaaatttaacttcatggaaatttcactttgctttgctctttatagttctctaatggcatcagtttttactccaagagggaaacctgttagaactttgctgcactaacaacacacagctgacctttggtggggtgattggtcacaagcctgtcttttgatgggttctttcacaaataatcactaaccttcttcctcatagcaccccttctgttgggctctggggataaaaggatgaacaaaactacagagtcccagcctttaggagttcacagttcaactgcagaggagatagactctaaacaaaaacagaactacatgacttttctttctatgtgtgacttctcacctttcttatttggggcagcccagtcggctttattccataacctcaggccaaggcctctctaaaatgaggacagaaggatatgccaccttccagttaaatgtgctctaattttccctgctagatgagcatacgtaagtgcactcaacactttcgctcatgggcagaagcttgtctgagagactttagtcttcattataagtaatgtaaaacatgtagtatttcatgtctgagcatcagatatacattgatcattacatacgagaagtaattacactagtaaatgtgaacctagtagcagccgcaacatcagtagccaccgttttctccttgtttggaggccaggcatatgttagcaaagattagagtaacacttggagtacaattgggagctatctggggcaaaataaaggtgatcagtcccaccttcagggcagccccaactgcctgaagtgcctgtgagaggagcccacccacaagccatggcctctgagtgttggtaccacagccctgccaactgtgaccttgtgtgcatgggccacgtaagcacagctatgacaaggcagtgcctgtaattagggtgaaggactgtgtcagtgagttgcagtcactgcatggctagccaggagagaagccacatgttatctttattttataaacacacagtcagcatttcttagaaatcagtgtccttgaccacagaatagatttagggaaagaaaaaaaaaaatcggtgtcctggccgggcgtggtggctcatgcctataccccagcactttgggaggctgaggtaggcggatcacttttggtcaggagttcaagaccagcctggccaacatggtgaaaccctaaaatacaaaaattagctgggggtggtggcgcacacgtgtaatcccagctattcgggaggctgaggtgggagaattacttgaacctgggaggcagaggttgcagttagccaagattgcaccactgcactccagcctgagtgacagagcgagactctgtctcaaaaaaaaaaaagcagtgtcctttaactggggtaatacctaaagtaataagtgatgcttggttttttttcctttttcaattcctgtctcccttagcttctggaatgtggtggaaatttgtttgatgccatttccattgctgtaaaggctgctctcttcaayacaaggtaagtcttcctagaaacagctctgcgaacctgtggagaaccagagcagacacttgtaatggaacactgaggaaatttctattgtagctcatatgtgaagataacagggggttttaacattgaaaatggtgacatctaacgttaaactccagaaaagatagatttcgtgaattaaaactacatatatacgtatattctgtatttattttttgtattgttatttttataaatagacacctaccatttagaaaaatattagaaaactacagagaagccaagaagagtagacaccacctacaggccaactatccaaatactattactgggtgaactctatgggggcaaggattttgcctgttttgtacttgcctatattcctagcaccatgaacagtacctgacacatagtaagtgcttgcatattgcttgattgtacacatgtgtgttctaaaagcagggtaacaggcttccctttggtttaagaagaggaaatggctattccacatggttcagctttccaaacaggttgtgtagaagggacaagttgctatgcttttttggagttgacatttattctgactgattgacctttcccccttttatgctccaagtactttgaggaaaatttgcagcatttatgagtaaatacgtgggatagggtgttcatcctatgagagagcctacattaaggtaacagaggatcctattaaaaaacgaggattagaaacttctagggatataacctaaggacataattgaataaatgagcaaagatgtttattctaggatgttcatcacatcctagaataaacattacactgctttgtaatggtaagaaactggaaacaacctgagtttcacaatggaggggattgaagtccacacagcagcctatttaaaggcatgttaatatggaaaatagttcactaaatgcagtcccctcatcctggtttttgtttgttggtttgttgtattttactttggtagttcttatatgtaatgtgtctggaaatatgtacccccaagtaatcactgtaattatttttcagtgctcatattttggccaacataacatttacctgttttttagagcttttctatgatgagtttagactccctgtgtaatttagagcagacaaaaattgcaggctggaatatttgctgagaatgaaagctgtagagtcccccacccctagctgtgccactaggctccttgttgagactatttgaaatgtgagcctggcactcttggccaccgtgggagcttgcgtgccagatcccacagcagtagctggtgctcgggccctgttggggaaggaaaggaagctgtcatctgatttatcttgagcctcagaaatgactccccatctgccagctggttcctataggcacccaggcaaaaagagagattgggaaccagacaaggctgtttagctgtgggggagttgctggccaaactgtataccagaaaggttaacccagctgctcaggtaggggaggacacctgtcatgggcacagccatagtctcatcctcagaccaagaacagccctgcaggcagcaaggaatggggactctaaggcatcaagtccccctggtatgtggagagactattggcatattcagggtcctttagaagggtaaaggccacctgagggtattctttagcccttctgcccaggcttgttgtagccaaagggttgggaaattgggagatactgtgcgtgcgtgcgtgcgtgcgtgtgtgtgtgtatgtgtgtgtgtaaatggttgacaacttgttcaaataggatattacttagtagaacttcctctgatgggaaggctccaaatggggaagacccttacagaactccttggcccttgtcaacattctctggctgaagctcccctgatctgatctagatgttgccttgtgtatggatggccagcagggctcaatcatggggggttttgttagaggaactgggaaaagtactaatgctgtttccattacagtagctggatggaccacctcttccttcctggctcctccaacccagcctggagtgaattgactttataggttaaatgtgtttttcagtacccagctgaagaaacagaatgttgccagcaccccagaagcatcccacaccttctgtacccccatgcaattacactcactgatgataaccagcatcttaaaagaatagattacttttgtacttgatataaatggtatcatatactatgttctgttttgtgtctgcctcattcactaagcattgtgttttgagagatctgtgttgctgccttagtcatagcttgctttttgctgtatggtgttccattgtgtgactttgtccagtctgctgtttatccagtctactgtccagtctgctgttgtttatcagtctactgttgatggccatctggttcatttccagtttgaggctattacaaatagggatgggcatcatgaacattttgtgcatgtctttggtgcacatatttctctatttctgttagggaggagtgttctgggttatagggtatggctatctttagttacggtagatgctgccagtttcacaaagtgttttaccagttaacacttccaccagcagtgtatgtaagagttccgggttgtttcacatttttgtcaactcttgctttttttttttgagatggagtctcactctgtctcccaggctggactgcagtggcgtgatctcagttcactgcaacctccacttcccaggttcaagcgattctcttacctcagcctcccaagtagctgggattacaggtgtgcaccaccacacccagctaatttttgtatttttagtagagatggggtttcaccatcttggccaggctggtctcgaactcctgacctcaggtgatcctcccgccttggcctctgaaagtactgggattacaggcatgagccaccatgcctggcgtttttttttttttgtttttttttttaatagttattttggttgtgccttggtatcacagtgtagttttaatttgcatttttaatagatatttaaattgagcaccttttcttggtttattggctactcagacagcctcttttatgaagacatccaaatatattctacgtttgagtcttttgtccatttttctgttgggctgtcttttttttgtttaataggaattctttatgtaatctgtcaggtagtattttatctccccagattatatttttagtttttaaatgatgtcttctgatatacagaagttcatgatgttataattgaatatgtaacttttttctctttctgtatcctgttcaagaaatagttgtctactccaaggtcatgcagatgtttttttctaaatgctttattgtcttgtcttttattttttatatctatggtctatttggtatggcttcgtgtgtgtggtgtgaggtagggattgagattcttttttttccattgggatatctgattgacccagcatcattttctaaaagatgcctttcctcattgcactgcggcgcctcctgtgtgcttttgacagggatgacagggatgaggatgataaagaataggcatagcgtgtctttctcttgtgagacacagggattccaactcctattctcaatcttaaaaagaagttatttttcctcctccaagtgggaattttactagtgcttctgcttccaggataccaagggttcragttttggaggatgaagaggggtcgaaggacattgaattgtcagatgacccttatgactgcatacgactaagtgtggagaatgtcccctgcattgtcactctgtgcaaggtataacttgtattttatggtttttgtcttccctgtgggtgtgggtctcctctaatcccaacctgctgaggttacttaataagttaagaagttgtaataccacacaccatatagaagtagcttttacccaaatccaataatttggttatactagaaaccactaccacgagtagctctttcttttctttttaattggaagatatgacgtggtcctgggagccatgagtgtgtttgtagtaatagtagccagagtttgttaagctccttccacataccatgtgcttcactaaagcaccatgtcttttaattacctcaactctatggggtctagggtggttgagtagtggcagggtggcgaacactgtcccccctatgaaatgggaggttggagcaggtcttgggtatcatgagtggttttcacatagagggctgtggagctgaacatcaggctgatgtgatatataactaatgctgccccaggctgtgcaaagaggcctgtattggctattgactgggattgtagctaattccactcaggattcattatctcaaaataaagctaaacaggtcaggtttaattccactgaaatcacttcatgaacaggatgtggtgaagtgttcagacaacaggatggcaggatgttgggtcttggctttttttttttttttttttttttttttttgagacagtcttgctgcaacgcccaggctggagtgcaatggcgcgatctcagctcactgcaacctccgcctcccaggttcaagcaattcttctgcctcagcctcccaaatagctgggattacaggcacgtgccatcatgcctggctaatttttgtatttttagtagagacggtgtttcaccatgttggccaggctggtctcaaactcctgacctcgggtgatctgcccacctcagcctcccaaagtgccgggattacaggcataagccaccgcacctagccggcttgttctttcttgttgtttatttgtttttttttttttttttttttttgagacagagtctcgctctgtcgcccaggccggactgcggactgcagtggtgcaatctcggctcactgtaagctccgcttcctgggttcacgccattctcctgcctcagcctcccgagtagctgggactacaggcgcccgccaccgcgcctggctaattttttgtatttttagtagagacggggtttcaccttgttagccaggatggtctcgatctcctgacctcatgatctgcccgcctcggcctcccaaagtgctgggattacaggcgtgagccaccgcgcccggccttgttttgagacagtgttgctctgttgcccaggctggagtgcagtagcacaatctaggctcactgcaacctctgctgcaacccccccacccgccccggctcaacctcaagcaacccttccacctcagcctcccaagtagctggtaccacaggctcacaccaccatatctggctatttttttgtatttttggtggagacagggtcttgccatgttgcctgggctggtctcaaactcctgagctcaagcattccattttcctcagcttcccaaagtgctgggaggcatgagccgctgcgcccagcctttggcttgttcttgagtgtgtcccttagcatggaccctcttgattcccccttgccatcagtgaaaygtccatgtggccttgtgtgtgaatttctcccttgtgcccctctgttggaaagccttggtggcctttgtcttggttggtctctgaattctagttttaaaccaccttgccctgtttttccatatcgtgtttttattgtaccacccacacagtggcctgtgagaattgttgaacaatccctcagctgttttcctcgtgagcagaatctaaaataagacctggaatgaccagtgcaaatacttttgcctggtgtagagattcccaccacgaggccatcaggggtgggactctggggcctgcgtgacccaccgtgtgccacgcaccctgcctttgcagattggctatcggcatgtggtggatgctactcttcaggaggaggcctgctcgctggccagcttgctggtgtcggtgaccagcaagggagttgtgacgtgcatgaggaaagtggggaagggcascctggacccagagagcatcttcgagatgatggaggtgaggccttagttctgaggaaggtgcagggacctggccggggtgcctgctgcttcctgctcccttggtcataccgtggggattctccccattcacagccttgaccccaaacttggagrtttgggaacagctggtttgagccaggggtctgctgacctaatcaaggggggttgtgggggtggatactctggactgggaggtaaggagcctaccagtaaccattaattgtcctcagtaagtacccccsatctcatttctatgtgtctaaataagactgttggactttcataatgtaaagagccactcgtaactccaaaagtgcaggcctttgtgacttgatgagggaatagaattcttggctcactgcttcctgtccctagaagtgggtgagtaaaggtggaagcacgggctgaactgtggctgtctcccaaattcgttacagctctagaagtgtttaaatggagacaagcagggatggtaagaaatctgacccactggagttgggttgggttgccctcatccctagcagagccatcaaggcgcttctacagttctctgtactgtttgccccacatgtctgtcacctcactggcctggaagccccgcagggcagggacagggtcctgctcacctgtttcccagaccttctttcccctatatccacctcacctttctgactgattgactgactgaacttccaggaacagagttagcaggatctgattattcatactttcttgcaacctctatatcaccacacatgcccagagatcattgcttaatagcaagcactcttcttttgtgtttagaaacaatgacttcatactgaagaatccaagaacatgacatctactttctctctttatcatgttatttaaaaggccaaaatgagcactgtatatagcatggagttcccaaccatgggctgtgagggtgtactgccctggctgcaaacctggctctgggccatagtccccctcatctgcaaagtgggactgataatagtaatatctgcccagacactgctgaggttgttattaggatgatgtgaggtgtagaggagaagcacatgtcacagtgcctgatatgtcatcagttctcagctaatggcagctcttattctctgtgctccatgaagcaccctgagttcaaatttctccagacttaatgctgcataaattctaccaaagtcctctaggcaagggactgtcaaaccttgttttagaaggtactcttccccctcccaggagagtttatgagaatttctttaaacagcaacaacaagcacagtaaacaaatagctggagtttattgtgtgcgtactatgtgccagatactgttttcactgctttaaatatatcatttagtcctcaacaacctgtgaggtaactattattattgtcctcatttttacagatgaggaaactgaggcacacagaggataagcagcttgcctacaggcctccctgctcataaatactggagctaggatttaagccaagactgtgtgcgtccagagcccctgctcccagccactgtgcaatgtcagccttataaaccagatctgccctggctgtcatagatggcagaaccagagctctgttcagtgagctgagctttgtcctcccctcaggtttggggagtgaggtctgctaactctggacaggggactatagctctgtggccctgtcttactgtttatctcacacagggatgcagcaatctggaaaatgacttggtggagctgagagccttgggggtagttgtgcaggctgccacccctagcctctgcagttgctttcctgcatctggattcagaggcgtcaaggccctctcaagtcctggcatcctgtccatctcatctcctcttgttgtcctctctccccaccctcatgtatatgaataatcagtacccctgtttgacagattcagacttttttttctttttctaatgttatgggaaaatctttccaaaggccctttttttttttgagatggagtctcacactatcgcccaggctggagtgcagtggtgcgatctcagctcactgcaacctccgcctccctggttcaagtgattctgcctcagcttcccgagtagctgggattgcaggtgcccgccaccactcccagttaatttttttgtatttttagtagagacggggtttcagtatgtttgccaggctggtcttgaactcctgaccttgtgatctgcctgcctcagcctcccaaagtgttgagattacaggcatcagccaccacatccagcccccgaaggcctttttgacctttaaccctgactttgcatttcatagaggtgatcacttcccagccttttagatcgaaatcatcttttcataagagttttagtcatacttgggatctcatcccatgttacagttaggggccaggggagaagacacacaagtcattactctggggaggatacacctgtaactgaagagattgaggcagggatttaggcatggatgtttttatctcaacattgttgagaatggaaccagtggcagagttgaatccacactgctatgggaatgtgaaagacctgataaggtagagatttgtggttggttctttgtattcttaaaatgattcttgggcccagagacagaataacagtttcataaagaaaaatatatttttttatattggggtggtggttgttttttgagacagggtcttgctctgttatccaggctggagtacagtggcacagtcacagctcactgcagccgtgaactcctgggctcaaacaatcctcccatctcagccccctgagtagctgggtctacaggcgcataccaccatgcacagctaatttttagttttttgtagagatggggtttcactctgttgcccagtctggtcttgatctcctggcctcaagcaaaatcctcttgccttggcctccaaaagtgctgggattacaagcatgagccactactcccagccatattgagtttttttgttttgttttgtttttgtttttgttttttttacctctcgtgtctgctctgtagggactgattattaattttgtgggttgtccctcttgatgtgtttcgattctaacatttcactgcctttagcatctcagcatggcagtaaacaccaaagatcccatccaggtactgactttggtcacacctgagcagttctgcttagaggcttcatgggaggtgaatgagaagctgcttactaaaatgtccttggcatcatctgtttcttctccagacagactctggattccctgtggtctccctatagtacagtgtcacctggctgtacccaagcccagatttgattgacaactttgttgcttgttgcagtggcagcaggatagtgaagcatgagctaatggccagggcaggctttgctgctctctgtttgttgcctggtgggggctggtgtttgtctctcttttttatttttttgatatgacgatttttacaaaatttattatgttgttggggtctgtggtttttgttttaatttgctttaattaaataaaagtcctctaaggcagatggaatgtgtacaatgtcagaaagactagctggcagaaaggaatgcttttctggtcagagtgtgtgtgccttacaagggggtgtgtgctctctcccgtcccttctccacagactggcaagcgtgtgggcaaggtactgcatgcctccttgcagagtgttstgcacaaggaagaaagcctggggcccaagagacagaaagttggattcctgggatgatttgcacatcaactgctcaactgtggattgttttttacttttccttttaaaccggttcgtatatatttttcttcgctgttacgaatttacagcagcatttgtacatgtaaaattaaaggctattttctggtctggtttggtatgtctagagttcttcagttgaagccaaggcaccattcagtgacccatctgggtctggcccttatctagtgagtggcagacaaatccagagctctgccaccaagggagacccccacaagctggagtaaagacctgacagaaactggtttacaggaaatgcttatgatatgtattttgtgaatttttttccccttgaagaactttaaaaataagaatcwcaaagaaaagttcattcaccttgtgtatttgggtggttctgggagaggaaaaaagaggaggcactctgctgcaggtacacacccagggcgtctgtctgtctggttagccatcccaaatcctgggaaagtccagctctgacttcctgccctccaagagatccgaatggaattccctaggttcaggggctttagtggcagccactttggcccttagccatcctttcttatcactcttgttttgaaattgctttgtgttttataaccactccctggtgtttcctaagattttgttttgtcagcattmagaaggcagctttcaagatgttgtcatttgataattcagctgccttcatgctctcagcattgaaaggaagactatgcttgctggcccagaaggctcttcctataagcctgtagtctcactgtgcagtgtgttaaaattaagtctcttcatgtgtagagcagcctttgtttttttttctaggggaactgaaactcctaaatcttaaaacaccctggggaaggagctgattcacgaaggagagcgtttcaaccgtggcatttgctctctgcattccagttagcaaatggggtaaggcgttaggaatttatcaccaaatggaaagaacataatgtgagctgaagcccttgggactgcttccagaggtcctggtgtgggcgttcctcccagcaaggccaggtccatccctgtggagagaagcagctgcctagacttgggcttaatgggggagcttctgccctgttgagagcatagcctgggttttcatcttttatgtttcttcagtgactatctacaggcaccatgacagtgttcccaacaaggcagaaatcagcctggtctctccttccctgctcctggttgactgcccgtgacatgacaaaacattggcagtggtggcgcagagatgcaactcgagtgtgaataaagtttagaagcatttgcttttgatggttgattccagtggatcattttgagatgcataaattagaatgggtactgtcatatatgtcagactcagctctgcttcacttcccttcagacagacagatgaggctttgccatgccagtggtatgacaagcagctaccagcttggatggctggctaagcacttccagtaaaaatggagaaagaagagaaaaagatggtggaatctgtttctagccaccccatacctttccctgaaggccacccctacatgtaatatacgtatattgcaaatgaaacaaaacaccatatgagcagggactctccaggagaggcatttattggaaagatctgattgttgcaactgtcagagtgagagaagagaaaactgaagacagagactggcaaagacttggaaaaatattatcctgggacagacctgtttgatccagcagagccacagctgtctttagtggtctttaaataaacattaggtagaagaacattgaagttggtcaaagtaagggcggagtataagaaatgcaatgttaaataatattcaagtgggtttttgtctctgattctttagtcttccaaatcacgagttaattttttttcttttctttgttcttagagatagggtctcactctgtcaccgaggctggaatgcaatggtgcaatcatagctcattgcagcctcaaactcctgggctcatgtgatcttcccaccttcctgggactgcaggcatgccaccatgcccagcaaattatttttttaaaatgagggtctcactatgttgcccaggctggtcttgagctcctggcctcaagcaatcctcctgccttggcctcctaaagtgctgggattacaggtatgagccactgcactgggacatgagtttagatttttttctcgttgttgagacggagtctcgttcttttgccaggctggagtgcagtggcgtgatctcacccactgcagtctctgcctctcgggttcaagcgattcccctgcctcaccctactgagtagctgggactacaggcgtgcaccaccacacctgggtaattttttttattttattagagacagggtttcaccatgttggccaggatggtcttgatctcctgaccttgtgatccgcctgcctcggcctcccaatgtgctgggattacaagcgtgagccacagcacctggccgagtttagaatattaacagtagtttgtttgctcagtaaagccagttgtctaacatacaaactgccagtagagaataagtcttcgctattccagactttttggaaaacaatctggcagtgtgcattaaaagccttaaaagaccgggtgtggtgactcacgcctgtaatcccagcactttgggaggctgaggtgggcggatcatgaggtcaagagatcgagaccatcctggccaacatggtgaaacccatctctattaaaaatacaaaaattggcatggtggcacacgcctgtaatcccagctacttgggaggctgaggcaggagaattgcttgaacccaggaggtggaggttgccgtgagccaagatcgcgccactgcactccagcctggctacagagcgagactccttctcaacaaaaagccttaaaaatgtttgccctttgacctagtaattctacttctgggcatgtaatcaaagtaaataatttatgatacaaggggagtggaaacattaatacagaggagtttatcccagtgttatttatacatcccaaataatggccataaagtaactgctagttagtggggaaacaatgttccatgcattgctagatgcctctgatggattaccttctgtcctcagcctcgcctctgcctctacggcagtcagaccgtagctaatagattatgtgttctgagggttaagacatgggcagccaatcaggattttactcaacttgtcaaaattaaaaataataataattggagcataaaaagcttatgtcaaccactataatgggaaattccagtccttcacccagtttccgtaagccagttcacagatcaaagtccattgacaggagggaggttggtgtctttaaataagaatcctgtaatatcaccatcagcacctacaataatagttctccagtctggaataccagcattgaggaaaggtgatttgaagccttttgaatctgggttttgacttgatgcctgtattaggagacctgaaatgccaccaaggctctccagtcaaaggggatgggggatggaggctaggtaataaatggatggtacaagtaagtctggctcacaatggtcattaggtcctgggataatttccttccccaaatgtgtaggtgggatggatgtggtacaattgagatgtcataaatgggatggaatgaaaaccacaatggtaagaagggtcaaggttggaaactgcctcccttccctggccaagataataaatcagagacaatattggatcttgggagaaattgcagagattaggaccaacatcaaagactttaaggatgcaagggtagttgtccccgcctcattgccatttatcttatctctgtggcccctgtaaaagccaggtgaatcatggtagatgaccaccaaacacacgagagagctccaatttccactgctttgttggatgaagtatcttcactaagattaatcagcacagcctccaatgcttcgtatgtggctataagttaggaaaattcttccttaatccccattaacaagaagggtcaaaagcagatctcttatgtggaaggactgcaaaatgtgttcagtgtcttgtcagcggtctatgttaatcacctactttttgtcacagtgatatcttcagggccatcgcgctgatctatttatgttgataaaatcatgtttattagatctagtacataggacgtggaaagccgttggaagtcctagtaaaagacacatgcctgagagggtgggaaataaaccccttgaagattaaggagaccaccacactgataatgtttttaggtatccagtggtgtggggcattctgagagataccccctctaaggtggtagattttgaaccttgcacccaccctcatccccactaccctcactgagaagtacagcacttgttgggcctctggattttggagacaagaatgctgtacttgagaatgctgtctcaatgcatttattgagtaattcacaaacctaccagttgtgaatgggagtccagaataagacaggactctgaagcctgtttaagctgcattacaagcatccctcctgctccatgtgacccagaaattccaacggagctagtgctatctggggcaggtaagggtgctgtgtagtttctggcaggcccaacaggaacgttgtagcacagaccctaggattctggagcaaggccatgtggtggaaagctattcacctccaaatgagtgagtttgaaaagaagtttctggcttgccactgggcccaattagagactgaatacccaaccctgggacctcaagtgacctgagccacccatcatgctggttattgtcagacccaccaggtcataagtttgggtgggtgcagcaacaatccatgcaacatgaaaatgtacattcaggattaggcctgagcagttcagtgggcacaaccaaggaatataccaggtagcccagattcgtctgtcacccctgttcgccagtgcctctcatccacacttatgacctcatgggggaggggactcctgcagccagctactggaagaggaaaaccccaggtctgccttgtggatgagttggttctctatattgatgtgtgccccaaagggactgctcctgcattacagccctgcaggacagcagtgagagaactgagtgcagccagtgcacttggttgttaagtttgcacaaagggataagggtacacgtggattcccggatagtagggagtaacttggctagttggacaagggcctgaaaggagtaagatgggatgatcagagaaaagggatttgtatggacctgtgggaatgggccaaaaaaagcgcagatagtcgggaatcgtgttaatgcccatcagaggacattttccaagggaggtgttcaacaagtgttttgacttcagttctgggtaggatatgtaggtcatggtggaccaccattcatgctgctgcagctaaaaatgctgaatgcatttcaagagtcatatcattaaagattttgggaagctctggaagtaaagaggatttcatggcctaaaattccagagaagggggagactttctgaagtgagcaggctgtcactggcatttccttccctgggggcatttgcagattctggacgtggaataagaatcaggcttgggaacatagaggaactctaccggggaaagggaaacctgcaaaacctccagcaaagctgtgtagggatagtgtgatgatttagaaactcaaagatccctaaacacacagctgggtttatatttgccaaattctcagacatgatgggaagtcagggagtttcagctaaagaagattgaaatctcctgtagcattctatagggctatctgtttttctcctcttgtgtgaactattatagctgagggcatcaggtaagtgcatgcccagtttattattcccaaagttacaaatcaggtgattaagttactgtcccttggagtggaaggaatcgaggtgtggaaagaggctatcaagctccttgacacactgggacagcgtggtggctcagaccacccctcctccttcccacaaccttgcaggttgctcagctgtctcccatgcgagacctcagtttgctccttgaaagaatcccatgtgcaagcagggtagagattattaccccactttacagaagaggagtttggtcttgagtaactcatccaaaacgacacaagtgccaggtatctcaaccaaatttggaactcgggactccattctctttccactgccacactacagagctttaaggataaaacaacaaggactgtgagccccttgagagctaagatttggttgagttaggacctacctaactcagggcccggtacacagggacagagccaatacttgaatgaatgacagagtactaggccaacaaagtttttttttttttttttcttagagacagggtcttgctctgttttccaggctggagtgcagtagtatgatcatagttcacggcagcctccatctcctgggctcaaacaatcctcccagctctgcctgccaaagagttgggattacatgtgtgagcccctgcaccaggctgtctatatgctcttacctttgaagggcatgtggaaagttctctgcctctgttatagccgggccacatttctgttgacatggggccagtggaactaaaaggaaacatctgtgccgggtgagggttgcgggtggggtagggggctggaatggctccatggtgggccagaagtttgcatgttattcgggctaatatgggtggagtgaccaaagcctgttttgtataactgagacttccagcagctttgagaaaagaaacaacaccaccacacacacaaaaaaaccttgaaagctgaaatatgcctttagagctctcttcctctgattttttttgcctgttttgttattaagatcattctttgtacagggagattagtatgaaaagactgggctgtgagagtggtgtgttagtgaacagacacttccttgagggttggggtcgctcatgaacattaatgcagcatcactgtcttggctgaagccacccccacttgccgcgccatgggccagttgaggtcttgtggacagtgtcagcagatctttaatgcaaggaagatgaaactgatatcatcttccatatgtagaaggtaaaattggctccaccagggctatcggtgaatccattgcaggtggctgcaatggcagtccacacctggccagggagagttgggggtggacaagaggatctggatatttaatggccataaactcaacagtggcaacaaatgaggcccaggtgctacaaagagcccatgaatctgt

SEQ ID NO: 93416 - DNA, 13744 bp, Homo sapiens
tgtataagctggaagacaaaaaattctaaaatactttatatggattttaaaactggcaagtaatgattcctttgagaaaacaaagatatcagctatgctattatgatttatacattggtttccatccatgcttcctgactcataactcccatagtccttgttacagtaaacagaaactctctctctctgaccttctcctgccccccattcacctgtccactgcagaactctaatgtgatcgtgggtcataagactctcactccaaagagtgtcctgtcctgtacactggggaaaggaatgctacacagaagccaaaaattatctggacaggggttggatgcagtggttcacgcctgtaatcccagcactttgggaggctgcggagggaggattgctcgagcccaggaattcaagaccagcctgggaaagatgtcgagaccccatctctatgaaaaataaataaaaaggccggacgcggtggctcatgcctataatcccagcacttcaggaggctgaggtgggcggatcatgaggtcaagagatcgagaccctcctggccaacatggtgaaacccccgtctctactaaaaatacaaaaattagctgggcgtggtggcgcgtgcctgtagtcccagctacttgtagtcccagctacttgggaggctgagccaggagaatcacttgaacccaggaggcagaggttgcagtgagccgagatcactactgcactgcagcctggccgacagagtgagactccgtctcagaaaaaaatatttttctttttatgtattattattattattttgagacggagtcttgctctgtcgccaggctggagtgcagtggcgagatctcaagttgctcactgcaacttccgactcctagggttcaagcgattctcctgccccagcctcctgagtagctgggattacaagtgtgtgccactaagcctggctaatttttgtatttttagtagagatggggtttcaccatattggccagactggtcctgagctcctgacatcaagagatccacccgcctccgcctcccaaagtgatgggattacaggcaagagccactgtgcccagcctaataattttttgtctcctttctttaaaactgttttaggtgtggcgtcacatggcgtggcagcacatggtgtggtggtacatgcctgtaatcccagctactcaggaggctgaggcaggagaatcattgaacccaccaggcagaggttgcagtgagccgagatcttgccactgcacttcagcctgggtgacagagcaagaccctgtcgaaagaaagaaagaaagagagggagggagggagggggagagagagagaaagaaaaagaaagaaagagaggagaggagagaaaagaaagagagaaagagggagggccgggtgcagtgcggtggctcacgcctgtaatcccagcactttgggaggccggggtgggtggattgcctgagctcgggagttcgagaccagcctggccaacatggcgaaatcccgtctctactaaaaatacaaaaaattagctgggcgtggtggcgggcgcctgtactcccagctactcgggaggctgaggcacgagaatcacttgaacctgggaggtggaggttgcagtgagtcaagatcgtgccactgcactccagcctgggtgacagagtgagactccatctcaaaaaaaaaaaaaaaaagagagagagaaagaaagaagggagggaaggaaagagagagaaagagaaagaagaaggaaggaagaaagaaagaaaggaaggaaggaaggaaggaaggattataccagtgctggggaggacataagagaaactggattctactcctactcctactcctactttggtggtggaaatgtaaaatggtacagagagcgcggtgagacgcagagtgcggccggcttgccgagtcccaagcaggcaggtgagctggagggcggggatgtcccgggacaggccgcggcccctgccccgcagacaccggggccctcgctgtgccgggcacagacgaagccccagccgagacgcagcgcctccaggtggctgcgggagcggcgggcgggaagcggggcggtcgcgatggggcgtcagggtgcagagggccctggaggcggtctagggacacaggctcggccgccttgctttagaccaggaagccgcgcagatccgggacctgggggacctctctgtcccagtggggcgagacctacctagccctgacgatagcggagaatagccttaaccggcctggaaggtgaacgagtcccctgactacgagtggaacgattagcggccatgcggctgttcgccttcgttctaccagaccttcatgtggaagagagaaatggtaaaatggcctggcacatgtggtcctgggaaatccccagcaccctttgggaagatttactgaccgtctatagaaggcctgtgtaggccaggcacggtggtggctcacgcctgtaatcacagcactttgggaggccaaggcggatggatcacctgaggtcgggagttcaagaccagcctgaccaacatggtgaaacccggtctctactaaaaatacaaaaattagtcgggcgtggtggcggacgcctgtaatcccagcttctcgggaggctgaggcaggagaatcacttgcagtgagccgagctcgcaccattgcactctagcctgggcaacaagagtgaaactccagctcaaaaaaaaaagaagaagaaggcctgtgtctataataggaaaaagctgctcaacttctccctcaacctaaaattttttttatttatttaattttatttgtttgagacagagtctttctctgttgcccaggctggagtgcagtagcgcaatcttagctcactgcaacctccgcctcccgggttcaagtgattctcctgcctcagcctcccaagtagctggtactacaggccacaccaccacgcccggctaatttttatatttttagtagacggggtttcactatgttggtcaggctactctcgaccccctgacctcgtgatccgcccgcctcagcctcccaaagtgctgggattacaggcgtgagcaaccgctcccgggtttgtttgttttgtttgtttgtttgttttgagacagagtctcactctgtcgctcaggctggagtgcaatggcaggatgtcagctcactgcaacctccacgtcgcgggttcaagtgattcttctgcctcagcctcccaggcagctgggattacaggcacccaccaccacgccccactaatttttttgtatttttgtagaaattgggtttcaccacatttgccaggctggtctcaaactcctgacctcaggtgatctgctggcctcagcctcccaaactgctgggattacaggtgcaagccaaggcgcctggcctttcctaggaattttaaaacaaaatatgcaaaatatattcatttacgaactctacatttgtcattgcactccagcctgggcaacaagaacgaaactccgtctcaaaaataaataaataaataaataaaaataaaaaataaaattcctatgaaatattgtcttctgaaaatttgagcatttttgcccactgggttgatggagacagaaagggttctaggccagaatgttcatatttggaagactttcaaattataactgttgtcacatgtttgcagtttattcaagactgctgttacatagtggaaaaattaactccttacttcaaatgtctagtctacctagatgtttggaagtgtcccacgtatattaaatatagaggtagtgaaatatcactgtaaatatctttttgttaaaatttataggaaacactgccttttggaaattgaattgtttaaccacctttgtgagcagtgtagtactgtgtatagttgttcgatagtttagaggaggtgggagggaagaaattgcaaaaggtaataggccagtgtgttcataattggacattttcagacactatttttctgtatgttttgtgcattttgttttgctctgtatatagcatatacaatgggcaaatgcatcctgattttgcaacatctaattgctggatgttaaagaggttgccagtgtgtgataaagtacttagtaaatttagcatattttgtatactttgtgttgaaattcataggaaacttgtcttctgtggatgacttttggataggagtttgttcaaccatctctaagcattacacatgcgtgtacttgtccactggattgaaagcagagagaaggaagtgaggagggaatggttcaaggccaaaatggtcatatttaggagatacctcagattataaccacggttacatgtgtggaattttatttaacagtgcgtgtacatggtggacaagttagatgaaatatctagtatttctagatatttggaagtgcttcatgtatttaaaagtagtagtagcataacactgttttttgtttttgtttttgttgagacggagtctcactctgtcacccaggctggagtgcagtggcacgatatcggctcattgcaacctccgcctcctgggctcaagcaattctcctgcctcagcctcctgagtagctgggattacaggggtgcaccaccatgcccagctaccttttgtgtttttagtagagacagggtttcaccatgttggctaggctggtcttgaactcctgacctcagatgatccacccacctaggcctcccaaagtgcttggattacaggcatgagccactgcgcccggcaaataatactttttgtaaataacttttaaaaactgatggggctggggccaggcacggtggctcacgcctgtaatcccagcactttgggagtccaaggcaggtggatcacgaggtcaggagatcgagaccatcctggctaacatggtgaaaccctgtctctactaaaaatacaaaaaattagccaggcgtggtggtgggtgcctgtagtcccagctacttgggaggctgaggcaggagaatggcgtgaacctgggagacggagcttgcagtgagctgagactgcgccactgcactccagcctgggtgacagagcgagactgtgtctcaaaaaaaaaacaaaaaaaaaaaaacaactgatggggcacagtggctcacgcctgtaatcccaacactttgggtggctgaggctggtgaatcatttgaggtcaggagttccagaacagcctggccaacatggcgaaaccctgtctctactgaaaacacaaaaagtagctaggcttggtggtgagtgcctgtaatccctcagctactcaggaggctgaggcacgagaaccgcttgaacccaggaggcagagactgcagtgagctgagatcgtgccactgcactccaacctaggtgacagagtgagactctgtctcaaaaaataaaaaaagaaaaaaaactggtgggaaatactctttggaagtagaattgttgaaccacctctgtgaacagtgtactctctgtacttgttcattgggttgacggaggtgggtgagatgaaatttcctgattaggacattgtactacagctatgcaacatgttaccattgagagaaaatggctgtataatttcctacatgtgaatatgcaatgacctcaaaataaatttttgttaaaaagtacaccactggccaggtgcggtggctcacgcctgtaatcccagcactttgggaggccgaggtgggtggatcaggaggtcaggagatggagaccatcctggctaacatggtgaaaccccgtctctactaaaaatacaaaaaatttgccgggtgtggtggcgggagcctgtagtcccagctactcgggaggctgaggcaggagactggcgtgaacccaggaggcagagcttgcagtgagcggagatcgcaccactgcactccagcctgggcaagagagcgagactccatctccaaaaaaaaaaagtataccactggattctgcaaacctcccgagcacacgtcggtagccggctccctggctgtctgaattaccaagctgtctccccagctgtatttccaaaatgtcgctttctaacaagctgatgctggacaagctggacgtgaaagggaagccggtcgttatgagagtcgacttcaattttcctatgaagaacaaccaggtaacaaacaactggaggattaaggctgctgtcccaagcatcaaattctgcttggacaatggatccaagtcagtagtccttataagccacctaggttggcctgatggtgtccctatgcctgacaagtactcctcagagccagttgctgtagaactcaaatctctgctgggcaaggatgttctgttcttgaaggactgtgtaggcccagaagtggagaaagcctgtaccaacccagctgctgggtctgtcatcctgcgggagaacctccgctttcatgtggaggaagagggaagggaaaagatgcttctgggaacaaggctaaygctgatccagccaaattagaagctttccaagcttcacttcccaagctaggggawgtctatgtcaatgatrcttttggcactgctcacagagcccacagctccatggcagaagtcaatctgccacagaaggctggtggttttttgatgaagaaggagctgaactactttgccgaggccttggagagcccagagcsacccttcctggccatcctgggcagaactaaagttgcagacaagatccagctgatcaagaayatgctgggcaaagtcaatgagatgattattggtagtggaatggcttgtaccttccttaaggtgctcagcaacatggagrytggcacttctctgtttgatgaagagggagccaagactgtcaaagacctaatgtccaaagctgagaagaatggtgtgaagattatcttgcctgttgwctttgtcactgctggcaagtttgatgagaataccaagactggccaagccactgtggcttctggcatacctgctggctggctgggcttggactgtggccctgaaagcagcaagaagtatgctgrggctgtcactcaggctaagcagattgtgtggaatggtcctgtggggttttttggggttttttgtttgtttgttttttgagatggagtctcactctgtcacccaggctggagtgcaatggcgcggtcttggctcactgcaacctccacctccctgattcaagtgattctcctgcctcagcctccccagtagctgggactactggtgcgtgccaccacgcccggctaatttttgtatttttagtagagaccggkgtttcaccatgttgaccaggctggtctcgaactactgacctcatgatctgcccacctcggcctcccaaagtgctgggattacaggcrtgagccaccgcgcccggccttctgtaggggtttttgaatgggaagcttttgcccggggaaccaaagccctcatggatgaggtggtggagacactgccacttgctgtgtaraatggaacatggaggataaagtcagccaggtgagcactgggggtggtgccggtttagagctcctagaaggtaaagtccatcctggggttgatactcttggcaatatttagtactttcctgccttttagttcctgtgcacagcccctaagtcaacttagcattttctgcatctccacttggcattagctaaaactttccatgtcaagattcagctagtggccaagagatgcagtgccrggaacccttaaatggttacacagaatctcagctcatctctactgcaaaaattcaaaaagtgaggtgagaggatcgcttgatcctgggaggttgaggctgcaatgagccataatcttgccactgcactacctgggagtgacaccctgtctcgaaacaacaacaacaacaacaacaaactggcactccacattcaaagggaagagaattaaactccatttaaagggactaaacgtttctgtctcccacctccaataaattaatataataaatccctactctccagtgtgctggtatttgcagatggggcctctgggagataattggtgaggtcttgagggtggggcacgcatgatggaatgagttaccttataagaagagacaccagggccgggcgcggtggctcccgcctgtaatcccagcactttgggaggccgaggtgggtggatcatgaggtcaggagatcgagaccattgtggctaacactgtgaaaccccatctctactaaaactacaaaaaattagccgggcatggtggcgggcacctgtagtcccagctacttgggaggctgaggcaggagagtggcgtgaacccaggaggcggagcttgcagtaagccgagatcgcgccactgcactccagcctgggccacagagtaagactctgtctcaaaaaaaaaaaaagaagagacaccaggctgggcgtggtggctcacacctgtaatcccagcactttgggaagctgaggcaggaggatcctttgagcccaagagtttgaggttgcagtgagctatgattgtgccacagcactccagcctgcgtgacaaagcgagaccctgtctcaataataataataataggctgagtgtagtggttcacacctgtaatcccagcattttgggaggcctaggtgggcggatcacctgagaacaggagttcgagacagtctggccaaaatggtgaaaccccatctctactaaagatacaaaaattagccgggcatggtggtgggcacctgtaatcccagctacttcggaggctgagacaggagaatcacttgacctcaggaggcagaggttgcagtgagccaagatcgcaccactgcacttcatcctggacgacagagtgagactctgtctcaaataatactactactaataaataataataataatgaaaaaacaccagagacctctctttctctctgtctttctctctgtcacccctatgccctcttcccaacttgaggacacaaccagaaagtagccatctttgagccaggaagaaagccctcaccaagaacagaatctactgtcattttgaccttggacttcatggtgtcaagaatcgtattttgttattgtattttgttattttgtaatcgtattgtattttgttatagtggctcaagtagagtaaaagacagaaatggcaagaaagttaaacccatcccactagaggtttgtcatggaggggacagagcgttgggtttaggcctgagctttggagttggaaagaattgagttcatacttaggcggggaccttgaacaagtcccttgagttctctaaacctcaatagccccttctgtaaaacgaagataataaagttgttgtgagtgcaccttgaaactgcaagacacatgtcttagcaccaggtaggcactcaataaatagaggtagtgctattctttttattaatgtctttctagttggtcatgctaatgatatagtgggacaggcagaactgggtcttcaagacttcaggtgccaggctgaggagcttggacttgcacttgagagcactagggagccatgggaggtgtgtgagcagggaagagagagaaaaatgtccctttggtgccgaggtgaatgactaggaattgaagtttgggagaccaaggaggacactttgacaggtacccaggtgagtgtctagacctgggtggtggcaattgggatgatgggagtgagaagaaataagtaggtcaggcttggtggctcatgcctgtaatcccagcactttgggaggccaaggtgggtggataacctgcggtcaggaattcaagaccagcctggccaacatggtgaaaccctgtctctactaaaaatacaaaaattacccaggtggggccaggtgcagtggctcacgcctgtaatcccagcactttgggaggccgaggcgggcagatcacaaggtcaggagttcaagactgggctgaccgacatggtgaaactcttgtctctactaaaaatacaaaaattagccaggcgtggtggtgcgtgtctgtaatcccagctactcgggaggctgaggcaggagaattgtttcaacccgggaagtggaggttgcagtgagccgagatcatgctactgcactccagcctgggcaacaagagtgaaactctgtctcagaaaaagaaaaaaaaaattatccaggcatggtggcaggtacctgtaatcacagctgccagggaggctgaggcaggagaatcacatgaacccgggaggtgaaggttgcagtgagccgagatcgcgctactgcactccagcctgggtgacagagtgagactccgtctcaaaataataataataataataaataaataaatacataaataagtagttaagtagttcaagatgagtattgggtatagggcttgaatggtagctccacgacccaggtcggaagtagcagttaagaggggttggggtcggggtatcaatgtcagttttcactttgcctagaatattttttcttgttgtgtcttcctgaaatattcttactggtctttggagacactgcccaaagatccctcctctgagaatctccctggaacatgtgtggtcctgcaaagctgctgctcatgatgttatcctacaaacatccaaatcccggcatatgagtttctctagggcagtctctggctggttccattgtaggatctgtccacgccctgcatatgcctggtaccaaaaaaggaaactgggtctgcaggacgttgctgcagttcaggcattggccgcgtgggggcagaagtgcacaggtcaaagcgtctggaaaaagccctcaggctgcaggaccagcagagcatcaccaaggacgtccctggttgagaactacgtctttttattcgttttaaaggggcgcataggcactaggatccagttttgtccacctaacccacccacccagcgacacacgccccgcagcccatagctggaggatatttacgcaaaacctaaatcagatcagtctttcctttgctcagaacattttttttttttgagggacggagtcttgctctgtcgcccagactggagtgcaatggtgcaatctcggcttactacaacctccacctcccaggttcatgtaactctcctgcctcagcctcccgaatagctgggattacagatgtgagccaccacgcccagctagtttttgtatttttaatagagacggggtttcaccacgttggtcgggctggtctcgaactcctgacctcaagtgatccacccgcctcggcctcccaaagtgccgggattacaggcatgagccatcgcgcccagcctgctcagaaccatttgtggctcccacttaacccagtgggagtgctgaaataacttaaacattttacatggcatttacaaatgcgatattttattctttaatcctttaaaatctctccatcaataaaactcttcagaagtccttaccagttgttacaaatctaaaatataaatatacaaataagtggtaatgtatgttctctcaaacattctgacactacttctacactcaaccaaattgtgatatacttttccatttaaaattaccagtcttggccggacgtggtggctcacgcctgtaatcccagtactttgggaggccaaggcgggtggatcaactgaggtcaggagttcaagaccagcctggccaacatgatgaaaccccatctctactaaaaatacaaaaaagttagccaggtgtggtggccggtgcctgtaatctcagttacttgggagggtgaggcaggagaatcgcttgagcctgggaggcagaggttgcggtgagccgagatcaagccattacactccagcctgggcaacaaagcaaaactctgtcttttttttttttttttttaaaggaacctcgctctgttgccaggctggagtgcagtggcgtgatctcagctctctgcaacctccgcctcctgggttcaagcgattctcctgcctcagcctcctgagtagctgggactacaggtgtgtgccaccacgcctagctacttttttgtattcttagtagagatggggtttcaccatgttggccaggatggtctcgatctcttgaccttgtgatccacctgcctcagactcccaaagtgctgggattacaggcgtgagccaccgtgcccagcgaaactctgtctttaaaaaaaaaaaaataccagtcctggtgaggcgcagtgtctcccgcctataatcccagcactctgggaggccgaagcgtgtggatcacttgaagtcaggagttcaagaccagcctggccaatgtggtgaaaccccatctctactaaaaacacgaaaattagccgggcgttgtggtgcatgcctgtaatcccaactatttgagaggctgaggcaggagagtcacttgaacccagaaggtggaggttgcagtgagctgagatcatgtcaatgcactccagcctgggtgatagagcaagactccctctcaaaaaaaaaaaaaaaaaaaaaggccgggcgcggtggctcatgcctgtaatcctggcaccttgggaggctgaggtaggcagattgcctgagctcaggagttcaagagcagcttgggcaacatggtgaaaccctgtctctattaaaaatacaaaaattaaccaggcgtggtggcgggcgcctgtaatcatggctgcccaggaggctggggcaggagaatcacctgaacttgggaggtggaggttgcagtgagctgagattctgccagggcactccagcctaggcaacagagtgagattctgtctaaaaaaaaaaaaaaaaaaaaaaaaaagccgggtgcggtggctcacgcctgtaatcccaccactttgggagatagaggctggcggatcacgaggtcaggagatcgagaccatcctggctaacacagtgaaaccctgtctctactaaaaatacaaaaaattgactataaatcatgctgctataaagacacatgcacacgtatgtttattgcggcactattcacaatagcaaagacttggaaccaacccaaatgtccaacaatgatagactagattaagaaaatgtggcacatatacaccatggaatactatgcagccataaaaaatgatgagttcatgtcctttgtacggacatggatgaaattggaaatcatcattctcagtaaactatcgcaagaacaaaaaaccaaacactgcatattctcactcataagtgggaattgaataacgagaacacatggacacaggaaggggaacatcacactctggggactgttgtggagtagggggaggggggagggatagcattaggagatatacttaatgctaaatgacgagttaatgggtgcagcacaccagcatggcacatgtatacatatgtaactaccctgcacattgtgcacatgtaccctaaaacttaaagcataataataataaaataaaataaaataaataaataaataaaaatagaaaagaactatgtaccattaaaaaaaaaaatacaaaaaattagccgggcgtggtcgtgggcgcctaaagtcccagctactcaggaggctgaggcaggagaatggcgtgaacccgggaggcagagctggcagtgagccgagattgcaccactgcactccagcctggacgacagagcgagactccgtctcaaaaaaaaaaaaaaaagtattgaactgttgttgatgatgtgagcaatggagaattaggagggaagtgtacagccttgtgtaatttatattaacatgcgtaaaaatcgagatggatgaagcgatatctacaaagagat

SEQ ID NO: 93417 - DNA, 33097 bp, Homo sapiens
taggctgccctgggacattcaacagggaagggaatggggggtggcgtggggggtgagatccagaagcagaagaggaagggtgggtgtttttaaatgctagaggatgctcgagtgatgcctgtaggtggaggaagaagccaatggaaagaaagagattaaaaatgtggaaagaagaggagctaaatgggggcactggagtttggaggccttgaaagagatgaggttccagcagacaggaagaagccaggttttgcagaggagagggctggcctcttcttttatcttgggatgggaaggagggaacatccagagagatactgaagtgttgagagacaggcaggagggaatttgtgctagcatatacacatacattccgaatttataaaaacacaagtagtttgcagttgcacaaaataacatatgcacacctacacacccatgcacacatgtgcatgtgtgaattctagtatgaattctggaaaaacacatcacacacacaggcatgccctggagactaggcctacagtagtccctgagccaagtgcagtgaggaggaaaggaaggtgaggggaatcagctccagacggggcaccaggagcctggctccagtcccccacttgttcactcatggactgggtaacttcaggcaagtgacttcgcctcttggtgactccattgcctgaagggcaaagagagtacataacacccaccctgccaaacagcagggctgatgaggctggcatgaaatgaagcttcctttctgctgtctctctttctctgcagagattccgagtaaggagacaaaacccccacatggctgtgaccttccagtactccccgagcacctgacctagaattacacacgccaccggcccaaaactcacatcagcaagcccagcctccgctagatgccgaagttctctgtctctccttcctgctctctccatgccacctgcccaccccatacccaatagcctccccagggtcccctcccatgcacctgctcaatcagcagcaacccaagagtgaggggtgtccatttgtgtcttgttcacatccactcactgtccttgtacctgctccttttctgtgacctctctggggatgctttttgggggaacagctggactaccctggaacaacctctggttggtcttggggaggggaagaaaggcagagaagcagtatgttctgcatgcttcccaacgacagctccgagcctggctgtctgtcccacattcctctgctctagagccctctgtcctcccctgcacccttgtgcaaccttccccaattgcctgagttgctgggtcctggaggttatgggtttccaagagcttctgatctttcctttaggaattcccaatcgctgggaggacagattgtgctgggaggcagcgacccccagcattacgaagggaatttccactatatcaacctcatcaagactggtgtctggcagattcaaatgaaggggtcagaaatcctcaaccctccccgggctccaaaaaatgctgccgtcactggggttggggagggtggggaaggactgcattaccatcctgccctctttccaaatgcagccacttcttaagcacagccaccatttgctctctgcctgctctgtccaggctggggaacagagaagggaggggcctggggagaagtggtggagggtgacagtaccttccctcctctactcactgcctcaacaggccaccagcgtggcctccacccacccacccacactcaggaaggacatgcagcctggaggtgccccatcagccttctgtctgtctgtctgtctgtctgtctgactgtggcctcccccagggtgtctgtggggtcatccaccttgctctgtgaagacggctgcctggcattggtagacaccggtgcatcctacatctcaggttctaccagctccatagagaagctcatggaggccttgggagccaagaagaggctgtttgatgtaagaagccaaagagggaaggtgctgtgggtgkggggagcgccacctggtatcggctcacaaatcccccaggcaaatgaggccatctcaggccttcgcttgttcacctcacactctccacacatgtggctggtcacccatggggcggggcactgtccccagccctctccagcagagagaccaggccaccagcgcaggactccttgtctgctgagacgtcttccatactcaagaaggctctctttgccccccaccccagtatgtcgtgaagtgtaacgagggccctacactccccgacatctctttccacctgggaggcaaagaatacacgctcaccagcgcggactatgtatttcaggtgaggttcgagtcggccccctcggtggcagggagaaaggctggacagagaccctcaaagagtgacagattacaatgcacaggtcatgttagaactgtagttctcaaacttggctgtgcatgtcacctggagagctttgaaaaatcctggtacctgggccacatcccatacctattaaatcagaacctctagaagtggcacctggggttcagtttccccaggtgattccaatgtgtggccatgtttgggcatcactatgcctgttccctcatctccattttctcatcaaatactcccaagaatcctatgctcctatattcttaccctcttttcataatcaataggcttagagaagttgaataacttgtctaggatcagaagctaaggcaaactgtaagctcctgaaggaagcacggtgcctgatgcattgtttgcctgggatctagcacaggggctaaacataggagtggtgcagtccacgatggggcaaaatggccatgatgtgagggaggcccagtgtggctaggggagagatgggggcgagagggggaatgttgctgaagacagttgctgggggtcaggcaaggtgaaaggagaatgctcatgtgctgggtatggagaaactctcccccttcctgccaggaatcctacagtagtaaaaagctgtgcacactggccatccacgccatggatatcccgccacccactggacccacctgggccctgggggccaccttcatcygaaagttctacacagagtttgatcggcgtaacaaccgcattggcttcgccttggcccgctgaggccctctgccacccaggcaggccctgccttcagccctggcccagagmtggaacactctctgagatgcccctctgcctgggcttatgccctcagatggagacattggatgtggagctcctgctggatgcgtgccctgacccctgcaccagcccttccctgctttgaggacaaagagaataaagacttcatgttcacagcctgttgcatctgggttcactagggtttagaacagagggaggggctgcgtgatcatgtgtggacaggaatgtgacacagacaagctacacattcgcctagcgcacaggttcttgcgtgcagggatgatgccatccatctgccatcaacgggactcaggtggagctgtttacacaacctcaggtgggaagtctgaaaagagccggaaccaagctccctctagtccctcagggaccaaggctaatgctgtggcagtagactgtgggtcagaaagttctcccagctcacagaagccagctctgagttcagactctgctctgctgagctagtcagccctgtctcttgtccctgcaaaactcccctcagctgtccttatccactgcagatgcccccgccctgccccatgtagccatttacacaggcattctaaggcactaccacctaaaatcatagaacaccagagatccaggcaatacttccactttacaggtggggaaactgaggcccagagaatggaaggccttgcccaagattactcggtcaagaatcaagtagtgaagaatactgaaagatagtgaagaatcaagactggaacccagcccgtctgacttgggtcctgggggtttccaccttatcataagcagttggtaccgtcataagtacagtgcttcacgcacgctggtacagggccacgtgcacaagcacacaggtgcacacacacactgctatcctccatcccatccacctgggactcgtcaggctgaagtctcttctcccactctcactccttgggctgtcttcagggcacatgtaacttggggaatgagaaattagcatccacctggagccactgaagccatccctcttcaccatagttgctcacctctcttttgacagaaagtcgtgaggcactgaatggcccaaccaggccctcagtacctctgggagccatctgcaagagtccctgtgtagcgccaagagccggagcctgggcttcaggaccctggactcccactgattctccatgttcccttgtcctgcatagctgtacttcctcactgcaaaggaagtgttggtggccagtgtcttttccagctccatcctggagctccaggaccttaggaaggcaggcacgacccccattatctccttcactatccaatatggtaggcacatgtggctatttacactaaaattaaaattaattaaaattgaataaaatcaaccgggcgcggtggctcacgcctgtaatcccagcactttgagaggccgaggagggtggatcacctgaggtcaggagttcaagaccagcctgaccaacatggaggaacccccgtctctactaaaaatacaaaattagctgggcgtggtggcacatgcctgtaatcccagctactcaggaggctgaagcaggagaatcgcttgaacccaggaggccgaggttgtggtgagcagagatcacaccattgcactccagcagcctgggcaacatgagcgaaattctgtctcaaataaaaaaatttttttaataaaatcaacgtggctagtggtcactgcattggacagtagatatagaacatttcaatcactgcagaagttctgctaggcagagctggattctggaccgcagtaagcataggagccttgcggttgagaggttccgggataggccaaaggggtaactgggaaaataggaaagggccccttctctgaaggcgcttttctgggtggggcagtgagagatagtgactagtgagatccctgaggcctcactacaacaaatagggctggcagccaacagagccctgctcagaaggtggcagagaatgaccaaaggagaatctggctagtagagggacttgccccctgagccggcctggcctctctccatgtctcctccccacagcaacctgccccgggacaccttgtcaccccttccccttccttcccacccccagccatcaccatgccttgctttggcccttagctgcgccaggcatttggctgtcctccccaggacgcgcgagggtctgtccacttcacaccccgaatgccaagcaaagcactgggctcgggtacaccgctggcctgctacctggctccattcacacgctcaggatgggagggaggctttaactcagtctggccccaagtcctgcccaggatgtgcccaaacactccaacgccctggctgttcagtggcctgccaggggacagcgcagtctgctggactggcacactctcaccccaacgctatcacccaatgtcccctcttcatgcagtgtgtttctgtcggggatgggaggttgcctgggtgtgggggggggctctctgcagggaaggacctttgagatgcagcaggggccgcccctgcagagccatttcccggggtccggggactgggggcacggagcaggggcacagaggggcgagcccaagctgacgtcgtgggagcagcggatctctctattccaggatgaggtgggggcgcaggacgagccctcccccgcctccaccccaggctaccgggagagagctggagtctcgcggcctcggaggccgggaagccagccccggcggggacccgggcggggcggagccagcggaggccccacccccggcgtcaccggcccccaggggggcgtcgcccccaccccgcgctccaggtagcggcggcctcagctgccggcggtggctggctgagctccccagcggcccgcgggccggggcgggggcgggccgggggcgttcccgcgggccaccgcccgtgatgtcacaatcgcggcgggccgcggcgctccggggtcggcggtgggcggcgggccgcgagccggcgatcgaagcgggcagctcgcgcctgagtcatggacttcccctggcccctcctctaccactcccactccctcgccggacccccccgccggggctagcgtctgccgcggctccgagggggtggggctgctgggaatggctgtgcccccttcggcccctcagcmgcgcgcgtcctttcacctgaggaggcacacgccttgcccgcagtgctcatggggcatggaggagaaggcggcggccagcgccagctgccgggagccgccgggccccccgagggccgccgccgtcgcgtacttcggcatttccgtggacccggacgacatccttcccggggccctgcgcctcatccaggagctgcggccgcattggaaacccgagcaagttcggaccaaggtagcggagtgggcgcggggccgaggatggggtcctgccagggctgccagggggatgcggggacccagtcctcgcatccttccgggtgtcagtcccaggggtgcgcggctgctgcgcaagaaaggtttggaacgtggtttgtgtacggattgatttcgtcgctaccaaaactaggctcacacctcccttggccctgcacacgcccccctcctcccggggctcttaggcacgcctggtggccacctgcccactgtcggcatgctgcgtgtgcgggccgcaccccctgtcgctgcgtgctggtgcccctcgctgaccagaagckcgtacccagccagctctgaaacctgaggaggcgggaacttttaagagaccccccgcccccccgacccagccatacatgcatacattgctgccccttctccaccccatggtgggagcaaatcctccaggctctgagctgcccctgtgggtcccaggagccaccctgtggaattccagctagcactcagctcctcaccatcgctgcaggctcgggctcagcacccccacacaggccatcttccccagccccagctggacacaggtcccaggacacacctgtgggcagagccactcactgagccttaggctaactccccagctgactacctccagccccgctgtgggctgcctgtggaggaaggtgccgagtggggcgcttgtagcttgtgctggaatggtagcggctccatgcagacaggcattctggggtggggtgggggcaaagttgtggggaggttcttaaccaagtgtggaggctgacagaacccgccctggggatggagtagcgttttcaaaataaaaggcccagtttggtataagactgtcaaggcatcaagcaggcctgaggttaattccagcactgatctaacgtgctatctgccagtccctcccctctcctgcctcagtttccctacgtagaattggttcagatgacctctagggccctcccagctctgtcacattgtgccccgtaaattccatggttcctttctcctcatcaccctgctgtccagagaaccttgctcgcagcccagttgtctcctgtcttttctggtaaggacctctggccactaaagtcctgggatgggtgccaacctcagtaccctccttgtacctccaccactggatggggcaaggggtagagcagagcacactgcccggcacaaggtgattggcagctggtcaggacatagtgttctgggcaactcccagccctcccctgccacattctggtccatgatgtttctttccgtactggggtggagggtaaggagcagcaggaggcgtctacctcccaagtagtgtggaaatttctccactgccaaatcccattcactagaggcacacccaggagtgtgtgggagctaaacccaagctaccatttttttcttgaactctatagagactggagactcccaaggttggggacagagaggagcatgagtgactgggctaaagcactgggggcttggggtggttgtgctcggcattcaaatgagcacctcctgctggagctacagagcccaggagagagaccagagagatcctgccccacccacccacccacgcactgtcctctccccatgctagcgcttcacggatggcatcaccaacaagctggtggcctgctatgtggaggaggacatgcaggactgcgtgctggtccgggtgtatggggagcggacggagctgctggtggaccgggagaatgaggtcagaaacttccagctgctgcgagcacacagctgtgcccccaaactctactgcaccttccagaatgggctgtgctatgagtacatgcagggtgtggccctggagcctgagcacatccgtgagccccggcttttcaggtgaggagggtgccagggcctctgtctctactattcttcaggccttgggcttggaaatccttggcatgtggggtccatggtggagagttgtaagatctgtgagttccctgaaattgcatgaaaaatgcatgtttatatgcattgctctgcagagaggggctatcgctttctgtagattttaagggtgagttctgggggaggaaaggaagaattgtgatgaacatgggagcagaggacctggttccctaagtgcggcagagatctgcttcctggcatcatgcctcaaacctctgcccactccaagtctgacctggaaacatctcagagccttagaaatgaaatctgagccagatccccagggcactcagggttttctacctctgtctctgtttgtcaaggaaaatgggccctatccagggtaagcatggttttaccagcccagggagatgctatctcttctgccagtctgarctccttcctggctccttgacgaagtgggaacccaggtttggggaactgtcaaggcctcctttcaaaggctcacaagaacctgtggctcctggggagcccctcccagtaaatgcttggatgtgtagggcccaggaactggacttttccttcaagccctgggaatgctgtggagcctggaaagggggaggaccaaagaaggacccctagcatctccctctcctctgtgccagaacaaggatggcaagcagtgtcctccttcctccctccaatgtcatgacccacacggagggcactcagacttgagtgaggcccaaggcaggctgaggtttactcctgacactgggacagtggcacggggatctgcctaggagccttggcatctgcccaggctaatccaaggggaaggagggcttgcatactgaggggaaacaagcccacctgggggtagagcaagaagcttctttgcttcctcacctgccacccacttaaccccaaatgcacctggctgtgtttgtgcatgccttctgcagggacttagaagaagaggatttgagagctcttccacccccatgctcataagcggctggtcaggcgggatatttgagttgtgtattgtagcagtgtgtgtgtgtgtgtgtgtgtgtgtgtgtgtgtgtgtgtgtcttgagggtgtgagaggcatacagacctatgcagggatgtttgcaggctccagttgaacagttccaaaaggacccagactggagatgtgaagtcagagcagggtgcaaagggaccctgtcctgacttctgccactgcactccccccagctctccctcaatctggtgcatataagctcagatattgtcaggtcgtcaccactcccaggatccctccacctctgtgtatccgatgctgtcactcatcctgtcacgcaaacaattaccattgtcaggaagattgaaggtggatttaggttccataagaagaagaacgtgacatctgggggagagcccgaaattgggataggtgtaggaggtaggcccttccttgatgattttcccaggatagaccatcatccctctgggtgaaggtgaatgtctatggggaaggcctccaggaaccaccctctacatgttcccttgaaccccacccccaacctcagcctgctgaggctttgcagcatgaaaatgctgagtgttgaggttactttcattgctattccagacaacagccctattgatattcaagaaaacgctctgttcatgctctgttccgaatcttcctttgggaagggaaggcctgagtctcaggtctgtttccctgccttgcccaaaccctggtgggttcccttctgccccagggcctctggcctctgaaagaaagcacagccttcctctctcacccaggaggttgctgccacgccccttgtctcctccaccctttaggaggtgggagccttgggggcttccagaggaaccccaaaactgctctgttatcccagtagggtatggcctgcctctttccagggcctggcaagagaaaggataccccttgaacagcttggtaacaaggtttcaaacagctaaggcctttgttgtctttcccagtgattgttattcaagcaacaggcagaggctgtatgttggaaggaagctgaatgttggagtcttagcagacggttggggggtgggacagcggaagggaagactggaagaggactgggagggcccagctgggacacagggcctcgggcgatggggtctttatcaaggccctccttctctgaccggtcagttttccattcacccccaccttctcccagcaacctttcctaccacccaatcctctcctgagaccttggataatgtccacagaagaacttgaaaatagaacgctggcttgttttgcggccttggcacccagccgccagcatcaactccctatagcagaggaaggggctaccctgggccagcctgtttccctccccaccttggccaggctgataagaggcgggcatttcttccctgcctggcatcaccaccccctgatctcttggtgcaaagtgaactatgttcacgtcccctgagaggatgggtcagagtccggggagaggagggccagccccgcccccatccccaggtgcccctctgttctcaggagttgctatgggtacactggggtaggacaaggccactgacctgtgaccaacagccccactgctctgcccttctgctccctgaggcagccccagcctggcactggaaagggagcagccaggctaaggtcttaattcattctcctctcttctgctgagaccttccttctgcaggacctgtgctcctaagggacttgcaatcatcccatccttggccctctggcaagtgccctggtgggcctggagggtccctatctggccaggaggaaatgagtggggaaggcaatrtcccagcactgatgctctactcttcctgttccctgctgtaggttaatcgccttagaaatggcaaagattcatactatccacgccaasggcagcctgcccaagcccatcctctggcacaagatgcacaattatttcacgcttgtgaagaacgagatcaaccccaggtacaaagatctgggagggtccaaggctgccttaatatgatctcccttccccatccktttggctccagcccaccctgctaggaggtttaagggcttaggtctcggggaggaggctggggagtttctcctgcagtcccttcagtcctagtcggtaagcctctgtctccaagcagagttggccctsctgactaaggagcttagatgggcagttttatacccatrtgctcatttctccttcactctctgattgtggcagggaccagggttggggacatttccccattttacttagrggatgccgaagctcagagactgagcttggcccagcgttatggggcttgtaagaggcagagcttctgtttcccagcccagggctctttccacctgccccaccttctgaaccatgagcagggcagggccctcagaatgaggtgggactgagtttagcatcagtcagaagaactcaactcatcagctgacaagcccttggggacatcgaggttcctgctacttcccaagacccctcttgtccccatgtgcctttggggaccctgcccccaccttgctctgactgacagcttgctgcttccttcactgctcttcccaggaaaggagatagaccacccatcctgacattgcctttccctgataagacagggttccctgagttttcccttaagcactctgaccagcaacctgagagtcctccaagcctttagacgcctgactccccaacacaccctgagtgccgaggaaaggatggaggcctggaggaaagcgtggtgtcttgccttccctcctccaaaaaaaggcaatagtgagtctcattccttcacgctccctgctgggtttggctatcacccgtgttccaaatgttcatgggagtagggtgcagaagaggtttgaggtgaaggatgtgtcttycctcttccaagatgacaagataataattaactctatccccattttgagtatgtctctgtcacacacatgcatgactttatctgcatcatcccatgccatgcctatcaagcactgctttgggactatttgtccaaggtggcccaggcctgccctctctttgaccatgttcagaccttgtatgtcaaatattctctttgggacaaggacctccttttccctcagggttagaacagtttgtagagaacaggtccttccaacctttcagcccacagctgttatttgacaagtggaaaaccgaggcccagggaggggatggaacctgcccaaggtcgctgatcagtggcagcttagcaactagagccaggcttctggtgctcagacataatccttgatactgcagcttcctttgactgtgctgtcactgtgtgaccttgggggtaaccttactgggagggagtaatccctggagaagagctggcccaatctctttgctcttgtcacacctttgaaccttggacaaaccaagttgcttaacttcgttgagcctctttaggggatgatccatgccctaagctgcctgactgcccaaaagcagaacaatgatgagcaatcatttagacgagataagcacctggagctccaggcattgcctaataaccctgaattattcaatccttcatttcacagacattgattgactgggatttaaaacaatttaaaaatgaatgtgacactggccctgccctcaaagagcttaagagccatctaggtacacaggacatgcccatgcacagctgcaaaataaggcagggtgtgtataatgtatgctgggggtggaagaaccagggaaagttgtcttggcagaggtggcatggcagaaataagcagggaggctactccaactggaggagatggctggagcagggtttgctcctgagtgacgagtagatgaggttggctggagcagatctttgggaggacctgggaagggtttgggggcgggggtggactacagagttggagctaggtggtaaggggccttaaatgtcaggctaagtagccaagatttaatttagcaagtagcgggaagtcatgaagatgtttgagtcagagattcaggtcagtaacctgaccaggactgggctttaggaagaaagtcctctagcatcataagggacagattggtgggggagggtggatttgaggtaggaagaccagttgggagtgatgtaattaagtgaacaagatctaggactaggattcccaaactttgagcataagattcccctgaagtgcccaactttggagatcaattgagaggtcttgcatttgccccctaggaaatggcttttttttttttttttttttttttttttttgagatggattctcactctgttgcccaggctggagtccagtggcatgatctcagctcaccgcaacctctgcttcccaggttcaagtgattcttctgcctcagcctcccaagtagctgggattactggtgcccaccaccacgcccggctaatttttgtatttttagtagggacggggttttgtcatgttggccaggcttggtcttgaactcctggcctcaagtgatctgcctgccacagcctcttaaagtgctgggattacaggtgtaagccactgcgcccggccaggaagctacattttgataggcaccccaggtgattctgaggcaagtgattgaggaacattgccctacggcaacttgaggtggcgggtggagagcaggatgtgtcggacacctgtggaaatagatttagtagccttggtgttggatccatgccctaagctgcctaagccctaagctgacatggatgtgtccagagtggctgggagaaygtggggcggataactgggttgggccatcacaaggagatactggtgggtgggttggtgggagggcaaagtgtgaaaccagtaagctcaaacgcttagaaagagccctgtggggagaaagtactcttgcctgtccagatcttgacagcagagtagaaactggccaggcagcagtcccaatatcaggaggaaccccaaggcttccctgcagagacctccagccccttccttcccctcctgctggccctggggcagaggagcagaaggagcagtttttcctgggcagtgtttctgggatgcggtggtggttactcttctgccgatcccacagccttgaaagagccccgtggtggcgggactgaaggtagcaaagctggcgatgtttcaagtgctcaggggagggaagcagagcagggagggaggccccggggagatagaaggctgggattgttcccacagtaaccatctgcgtggccttggggtgggcagggtggggttcagactgaagtcagggacagagcagcaggcatcttggatgtcagagccatgtttttcaggccgggacctgagcaaaccaaagraaccctcctaattcttcccttttgatggtctcagtccaagaaaaaaaaaaaaggaatcttaaaaggtagcttcttaaggagagccaggactgaaacacatcttacgcagacctgtcggcacagataaactccaggaagcatgggggaggcctcccccatatcacctctcccagcagactccctggactcagagaggcctttgcagaacctctgaggggcacccaggccttcagagagagtgcacagtcctcacaattaggagactccattcgatttggatccttggacgggccaaggactgctttccttaaatgaagaagtaaaggatccagcagtgcaagaggtatctggaggcttggagggaggctctttccttccttgagcctcagtttcccaatggggctggactagataacctcagatcttcttgagctttgaccttctcaaagcctggaagggaccctgtcctctcttccttctccagagggggcagaggagtgcctcagtcactgaatactctttctcgtgttctggcccctgggctgggtgagggagtgatcggtctgtcctgtgggaaggtgagagagggccggtctcatcctcatccttctctatgtgctcttgctaccctggacagagaaacacaaacaggtgacacaggaatggagataaaagcccagcctcctcccctctgcccattggtggttctaggttttttaaggactgtgataagtgtttggccttttcagtgtacacagacctgtgtgcctcctggggaccaaagttcagagcacacaagcacagtggaccctcatcagacttccacatggcctctgataacttgattgattggctgatttcttcattcctcaacatgtgtttctttcagcagaaatggctgctgagtgcttgggatgggggtggggcagcaggagaggttgacccatgcatctttgttcatgcccccaggttgcacttgcatgatatggcaggggtctgggacaagggaacacttactcataactcaaggtagaagggatgagtcaatggggagccacaaagcaagcatgctcttcattgaaggctttaatgttcctttgacagtgtaggagtgagctaaagaagctcttagtttgctttctcatgtgagccgatggtctgtttgtgagatgagaggttagaccagaccgtctctctgatcccttctacctgtgacatggtcagctgctggggtgagaggggggtgcataccaggacatacctctgcctcctcaagagagctccattgctccagctccctgccagggcactactcttcctcctggggaggatctttgtgggagtcagctcgacttagggagctgcaccgcctcctggggagttttcccagcatcctaagatcaggtctgttttgcatctctccccactgctcctgttgcccttgttcttagtctggaatccccaggtctggacactcgttctcacctgccttgtcctttccctgtgtctccttccttaccctcctgttcctttcacaaagtagcagggatgccctcagtcagtgacttttatgctctgcctcatgctttgacgcccatgtctttatcagcttcctagcataaccagaggagtcagaaggacaggacgcctcagtgccattttacagatgataaaagtgagggtctaagagattggccatttttccaaggccccctgcagtaagacagagggagtgatgaggctcarattcagggctcttgaggccaagcacctgtctatcagccctcctttcactggctaccttttttgccactgcccagcctttctgcagatgtccctaaggtagaggtgttggaacrggagctggcctggctgaaggagcatctgtcccagctggagtcccctgtggtgttttgtcacaatgacctgctctgcaagaatatcatctatgacagcatcaaaggtatggcttctctggccctggggcagcagcagggttttggttggttggttagctggcttcacggagctgttcttccggctggcacttggacaagcaaaagttagaccttgatttaggtcttaagttaatttgtaggagggaagggggaaaggaaataaaaaattcccactttgaaaagtctgtgccaagggccagtctcagtggctcatgcctataatcccagcagtttgggaggccaaggcatgtggattgcttaagcccaggaattcaagaccagcccaggcaatgtggtgagaccctgtctctacaaaaaaaatacacaaaacttttcctggtatggtggtacatgctatagtcctagctcctcgggaggctgaggcaggagaatcacttgagcctgggaggtggaggctgcagtgagccatgatggagccactacactccagcctgggcaacagagcaagaccctatttaaaaaaaaaaaaaaaagtctggccaggcgcggtggctcatgcctgtaatcccagcactttgggaggctaaggcgggtggatcatgaggtcaggagttcaagaccagcctggccaacatggcgaaaccccatctctactraaaatacaaaaattagctgggcatggtggtgtgcgcctgtaatcctagctactcaggaggctgaggcaggagaatcgcttgaaccagggaggcagaggttgcagtgagccgagatcatgccactgtactccagcctgggcgacagagcgagactctgtctcaaaaaaaaaaaagacaaaaacaaacaaacaaaaatctgtgccaagaaagagagagaacgaacacatcctggtgttgctgatgagggcatcaccccagggcgtattaatacttagctttattcctgatccttagccatgctgaggacagctgtctttagatgaggagagcctgaagatccagctgtgtgagagggacaytgggagctgggaagggcagatggatggatggatgratggatggayggayggatggatggatgratggaagtagcttggaagactgctgcagtgatgggattgggcagggttgctgcagaggccggcatcactcagtgggtgcatcccagaggtctgtggaagcttgaccaggctctgttgccagatctcctgggccaactctcatcgattctcctctacttcataggtcacgtgcggttcattgactatgaatatgctggctacaactaccaagcttttgacattggcaaccatttcaatgagtttgcaggtgagaggggcatttctacagtcatgtgctttgtagcggtgtttcagtcaatgactgaccgcatgtagatggtggtcctatgagattactgtatatttacggtaataggtaccatatttttactgtaycttttctatgtttagacatgtttagatacgtaaatacttagcattgtgttacagttacccacagtattcagtayagtaacatgctgtacaggtttgtagctcaggagcaacaggctataccatgcagcctaggtgtgtagtaggctatcccatctaggtttgtgtaagtacactgatgatcacacaaaatcacccgatggtgcatttctcagaaggtatccctgtcattaggcaatacaggactatatttgaccaacgttcaaagcaccctctttaggatggggaccagggccagggtatggggaaggccagaggtggttctatacttagagggtagaggctagatagctcttgtcctccaaaatatcacagcttaaggggttaaggcacagcctgcttttagagagttccaagtctcattggaggaaacaggactcacatacacagagcagacctctcctagcccatatggcactttggtaactcagcttggtacatgaattagaaaaagaccccttcctccaggcagacccagcttagacgattgctgcagcttggctagcacagcacaggatgacttcagcctccactcctttgtccaagctcctttatacccagtacaactggcgcaattgtacatgagggccttacatgtagataaggagcagaacaagctacaagtagctgtttgcctggtggcctgatgagagtcatctaagtaggatctaaatatgtgctatgtaatttgactccctaagttcagtttctggctttgctgcttactggctgtgtgacccttgggcagtttatttaccttctctgtgcccctataaaatggagatgatgatagtacctacctcatagtgttgatrtgagacacacacacacacatatgtatgacacatactaagcattgtattggtgtttgctgctgtgattagactgcgaagctttccgggagtggggatggaagaggcaggataggggggtgattcctaggggtaggcaggtgttctataaaggcatagtatgcacaatggaaccatttgtgtagaggaggcaaggcaggtttttccagcttgagggcttaattagatggaaccgaggaggcaactcacatggacggagctggacactggggctggagagctgtccccagactagcacagtaaagtgttcacatgatggggccaggccctgtggctcaggatagagaggcatgcccaggccaactggacagccattctccagccccatcaggccaattgtgttccttctggaaccccaggtgatcaatctgtcgagcaatgattgtacctgagagtacacctaggaacccccagggtgatggagcctctgctgggcagagcagctgagcctcggggtgtggcatggagcagaggctggcactggcagggccctgggtccgggaatgcttggctgcaaggccccctggcctttccacaagggataattcttaagcattttaagtcctccttgcccacagcacagagcaaaatccaactggaatttctccaaaggggtagattgcagcctgctctcaagttgagaatggaggaggaagaacctagcctgggggaaggaagagagctagggagatccagacctagggagaggggcctcatgggtgcgcaggagtgaggaagacacagttctgggcattgggagatgagagttccagccctgactctgcctctaaccaccatatgaccttgggtgcatttcttctcctctctgggcctccgtttgtacatctgttccaggagattcttttctagccacgctcctggagcctcaggagactgtgtatgtttctccagggatataaaggaagcttgagaaggacaagaagaagaggaaggagggaaccctagagaaggtggcccagtcctggtcctcctgtcttaaaccacttctttctgtaccagctctgaagctgtggtttattctaccatgcccaggatgaggctggtggtactgggctggcagctggagggctatggtggggctggaagaaaccagagccatctgatccatgggttcccagcctggctacacatcagagccatctggggaactggactggggtgggggtgctctccaggtgatgtttttaagtagccagcttaacaccaggaagccatgtttgatatccctacatgaagtccagctccctcatttgataaatgaagaaatttcggccagtgatagaaaagagttcccttaaggctaacaaggttagcataagacctagggctagtaatgcttatccagtgcttttaactgagggcctcctgtgcaccatcatttttgtgcaggggttgggaaagacagtggtgctgtcttgaggggttcctgtcactcccaggacagtgtcttgccccttaaccagtctacctctctctctgctttcctcaatcccacagaaacagtgctcctagctgggatggggtagaccccacactagctgagtttagtaatcaaagaagctgccttctcgggccgcctccttgggcacagccccaaagatcaaaggagatgggagtttgaggggagatgggaacacctactgagcttgaggagacccttggtgggcccatctctgagcaactttgtctggcctgcctccccctcaggcgtgaatgaggtggattactgcctgtacccggcgcgggagacccagctgcagtggctgcactactacctgcaggcacaaaaggggatggccgtgacccccagggaggtgcaaaggctctacgtgcaagtcaacaagtttgccctggtgagtgccttatttctagggctggggcaggaaaggaggagttagcaggagggactggtgacccacctagcctcctacccagagcccagggtcaggtgagagcctggggacacccatccctggctcctgaccccaccctagaggtgaagcctgggaagagccatcttaggcagctcttaatacttgatgccctgttccctgctccccaagccccaccaagtctaggctctctcctttctagagaaatacttycaagaaatatcctagcttcctgtgttagcaattcccttgtttgaataagtagttctttctactgcctaacctcagcccttcatgctgcagttaaattcatccatatatatgtatatatacttttttttttttttttttgaggcagagtctcactcttgttgcccaggctagagtgcaatggcgctatctcggctcactgcaacctccgcctctcaggttcaagccattttcctgccctcagcctcccaagtagctgggattacagacatgtaccaccacacccaactagtttttttgtatttttagtagagacgtggtttcacaatgttggccaggctcatcttgaactcctgacctcaggtgattcgcccgcctctgcctcccaaagtgttgggattataggagtgaactactgcgcccggcatatatatatatatatatatatatwctttttttgagacagggtcccgctctgtcatctaggctggagcacagtgacacaatcatagctcactgcagcctgaaactcccaggctcaagcaatcctcccacctcagcctcctgagtagctaggattacaggtgtgccaccatgcccggctaatttctttaaactttttgtggagatcagctattgctatgttgcccaggctggtctctaactcctggcctcaaatgatcctcccacctcagcctcctgagtagctaaggttataggcgtgagctaccatgcctggctatatgtgtgtgtgtrtatacatakatatttttttaacctttagagaagatacagaatatcaagctcatacttctgtgtaactacctccactgactcagaactctaagtaagcttttcccaacaggctcttcctgctcaaatgactgtgctgtcagttctcaattttcagtgccccttatccaagatacctggttcatgccaggtctccaccggtgtgtgcccagggattgctaatgttggcttgcagaagtaagaagacaagtcagctgccttgaatttcacagtacagaagagagctaaatacaatctttacttttctgtaatttcggattccctattctgttttcctcactggcacaaaacagagtctacattaggttcttcctcctcagtcttaagactttaagaccttaagcacaagccttcctcttgctaagttttttagtgatcattcacatgtgctagcttatctatgccccttttaaggaatggaaaggaaataaagtggagggaggtactttgtagccaacccctgagtgaggaggattctgggatggggtgggaatgggatgggagagccacaagggttgggggactcacatgggaaagtgatggcatcactagtgtttgttcaggggtagacgggaaccgcagctccctggctttattttattttatttttttacttttattttagattcagaggtacacgtgcaggtttgttatataggtaacctgcctgtcaccggggttggtgtacagattgtttcatcacccaggtaataagcagtgtgtgacaggtagttttttgatcctcaccctcctcccatccaatccctggcttcttgagcctgaggtgacctgggcctggtgggtacctctagccacaaggagagcacggtttgaggcttagcaaatgcctagacttgggggattcttgtttccatatctaggttcattttccaacccaaccagcctcccaggagagaggaaaaggagtggaggaggttagtgtagggatcttccagcagacacgtggccagggcactgctgcccatcactcttccttccctgcaccttcctgagaggctccagccccccactggccattaagcctaacctctggcttaggggttcatcttggcctggatcctaccttggccttgaagactccaagagatttccctggatagggaagaaaccagaggtggagtgtgggtcctgcttaggttgtgggaaccccccaaaattcctcactgctgactacctgccttagggttggtaaacattagggcctcggtagaactagctctgcccacctttctctagcaggagtggaggcgccaaatgctgtgcagtgacttggcctccagaatttccccagcttgtgctagggagaccccaccacatctcttccagggtcctagctgtgtgtcttccacaatgactgcatccctccagtgctgtagagtcggaaacaggcatggggasattgccaggctgaccctctctggtctgtttccaggcgtctcacttcttctgggctctctgggccctcatccagaaccagtactccaccatcgactttgatttcctcaggtgagtgtgggkgtgatggtgggaygtggagaaaagggagagccttggttgagcccagggtgtgggcaaaggacagcccaggcagaatgcccagagtccgctcccctgctctgctgactcgcccccgttccagctcatctccagcggggccactatccccaggggatgccaggaaagtaccactctgaaaagagaagtgtcacatcctccctgttcctcgtaggaggtgtgctagtccccacgaaatcctaccgcctactccactccccaccctgcttccagcgcacctatccacagagcctggtggtggatgggatcgttgaaaatcagtctgaacgactgtaggtcttaccctcattttacagcagagaggacagaggtccagagagcagaagtgacttgctgaagccatgcagtggttaagggtttaccatgctgccttctggttgggcgacagccccagctactccttcagtagctagccgctgcttgtgtatcgatgattcagggagtccctgtcctgtgaggctcctatgtacctaaggccaggaatcatttctccttccattctggtccagggccttgcccttctcctcctcacccaccttcagctgaaagggaatcactaccctggtttcaaagtgttcacaactattagagaaatgcaaatgaagagcacggtgaggccgggcgcggtggctcacgcctgtaatcccagcactttgggaggctgaggcgggtggatcacgaggtcagaagatcaagaccatcctggctaacacggtgaaaccccgtctctactaaaaatacaaaaaattagccgggcgtggtggcgggcgcctgtagtcccagctactcaggaggctgaggcaggagaatggcgtgaacccgggaggcggagcttgcagtgagccgagatcccgccactgcactccagcctgggcgacagagcgagactccgtctcaaaaaaaaaaataaataaaataaaataaaatgaaatgataaaaaaataaaatttaattaaaaaaaaaagcaaagcatggtgagatgtcgcttcacacccattaggatggctgctgttaaaaaacagaaaataataattgttggtaaggatatgcaggaattggaacctttctgcaccattggtaggaatgtaaaatggtgagctactatggaaaacagtagggtggttcctcaaaaaataaaaatgtaactaccgtatgatccaacaatctcatttctcggtgggtagccaaaataattgaaagcaaactctcaaagaaatatttatatacctatgttcatggcaacattattcttggcatagtagccaagagatggaagcaacccagctgtctgtcaacagatgaatgaatgaataaaatatagtctatacatgcaatagaatattggccttaaaaacgaaggaaatgtcacttgctacaacgtggatgaatcttgaggacattacgctaaataagccagtcacaaaaagacaaatatggttctttaagagataactaaagtagtcaaatccatagaaaccaagtagaattgttgccagggggtggggagagggagcaatggggagtattgcttaataggtctagtttcggttgtccaaaaggaaaaagttgtagatattcatttgcacagcaatgtgaatatacttaacaatatagaacggtaaaaacaaaactccaaacaagcatgtttgtggaagggtttctctagtctgatctaagaagaaaaaaaatgtagttgaagttaaaaaaaaaataggctgggcacggtggctcatgcctgtaatcccagtactttgggaggccatggcaggcggattgcttgagctcaggagttcaagattagcctgggcaacatggtgaaaccctgtctctacaaaaaatacaaatattagccaggtgtggtggcgtgcacctataatcccagctattctggaggctgagtgggaggatcatcagagcccgggaggcagaggttgcagtgagccaagatcatgccattgcactccagcctgggtgacagatccagaccctgtctcaaaataaataaatattaaaaattttaaaaagaagcaaaagaaataataatactaatcagtctgggttggggttgatctgctcagacttagataggcctagagccactgaaaaacttttctcatgatgtcagcacccccagcagggcccacctggctttcttcctcacacccagcttccttctgtcttccccacaggtacgcagtgatccgattcaaccagtacttcaaggtgaagcctcaagcgtcagccttggagatgccaaagtgaccagccaccccatccctcccctacccatctgtctggccagacctgttctccagagctcaattctgcactctgggatccacacccttggacagggtgggagaggggacacatgggtgtccagggagaaggctctgtccctgccgccagaccccagtggttgccactgaagacctcattctcctgtctggaggggctgataggacccccttccgggggtccccttcaccccaccaggcttgggaggaagtgcctgcagccaggtcctgaaccataaccacccctgggaaacacatcattcccagcctcaggccctgctggaattggggctgccttatatgtgtgtttaccccttcctggcctggggaaggaggcggggagggctcctttctacctccagtgccctgagcctccagtccgtctccccctgcatgccccatgtgggaggtgctgagctccaaaccagcatcacaccaactctgacacatggatgtacctatcttggtgatgggtgggggccaagaattgagcatgacatcttccccagcagccacctcctctgagatccctcaccttctccaaaccagatccaatcaaacctcagcccgaggaaacatgctccccaacgtgctctcctgtgcttctgttttgtccccctgctggggggacaggagagggagtggtgaggccctgggcctccagagcctggctctgctttgtgctgtggcttagccggaggggacgtggccaagggtgaggtggccaaaaccagaaccagcagtctcctgccttgttccctccctggccctcaggccctccttccagggatgtctctccagctctactttatgtcctgaagctgacccgaggtcttcctatctggaatgactagagggagccaagaggatggggtgggggccagggccccccagggcctatcgtgggagagcctgggcaggatcccatcagaaaggtgctgactaaactggttgcccggacactcaacagcctccacctccctttctaccctcacagctcctggggccttcctggctctggcccagaaagtgattcatttgtaaattatcatggttttctttctgcattaaaatgctcatttccggactgctgtgtcttgagtgacaatggtgaggaactgacccctgcgtgggggctgaggggtgctgtaacccctcctgatatcccccctccacctgggcttcatgctgaagtcaaggtagccgcctgcacacatcctcctgtgcacctagctccgaaggctctgggcagggccccctatttctctcactcagcttctgtgcctttgactctcttagtagaacctaccagttaaacccggtaaagcactgcttagggggaactaggctgtggattacaaggactttggttgacccaggagatgaaccagtgacattctaaatagaagtgctcaggacaccttcctcggtcatgtctggctcccagctgtcagtggggtggggaaggggctgctctgcctgagaacaggcaggagtgatttctggaaccaatccgtcactttttcagaaggccagaaggaagagcagaaactcaaagatgagaagggggcacccctcttggcagcccagtcactccggctatacttcccaggctgtgcactgggcagcagctgctccaggactgcccccctgccagtaagtgcccagtgcccttaggggcagcagaggcaacagcagcagcagcctgccaggtggactctggttgtttggcttttgcctgcaaaaagcaccctggtgccatggcaaccactggagctggcacctgcagctggagctttcaaggtcatggtgatccagcatagccaggccctccatgggcagcagcctcggggggtgacagtggggggacacgagcgaaagaggtgcccaggcgtagggatggtgccagggctgggcaggtaggggccccctggggtcacctgtggggtcaggtggtcatcatagacactacctgtctggactaaatagcagtgtccccgctccttcttcctctctgagccacctctggaattgagggcagaattaacactgtgaagccagctttgtttccagcctcctgggtcttgatgctgttgcgctggagataagtgttgcagtggtgagtagggaatggctgggacagagcccccccccccccccccgggtattgtcctgtgcccctaaggtcctgaccaccatctgtatgggaaggaattaacagcagacatcatcccactgccgcctctgagaaagcattctccttcccccagtcctccaggggagtgagccggtgtggtggcagggaacacaaccctgttcctcaaagtctgggagttccaccttggctcctttcactgccaccccaggctaaccagcactcctgtcctcctggctgagcaccaagcctgggagcctcccagtgtgatccgggttccaccccctcgggccccttccaggactcttagcaaagagctctagttaaaggactcctgggcacattcaccttcccaacgggctctgcccctcggtctctgccggagacgcacggaggggacgaacttgtagcccagctttcctggtaatgaccacagcactctgctcctggcctctccaaccacctggccccatcctgcctctcatgagacaggggtggggctccaggacccgcaactgtgtctcagcagagggaataaggcaggcaagacaagaggacttgcgggagggaagaggaactcaggaccgacaggtgggaatgagccaggctgggagagtcttgagactggcaggacatggtttggacccaccagtggagtggaggaggccgggggccgagaggggcgggcggagaggggagggcggagagcggagggccggagggcagagggctgaggggagtgggaggtgcaatgggcagctctccatcgtgaccaccagggggcaggcgccgccgccagctcctcctcccacctctgcctgcatcttttccagacgtggcgtggggagggcgaaggagaggaggctctgagaacccgggctggggaaaaaacagccagccagcgttcaggacgctccccataccaaatggctgggcccttaattcttgggcagtctccattccacaccctcccaactttgtggccctagaatcaaccaccacacctaccctctctcaccactaccctctccaatctagaaatccctccaccagtactcaagagcttgaggacttgagttgggaagttcactcttttttgtggaaaaggtgttctttatgtcaagacagtcttgaacctcatccaggagctcaagttctgcctcatgaactttgtgcaatactacactttgcccacctggcagttttggagaaagcaatcttgtcctttctgtccaactctgtcttcttttctagaggaaacacacctgacccttctgactattcctctaaggacaatgtgcaccaggatccctcctgtgctcctccatgtggggtgcctgcttcagggcccctccattgtgagacttccctagtgagggggcgaggaagggcacgctacccctgggactaggtctgtgtggggtacactggaccatcacctcccctgttgtgaacacaagcctctattaatgcagcccaagtccaactcttccacaagaactactgccattcggttttgctgtccccactctatactgatgggattaatttttcactacaagatgtgtctctctagagcctggttaatatgcatttttgaggtgtttcagtctgtcatccagcccttgcaggcctattacttctcctaatgggataactaggtctgaagtgttcactcaaagcatgtgtcatggatagagagccctgaagcattatcattagagaccctgcttcattaattagcatcgtaggggcctcagatgggcttcagggtaaacctttgtgggcccttttctaagaaaaggatccacagctttcattagagtctcaaagggctacttctctgaatggtaagaaccaggtataaggtttaatcttgttgtcagatgaggacaatgaggccccaaaggagagacctggctcccactccccaaccccagccatgtggccagttctagagagaccccgagcttcatgactcctattacagtgctcttactactgccttctttcttaggatccgggtggcctcacctcgtcaaggtaggggcattcagcgtgggctctgtggaggrmatgtgtcactcacaagcttggcctgggattcccttgcattaagccaattcctctgaggccccaggcctgaagctcctgcaggctgccaccaggggacagtggtgcccaggctggtggcatatttgggaattctggacttaggccagcctccctcctcccctgcacaagggccagattctgaaaygatctgtctttattatgtcatcagaaaacaaaaaaatcccccgagtgtaaacaggagaaatstgctggttaagttactcatcattatcttattattaacaaaataaagcactatctatgtttacagtcataaaaaaagaaacagcctggagagaagtgggggctttgaggatggagagaagacgggggcagacacagactccacatctggccctgtgggatttggggttcccgtactgatccaagggctatttagatcttcagagttaggtgacaatgggatttgatttccttagggaacaaactttgtgaaactgatcagaggctgagatccagtccctagtatagagtgggggaggggagggcaggcaggtgaggggcagggctgggtgggagaggctgaagcccaggagtcttctcaacctcttccaagaatggggacccccccgaccctgtgctcatgagggaggaataaagaccagctgccatggacagcccctctccagggcctctgacgctggcaggaaggggagcmccatcaatcctcctgtcccaactccctcgtgggatcaggttgggaccaggggcgggggcaccaggacaaagccccttggaggccgaggcacattcccatgctgatcagagctaaaaatggctccgtgggaaccgactggcagagccagggagggagtgaaggggagggcaggaggaggtcaggaaggctgatgagcccagggcagaccaggggcctacatagacccagagaatccagagggcacagggggcaaaggacagacaccaagaaagagagaaatagagggccttgcagagagacgaggacagagagagacagaaatgcacacaaggacacacagaacctgagacacccagactgacaaagaggtagcaatttggggacaaagagaagcacagaaagaggcccccagagaagcaggagtggcatcgagagacacacccacaggaactcagcaacagtgcctggcacgtagtgggcactcaataaatatcttgtgcagtgaatgaacagatgaaacacacacacgtgcacgcgcacacatacagcagccagaggcacaataggcttggcagagatgaaaacagcaagggacagccagacccttttgcacaaagtacaaagcgatcctggtgatagacgagcagtctgggggagtgtgggaggggtgttggtcccacagtggctggtccagccaggacaagaatggaaacaaagcatgtgaccccagggagacaggtcggtagatgccataccccaggtggatagacacctgcaggagaggagagtcatacagtgtcccctggccataagccctaaaggctgaggtgctcagcctgctcagcccatggccatactgcagttcctgcccacccaggccaacagctcctcaggaagggagggcgcctctcccctcatgaatgtatctgcaagtgcacagctttgcccatctctggggcacgaacaagtccaagtaccaacatagtcttaggttggctggctgtgcccatcgagttgggacaaggtcttccccagaggagaaggggccrggcccacccagccgggatcagtctgtgagcaccaccaactccccatcgctcttctcttcrccctccgagtcctcgtcctcgctgtaccggtacatctcgccatcagccaccgagtgcctgtcatctgtgccctcaccctcctctctgaggctgcaggtgttgacgatcacaggcatgttggggtccaggctacgagggacatagtgctccaccagtggctgtgccagcggcatgcctgctgcccgagggtacaggacatctgaggagctcatctgcacctggccagcctgcgrgctgtggggcagagaaggggaacggtgatggatgcacacttgattcaaccccaaacccatctcccctccaggcctcctcagagcgtgcactcccactccacacactcttggctgtgacttatataccctgcccccagcctgctttctgatggccaaattcactggcacctacgaccctgcagatgacctgcagacctagggccatagatgtgttcaacagataatattcttggaggatcatgtgtgaatccagtttttagaacttgtatattttatgttttgtttacttatatttagagacagggtcatgctctgtcacccatgctggagaacagtggtacaatcacagctgactgcagcgtcagcctcccaggctcaagtgatcctcctgagcctgcctcagcctcctgagtagctgggactacaggtgtgaaccaccacacctggctaattttatttaaagatgaggtttcactatgttgcccaggctggtctcaaactcctgagctcaagggatcctcctgcctcagcctcccaaagtgttggcattacaggcgtgtgtcactataccaggcagaaattgtatattttaaatgccctgggagatgtcctgtttaaaggaatagactagggtgcttgctttagtcaagtcaggaacctttctgtgtgatgaatactttgatttctagcacctctgaatttctattgagtttatcggccgtgggatctacaggcactttctccaggtccacgtggccagtcctccagtcacattcctacatcctcagccactga

SEQ ID NO: 93418 - DNA, 33968 bp, Homo sapiens
  misc_feature (1)...(33968): n = A,T,C or G
aggagaatagcttgaacccaggaggcagaggttgcagtgagctgtgatcacgccattgcacttcagcctgggcaacaagaacaaaaagctccgtctcaaaacaaaaaacaaaaattagccaggcgtagtggcaggcgcctgtagtcccaggtacttgggaggctgaggcaggagaatcacttgaacccaggaggcggaggctgcagtgaactgagaccacgccactgtactccagcctgggcgacgggagttcaactgggcaacagtttcattcaaaactcaaaaaaaaaggaaggtgggtaaggagagtccattatgaacaatgtcatttctctctgctgaggaaggggcctagatagttccaaagcagtcagagtcaagtctctggggtcgtgggcgccttgcccttctgaggtcaggatggtgtctgtttgcccgtcagtcaacactcccatgtgttttccccttctgtgtcagttcctgtgctgcttctcctgcctggaatgtgctccccttcactttgctatccagtgaactcctattcagccctcagggcctggtgtcagtgtcatctctgtgatactcccaggggaaattattgtccccagaccctagagcaaggtgcttaagagagttggggttgggcagtatatgcttttccagccactttcttcttgggtaaagggcacctcagtgtccttacctggggcctggaccaatgtaataggggcggagttccctctgctatgggatacctccaataggggagtggtttcccagaggagtttggggtttctcaataagaatgtgacattttggcttcccagaaatgtaaaaaataaagagtgtgacagggtggctgctctgtctcccccagacccctgtgagaggatagacattgttttcctagggtccagacgggagagggagcctcactcacttatttcacagatatttcctaagtgttatataccaggcactatcctcgggatgaataagagagacaaagtcctgggcctcatgaacctcacgatgagtgtgtgtataggggggaaaatacgctgaacaagtaattaagggttaacaagtgtgacaaggggaagcacagcaatctctgagggaggtcagggatggcttccccagggaggtggcgcttgagctgaaatggaaggatgaaaggaagctgggattgaagggtttgtggcactggcctcaggcaaagcacgtgctagggacttgggaccagctggctatctggggttccgtgggatccagggattgctgtacctcactattttgaatacccgaagggcagagactgggttgacagactcttccctctgccctggccagcacaaggcctggctaagtggccttggatgataggtaatgctccagtatgggcccccagagatgggcatctccggatcctagactctcagagctcatggcccgagatgtcatagggagccctcatggtacatacagatggggcagctgaggcccggaggaggaagtgacttgctcaagttcacatggccatctagtgtcagaggcagaagaaaagcccacaactgccaggccttcagcttcttcactcctttcttcagacttcaaatggaaaatcgcatcccagagaggtgcctctgctaggggtgtgaagagctgagaaggaagcaaggccaagggagtcttccctgccctcccctcaacaccttcaggggctccttccagctctctctccctcacccttctcttggaaaytccccttgggcctgaaaggggctctcaatcagtgtgctctccccatactgtaccctccctgcagtccctgaagcagggctcctagcaagggttgaactgtggtggccaagccctgtgaccccaaaaatctgcattctcttgtcagcagagggcagagtgagagcctcccctcagcacttgctccttggaaatccctctctctccagaccctcaaagctgtctcagctgctcatggcctgtcacatgctaaagaaaacgaataagaggaagcattgtatgttatttgggccacagtgaacatggtggggttggaggagcagggacacacaccttccttgtgcggacccaaaggccacctctagcccgttggcagacttggggaagtcagccaagtccctgcagcttccttggttaggaggagtgaaatctctgtccgcctcccccatcgttagttataccccactgtactctatgcccttgtactccactgtcctgaggggctgattcattaaaagactgtcagcccactcacagggtgcccatctctgtgcttggcatggaaggggcgatagagacagctcagctcacagaggatttaaaccctgaatcttgtagcaaagtgcgtgattcccaggaggctcctggtagggagattactaagtgaggcctcctgtctgcttaggacaccccctcctccaagtctagccaagtgaggtcttccccaccattttcatttttattttttgagacagagtttcgctcttgtttcccaggctggagtgcagtggtgcgatctctgctcaccgcaacctccacctcctgggttcaagtgattctcctgcctcagcctcccgagtagctgggattataggcgcctgccaccatgcccagcaaatttttgtatttttagtagagacggggtttcaccatgttggccaggctggtcttaaactgctgaccttgtgatctgcccgcctcagccttccaaagtgctgggattacaggcatgagccacagcgcccggccccttttatttatttatttatttttttgagacagtctcrctgtgtcacccaggctggagtgcagtggtgtgatctcagctcactgcaacctctgactcccaggttcaagcgaatctcctgcctcagcctcccaagtagccggggctacaggtgcccgccaccatgcctggctaattttgtatttttagtagacacggggtttcaccgtgttggtcaggctggtcttgaactcccgacctcaggtgatctgcccgcctctacctcccaaagtgctgggattacaggcatgagccaccgtgcctggccttccccaccattttctaagagggtcacgaggcattccagctcattcttgtggttcctggagttctggtccatatgccttccataccacctacttcttcccaccagtcctagcctagcctgtcctgtgttcttggcagtgggcagtactcctcccacaggatcctggagcaagcactgcctttgcagtgaaagtatttatgcgctatcatcactacctccgtcagtatgcaagcgtcaccgttgctactacagctaatctacaagccccaccatctccacctccaccagtttctattaaacacataggtacacctactatgtgctgagcctggggttactcaaaggagtcagacaatcactgctcttcaggaaactgttctggttggaaaggcagacactaaaactattgtctgaaggcaagttctgggatggtgaacacggggtgcaggggagccctggggtgtgatcagtactrtatcagaaggcagcactaatgtctgtggggccttcattaaggaagcactgagctgggggaagagggggtgcaaggaagacttcatggaggagcagcatgtagagcagggcattgagaatgaaaaggcacctttcaggccaaggtggaagaggggatggcaggtgtgaacgcctggagttgtgtgctggagggtggcaagcagttttgtgtggttgtagctctgagaagaagattctcatctcagagatgaggtcggagatgaggctgaactggtgggcaggggcagctcctccaacgcttcttgtgaaggccaaggaacctgccacacttcagaaatcctttgagcctcttcacatacctgtcctcacttaattcatgccaagaaatttagactttatccttgggtattccctctactcccccatactaactgttctttttatgggccccagtttccctatctatataaattcagggaattggctagctgatctccgaggtctttttcagctttgacactaggaccattttctctgtgcaaagtgtacacgcagcttggtacacagtgtatgctcaatgaatattttctatgggtgaataacttgccagcctttcaaggactgcactgttgtcaacctgagactctagcaagagaagggcctcagagagagttgggtttagctttgactctcacattttgcagggagggaagagggtttgctggagccatcgggcataagaggtagcacggtatagtggaggggcttgttctggtggcaggaaggataagccatgtggggtctagaactgagggctctagacttccagcccagtgctctctctgctctaccatgttgcctctagttggagagacagggcagaagtgatggtaaagaagagttattgcccaggcaatggggccctgggcaggtccctcagcacaaggacacctgtgatgaggagacagaggtgggagcgccaggcagcctagaaggcttttcttctctctgtttttaatttttcactctgtcacccaggctggagtgcagtagcgtgatcttggctcactgcaacctctgcctcccaggttcaagcgatcctcccacctcagcctcccaagtagctgggattacaagcatgagccaccacgcctggctaatgttttgtgtttttagcagagatgaggttttaccatgttggccaggctagtctcgaactcctgacctgaagtgatctgcccgccttggcctccccaaaatggtgggattacaggtgtgagccacaatgcctggcgtttttaaagaaaaaaaaaacatgcacacacacacacacannnnnnnnnnnnnnnnnnnnnnnnnnnnnnnnnnnnnnnnnnnnnnnnnnnnnnnnnnnnnnnnnnnnnnnnnnnnnnnnnnnnnnnnnnnnnnnnnnnnnnnnnnnnnnnnnnnnnnnnnnnnnnnnnnnnnnnnnnnnnnnnnnnnnnnnnnnnnnnnnnnnnnnnnnnnnnnnnnnnnnnnnnnnnnnnnnnnnnnnnnnnnnnnnnnnnnnnnnnnnnnnnnnnnnnnnnnnnnnnnnnnnnnnnnnnnnnnnnnnnnnnnnnnnnnnnnnnnnnnnttcaccatgttggccaggctggttaaaaaaatatttaacaggccgggtggtgtggctcacgcctgtaatcccagcactttaggaggccaaagcaggcatatcacctgaggtcaggagtttgagaccagcctgaacaacatggtgaaaccccgtctctactaaaattacaaaaattagccgggcatggtggtgcgcacctgtagtcccagctactcgggaggctgaggcaggagaatcgtttgaaccgggcaggtggaggttgcagtgagccgagagcgtgcccctgccctccagcctgggtgacagcgagacttggtctcaaaaaaataaaaaaaataataaaaaaaggacctaccttacacaattgtggataaaatgaagtaatgcatgaaagcggttagcacagagcctggcacatagtaaacactaagtaaaagggtgctactattttgaacactgtaactacagaaatacagtcagttcgatacatttgtacacacaggcacgtgacastcacggggaggtggctggtgggctctagcggcagcagggctgcggatccgcgttctcccagctccattgcactcctcagagcggtagcctctgggctgagagagtgggcaacccgcctgccccacctggactggccaggccttcccctgtgcgccctaggctgggcggctcagccggtctcccaggtcccgggaggggcggagccgacgggatgcgcgccaggccccgcccctcctccgggcccgcccccggcctggccattggccgcagagctcgggggcgtggtcgagctggggctgggggcgcccgcggtgcccgcccgcgagtctcgctgcctccctcccggggctgcgggcccggcggccgggctggctgggccgcgcttgggttcccgcgccggctcccgcacccgcaatggggaactcacaccacaagaggaaggcccccagcggtccccgggtccgcagcttctggcggttcgggcggtcggcgaagcggccggcaggtaggggccggggtgggggcggggcaggcagggaggagggtccctactgcggtcgtcgccaccgctgctgccccctcccggggcttggagggtgtgagtgtgggggggtcgggaatccccgcgcagaccccacccctcacaggcacacggagacacacgtacacggtaatacctacgggcgggcacacgtacatgttcgcagtttacacagtcacacgcacaacacccactcaaatgtacggacacgcagacacaggatcacatacaccatcacacccacactctcgtaccatcgcagtaggacgcacacagcctgagacataggtacatgtatacctatgcatgcggtttacacagccacacgaactacacccacgcgcagatccagacacacaggcacacagtcgttcacacacatcggtcatgtgggtacagttgcccagcgtcttaggcacacagatgtacacacaggttcataactgcacaaccaaccggactcgcattcaggctcacagcagaccctaaggcactcggacacacacgcttatttcccagatcttagcccccaacaggctgaaggctgaaagtttgtaggagggaggggagacaaaggtggaagggagaagctggaaacccggggctggagtctggggaccgcctccatctggcgcgatcgggagtcggactggttttcttggctccctccctacccccacccgcgccaccgcgacttctccccgcctccccccctcccccgtccccacggtccccgaggtcgccgccgcatctccccctttcaatgcagccaccgagctggaacgcagcccttgccggctgctgcgggatccctccgcgggtcacattccaggctccaatggggaggggagggaaaggggaaggcctccaatcccaagagatgggattcctgtttcccccaacaagtgcggcagttcagggtatccccgaggggcgctgaaggaggggctatcgagagtgcctagttactggtgaatccagagatgggggaagggcagggtgatggtaccattccctcctccccaagatagagggtcttcaacataggcaggcactttagcgatacctgttggtctgggggagtgaggaaatcccagaggaggtggagtgaagggggccctgctgtggtgggagaatctacgggtgtattcccaggatggcccacattcctagagattccgaaccggagcttgatgatctcatcgctccatggagggggtggtggaaagagcctgggctgggaagtgggggacctctcctctcaatgaggctgtggaataggccctggtgaccttgagcagattcctttcacttgtctggaccactctggctcctacaggggttctgtctgtgaaatcaggggccctaggtgacttcttgggacacttactgttctggctagccatttcatggatgacgagactgaggtccaggaaagagggacttgtccaaggtcatttgcctrtggtggtttgaggtagtaatataatcaaaatgacaataagaaaagggttaactaagttcagttaggctctttgaggatttctcagaaggtaggtgttgatgagaatctccaggaccttccagcactctccctgccccagcagtcctgaaagccctgtctgtgcctacctgtctctcctagaatctgcactaagggggcagggctggggctcttcatctgtcctctgatggtcgctcggatctgatggtttcctaggaactaactgtgggcccagacttgtgaccatttgtgatggaggagagagaagataagaaggctgtgtttatagtctcttgcctactggcccttgaggaagtggcctggggcttccagcaacacttgtgagcttccagttcctgctgcaacttatgggtcaactcaagctttaaggcgttctgaaaaaaattagaaagcaatgtcaagacaacacagaaattaagtgtgaggggctaggaaatattctaggcaatatatcaaaagccttctgggttggggtcagctttagaaaactgaggagatggtcctaatttgtctttgaagtaatcacaggattgaaattagtcctaaattgttggttaaatgagagaaccagggatttgtttcagctgtggggtatggccgtgagtaaaggcatggagttgaggtcaggcgaggtggtttatgcctgtaatcccagcattttgggaggccgagatgggaggataacttgagcccaggagtttgagagtagcttggggcaacatgacgagaccccccccccccgcccatttctacaagaaataaaacagtatctgggcgtggtggcacatgtgcctttggtcccagtagcttgagaggctgaggtgaggggattacgtgagcctgggaggtcaaggctgcagtgagccgatcgtgccagtgcactccagtctgggtgacagagtgagaccctgtctccaaaaaaaaaaaaaaaaaaaaaaagaatgggctggatgcagtagctcacacctgtaatcccagcactttaggaggttgaggtgggtggatcacctgaggtcaggagtttgagaccagcccagccaacatggtgaaaccccgtctctactaaaaatacaaaaactagccaggcgtggtggtgggcacctgtaatcccagctacttttgaggctgaggcaggagaatcacttgaacccaggaggtggaggttgcagcgagccgagattgcgccactgcactccagcctgggtgacaagaactcgactccatttcaaaaacaaaaaacaaatggagttgagactgagcatggaggtgggagggaaaagtagctgagggtcctcttgaggttccattgtgaatgtaaacctcggtacctttggttttacttgtgctgaggatcctaagtcatcctcggcctcagcctctgctgtgacaagcccagatggggactggagcttgagtataagtactcaagtgccagtataagtactcatttcrttagtctgtgagaagaggaaggagagaatacaaggcagggagagaggtctggagtctgcaggccacagggagccagtgaaggtgtttgagcaagggaggagtctacaaaagtggggtgttaggaagatggctctagggtgggggcaggtgcaggcaggacaggttgaggggtggggtggtgagagtggaggctcagagactgttgcagtaatccaggggagaggtgatgaggtgagggctggggacagggtgggggttgtgggagtggagaggagtggcagctgcagagacacttcggaggaagtggctgaattgataagacctgggattaaccagatgttgagagtaagggccagagggagctgtgtgggcttctgtgcttgaggctgcttggctgggagatggtagcagagataaaaataagtccctatgctgyccctttacatcagttaattcatttgtcctttgtcctccaacagtcccacaagccacaggctattctcccattttagagatgaggaagctgagttcggagaagtgaagtcactttctcaaggccacacagcaaggagatggctgaatctggattaaaactcaagcctgtcacattacaaagcctgtgcccttaatcagwttaggaatagaagggtgtcatcttatgacaccctgcacgtcctctgggcagagaaagcctgcggccccggccccgggggatttggactatgtaaagaggactagtggaggaagcactgtggggagggttaggggttgaggactaagcattaaagcctccaagcgcttagagaggaagcaagtgggaaggggaaatcaagactcaaggaagcgttgatcccgcagatcaaatgcccttgtaaggtagagaagggtgaaggtgtatgaggtgaggcctcctgactgctggaaagatactgtaacctgccgggattgtttggtcttggcactcagggatccacccaactctccccttcccaggctagctgagcactcggtcctgggtaggttggggaatggtggtggatgtgaattggtaacccaggaagacccgccctcttccttttcccatgcrttgcactgtcaagctcacacacatggccctccttctggttggatttattgttcccattgtgcacatggggagactgagggaagggactgctggagtcagaccatctggaattcttttcatccttccccctgcctgtagacctggaggtttaacttcttggagtctggggtctttggtaggttccacagctggacaaggctccctcctccattccccccatgtctcgtcccctttcttgtggggagacttgtgatcaactgcttgggtgacttgcttgtgggakccccgggcttccagataagaggctggtccagctctctctgatcccagggatctgagataagcggaatctccttgctgccccaggccccgactcaaggaagggaascactgaccccccttccttctaggggcaaagtcatccatggtgagggctctttgaagatcatctctccaacccctgccacatctcagatgaagaaamtgaggcccagaaaagcacagtacctggctcaggatcatgttgcaattaaggggaaatgaaagctccaacctaggaatcctcactccagggcagtgagatctggtctgggcctggaattcccttccttcccaaactgaggggttagggctgccacatggaggggtgtcactaaggagagatagggagctgatgtcaagtgttccttatcagaccttatcttaatggtccttaaccttacttgagatttgaagagagctggagtggtggggagaggaggctgctggtggcataggaagaacatgattttgcagccagtcagagttgggctcacatcctgcctctgccatttctagcagtgtgaccttgggcaagtctctgacccttggggtcagggtttacactagattgtgtggctttctttaaggttcccaggcactctgtgatgtgggtgttagtcccaccttacagatgaggggactgaggcccagagaggccaattccttcatccaaggcctggaatccagacctcctgattcccagctctttcttctccttactctgtggtgtctgcctctggcatccataagatggggataatcatgccttgaaggaactaaggaaagggctgtggaaagttagaattgcgccttggctgaaagggattattatgtcattgctgggagcaaatactggcccagaaactcattaggacatttattaatattatcgtagctaattcctccgtgcactactgcctgttcccccagggcaccctgtgggatgggctcctcccctccctgctctgggcactccctgccccccattatttaccttagaaccggcctgtcagctctgtccctgctggggtggggctggacaccaagggaaggaaggagagggattccggcacaggtggggtgcagagcccctactttctttgggcagagattgaggtcgtgcccctcccccaactgcccttacccattaactttctcagacttaggatcactaaggttgttggagtgagacccaggttcaaccactccctggttgggtgaccttgagcaagttagtcactttcccttgagcctcctggtgctcatttgtaaaaaggaaaccactcctgccttttaactttcttgttaggtgttctgcgagacagtagaagagaaagtgttttgagaaccgtaaagtgcctccacctgaaagtttgttatgctcattttcctttgtcttgcctctttgggaataaaatctacattctggtttctgcttctgcttctagaatgtgtaatggttggrgagcgggggccttcgtttgtccacctgtgcagtgaggggttgaggctaagggcctctgaacacccagcattctggctcatgggctggccagggacagttcagacaggagtagggagttgggggctgggttggcttcagagggttcggcctcctgagcaaggccacctggacagctgtgccctcccccytcattcctctcccctgagtcaggcctgcctggctgtgggcgcgccaccacccccgccccttgctctggaatggggcaggttgaggcctcaccccatggaggatgttgccaagacagtgcgtgcgcatgcgcgtggccttgggaggcagtggctccctccccgattcttccctttccccaggcttaggaaagcccctgagtaggggctacacacacctgtttttctgtacacacagccccttggcaggccctgtgtgggtctgtgcggtcgctcatgggtgaggaaggcagggactagggtggcttaggtgtgctttatgggtgtgtgtgtgtgttttttttttttktttgtttgagaccgagtgtcactctgtcacccaggctggagtgcaatggcgtggtcttggctcactgcaaccttcgcctcctgggttcaagcgattctcctgcctcagcctcctgagtagccgggattacaggagctcgacaccatgcccagctaatttttgtatttttagtagagacgggctttcacggcgttggccaggctggtcttgaactcctgacctcgcgatccacccgccttggcctcccaaagtgctgggattaccggtgtgagccaccgcacccggccatgtgggtgtggttttgagagtgcccacctgcggaggtggccccagtgggacgctgcctgctgcctgagtctctgccctggtaaactgtctctgagttgaggagcccgcaggtgtgcttcccggtgtgccctccgtgctgggggcgtggccaccaggagcaaggtgtcttctcagatccaggaagcctcctcccccaggcatgttggggatgggggtgtggtatgggatgcttccctcatggcctcagccctaggctgcacctctggactgccaggggcagaaatccctggaacaaggactctaagcgtggctgtgggcaaggtctttccactctctggacctcagtttctttgtgaagtacccctcccagtcacctgagactcaggttgctgagcccctccccaagcgagccacaggtgtatagatctggggtgactcggagaggctgcgagctctgacttgggtggggagggggaggggtgtcgctggggcaaccagatgttatcaagtgtaagcccttggatctctgggaatttgcagctgtggccctgactgccagctgtgggcctgggaccttgatgagctgatgttcctccacccccatcttggcaggagctcagcccttagtttccctggttagagggtagctgaagatgactgtcytgtgtggtgaaaggctccagttttagagccagccagagttcaggaagtcacttagctctctgagcctcgcaggcccatgatcaattactaggaaagtaccttccagtacctgcctcgaagaacttttgtaagagccatgaggacagagactacgttttgcctttcaccacgacctggcatggtgcctggcatgaattaatcaccctgcaaatgtcggtctactggtcttttctgtttgtgtgagactgataagaagagtgggtgggtgggtggatctggcctaagaggggaagagtggggaaggtaggtggtcgagaaacctccaatttgtagggatgatggggtcccatgaccctttttcagaggggagatcaggtttgtagctggcacagtgcacagaacgtggcttttggattcaagttgttctgagtgagaatactgctttgccatttacaccrtggaggccagagagggcagctttataatgcttgctccctctggtttccatttcctcatctataaaatgggaataaaagtgcctacttcttaggattattgtttagatctcattgatttgttgatgtgactattcagctccacaaatgtttgttctctggagagcaagatctcagcttgtacttgagtagtctccaagaggccagtgttagggtggcagcaactggggaaggaactgcaggggggtcgtgttgcttgggagcctctgtgaatttttagttccctagggactcagagagaaagatgctatgacagagaggtgtccttaggcacggctggtgggatactgcacagatacatatatatagttcacagactctctttcacagtctctgctatgttttttagagttatcaggggaatcttttttttttttaagctttatttttatatatttacttttttttttttagagacagggacttactgtgttgcccaggctgtagtgcagtggtacaattatagctcactgtaacctcgaactcctgggctcaagcccagcctcccaggaaatcttttatttatttwtttttttgagacggaatttttttgctctcttgcccaggctggaatgcaatggctgcgatctcggctcactgcaatctctgcctcccggattcaagcgattttcctgcctcagcctcccaagtagctgggattacaggcgcccgccacygcgccttgctaatttttgtatttttagtagagacgggctttcaccatattgaccaggctggtctcaaactcctgacctcgtgatccacccaccttggcctcccaaagtgctgggattacaggcatgggccaccacgcccggcccggtcttgaactcttgacctcaggtgatctgcccacctcagcctcccaaagtgctaggattacaggtgtgagccacagtgctagcctggaattttttttttttttttttttgagacggagtctctctctgtcacccaggctggagtgcaatggtgcaatctcagctcactgcaacttctgcctcctgggtttgagcaattctctcacctctgcctcctgagtagctgggactacaggtacacaccaccaccatgcccggctcatttttgtgtttttagtagagacaaggtttcaccatgttggtcaggctggtcttgaactcctgacctcaagtgatccacctgcctcagcctcccaaagtgctggggttacaggcgtgagccaccgtgcacggccagaatattttttaacagtgtcactacccagctgaaaccctcaaggcttatggggcccagcctgacctgtcgcctgctctcctctgattccgtctcctaccattctttccattgctcaatcctccagccatactggcctcctctctcttccttgaaatccaccactcctgcctcaaggcctttccacttgctgtagcctgtctagaagactcttccccaggtacctgccctgactggctcctcagtattcaagtgtcagttccaatgtccttttctgtttattttattgtattttatttatttatttttgagacagagtctcactcttgcccagactggagtgcagtagcgggatctcagcttactgcaacctctgcctcccgggttcaagcgattctcctgcctcagcctcccgagtagctggaattacaggtgtgtaccascacgcccggctaatttttttgtacttttagtagagacagggtttcaccatgttggccaggctggtctcaaactcctgacctcaggtgatctgcctgccttggcctcccaaagtgctgggattacaggtgtgagccaccgcgcctggctgattttattttttaaagatgcctgtcactcaggcgggagtgcagtggctcaaacatggctcacggcagccccaacctcccaggctcaagcaatcctcctgtcttagcctcccaatatctgggaccccagctgtgagtcaccacgcctgggtaattttcaaagttttttgtagagataggatcttgccttgttgcccaggctgatcttgaattcctgaccacaagccatcttcctgcctcggcctcccatagtgctgggattacaggtgtgaaccaccatgcccagcctattcttttcttagaggggcttttcttgacaacctaactaaaccactctccccgccccccggccccaccaaagcttcctgttacagctctggagtcttcactacccaaaattacattgttagtttacctcatccatgtattcatcaaatattttttgaactcaactcataacatgttccaggcactgatttagcctctggggataaactggtgaacaagataaagttcttctccattaactatagtccctagtactaggttaacacatgtttgctgatcaagtgaatggatacaaccatcttgtttttttcttttttttttttttgaaatggagtcttgctctgtcatccaggctggagtgcagtggtgggatcttggctcactgcagtcttcggctcccaggttcaagagattctcctgcctcggcctcccgagtagctgagattacaggcatgcaccaccacaccaagctaatttttaattttaattttagtagagacagggtttcaccatgttgggccaggctgatctcgaattcctgacctcaagtgatctgcccaccttggcctcccaaaatgctgggattacaggcgtgagccacagcaatcttaaaaagaggagttattagccttattttcatatgagatcgtgacttgtgtgatggagctggatttgaacctcgacctgacttcttttccagtacttctccacctcacctccttttttactgccttcacccatggactgtttcttggctaattctgttctccctgcctggtgatccaggacagaatcactgacagcgtggggccaatgtgaagaattccaggctaggggagaaggaggtctgctttgaagtctagcctctgcaagattaagtgtgatcttggagagtttactgtgtttctctgggcttctgatgtcacattgccaaagtaggaagaaagtcctttggaaagtgtggggctgaacctatgtatgaggggctgtactgccagccactgtggttctgctctgggcatctccctggcttcccaggactgtgtcctgggactggcccctgcccctctgggggcctctgcccacagccttgccatcccactagcagctctgggctcctgcctggctgctgcaggctccgagctctttccccagggaattacgctaggcagccaggaggcttgcaggtrggcaccctgccaagtctagtctggtagcccctccacctaccatctggcagctgggacccctgccttaactctggacttgcaggcagggtgagtgatctgctgctggattgagtatcttcggtcctcctaatcatactctactggagcagagcacccacggactcctggcctcagttgcctttctgtgcccctgcaccccatttaaggggtggggtcggcagatgggcgggatcagtggcgaaggtgggaggaggacatggagagcagcccctccccctcctctgtctggagccggtgctctgcggcggggcgggagggctcgcatccccatagtgctgggttacagtgaaggtacgccccgcgctctgctctggagaggcagggtgggatagggaacgtctcgagtggcgcccgcagtcatggtggtgttcgttggccgccgcctcccggcgctcctagggctgtttaagaagaagggtgagtgggtgtggcttggggggaggggagggatgctcgatgcctccctttcccagacccttatgtagaatgaggaatcaaggctgggcaaaagtaatggggtggggctgggggctgataatgaggccagaatctcccatccggctgtgcttttgtccagccgctttgttgctgcctttgtctgggccctgcttgtgggttgggaggatggatccaggtgtctctgaccttgaagcctgcagccctcccgtgagayttgcctccctgccggggtacccacactttactgggtacagcctcccagtcaagatgtactagsctttcctagtgtgccggggaggatgggacgtgggcggcccagaagagaggagagtagtaccactggaagttgggaagcctgctcagtgaaatcctgtttagaggcctgggaatggagaagttttggagggaggggcctgttcctccttccttctcctaggaattgggctttcagacctggattaagacatagggacaagagtttattggacttttgagggttgggggcccctactctgagtgtgatccgggagtcccctctgggaacctggagttgagtccagggtcagtctgactcctactgctgggtgaccttaggcaaggccttgcccctttgaaccgtttccccacttgtaaaatctggggatctcgggcactggtctggttggatctgttgggggcctcctagctctgacctgtgggattcctgcagactccctagggcaggagctctggctgttgacgaaygggctgagggaggaggaaaggcaggtttctgaactgaagaccctgctcctggagcatggccctttaaagggcttgttttgttcccgtccctttataaggtgttaccaaggtcacatgacccttccagcgcttttgcttatgttgtgggtttcatttaaagggggggctggggctgcaaagtgctgacacagccccccatccccaggattagatggccagcccctccacaggcggggcttgtaacaggatcctttgtaatggatccctggctcctctgcaacaggggccagggccagggccagggcctccaggagagggggatacctgggactatttccccaagagagactggagctcccttgggcgggtggaggggcctgggtctttcttctcccctcccctgcccatccttccactaaggggcagccacatgggtgagtaggggacccaggaggctatctccttggtctgcatcccccctaggattttctgggaatatggttgtaactcatgccagctgtctctccttcctgatttcccgtgatatcttcttcctggacctggttcaagtggtggcatgaaaagagtggtttgttttcctgtgaagtggggttttgggtatggaggcgagagcaatgtatttactatgggctatgtgtatactcgggatgttttttgtggggctctgagtgacgtgtgagtacatagtcgtgtgtatacttggttactgtttgtgtatatacagagcagggactgtgggtgttgtgtgtttacgtgcgggctgggtgtgcttggtgtgtgtacctatgtgtgtttatactcggatgccctttgtttatatacatgaatgacatctgtgagtgctgtgtacgtacacagtagacctgtgtacctgtgtgccctgtgtgtggggccttatatggggccctttgtgtggtgtgggtactcagatttatgtacacttgggtgtagtttgtgtatatgggggctgtgtgtgttgagtgtttaytccagaactgtggrttatgtgtccagactggggaagggggcattgcttgtatatgcaatggccgtgtgcagtctggggaccatgactgcccttgccgtgrgacctgtgcccctgcagggcccagatgcctttacctcatttcccttcctcctccctcctactaggctctgccaaggctgagaatgacaaacatctaagtgtagggcctggccaggggccagggtctgcagtggatgagcaccaggacaacgtcttctttcccagtgggcgacccycccacctggaagagctgcacactcaggcccaggaggggctccgctccctacaacaccaaggtaagcttcctctccactcccctcccctctcctccctccagtgctgcactgtcagctgtcaaggtcaggggcctaacccaacagacccttctggtgtcttccagagaaacagaaactgaacaagggtggctgggaccatggagacacccagagtatccaggtgagccctgcctccagctcagtcctgactcttctctacctgcttgacccctggcaaggatgtcttggaacatttctgggtctcagtttctttatcacaaagggctacactaaatgaaccctgagggctagttcagggttgctcagtgctaggtgatgctggaggggatctgtgactcaaaagttcgagtgggaggctgggcgaggtggcttacwcctgtaaccccagcactttgggacgctgaggtgggcggatcacttgaggtcaggattttgagaccagcctggccaaagtggtgaaaccctgtctctactagaaatacaaaaattagccaggcatggtgggagggtacctataatcccagctgcttragaggctgaggcaggataatygcttgaacttgggaggcrgaggttgyggtgagccaagatttcrctactgcactccagcctgagctggatttgtctcaaaaaaaagttccaatggggagccttgaggagacagccccacccagatctccttctaccctgatagtcctcccggacggggccggatgaagacaacatctccttctgcagtcagaccacaycctacgtggctgagagctccacagcagaggacgcgctctccatccgctcggagatgatccagcgcaaaggtggattcatgggcaggggagagggacagtgggctccattgggtcccagcatctgtagcttcttttcctccttatccagtgtttcaccaggctctctgattcaatgaattcgggaaacacagtaccctgtgtcctcttgcacattcgtgatacacactaactataaagcagttaagagttagaaaatcttggcggccgggygcggtggctcacgcctgtmatcccagcactttgggaggycgaggtgggcgggtcacgaggtcaggagatcgagaccatcckggctaamacggtgaatgaaaccccgtctctactaaaaatacaaaaaattagccttgcctgatggcgggygcctgtagtcccagctacttgggaggctgaggcaggagaatggcgtgaacccaggaggtggagcttgcagtgagccgagattgcaccactgcactccagcctggkcgacagtgtgagactccatctcaaaaaaaaaawaaaaaaagagttagaaaatcttaactgttggaagcctggtgtaactaactagtgccagctgtgtgaccttgggaaaacccttaacctctctgaacttctgtttgatgttctataaaaatgaggataagtaccctattggaatgaatgccaaatgtttagaatgacgactaacacgtaataatatgtttactaaatagtaagctatcactaaagggaaattaccatcattgacttagtagccttagtcttacagaaagaagcctctagctttgtttaacctagccttgcccatacctacttgactgtggaaaccatttctcgcagagctcttattacaaaagtagtgccctgcagaatgtgcctggagtcctttgctctaacagtttttctcccacgactggcccccaggctccaccttccgaccccatgactcatttcccaaatctggaaagtcagggcggcgtcggcgggagcggcggagcactgtgctgggactcccgcagcatgtgcagaaggagcttggtgaggcctgggttaggagggcagtggtggggtgggtggggagccttggtcatcccctctctgctgaccccacctcctccctgtcccttccaggcctgaggaatgagcgtgaggcaccaggcacgccccgggctcctggtgcacgggatgccgtacgcatccccacagtggacggccgcccccgaggcacctcagggatgggggcccgggtgtccctgcaggcgctggaggcggaggcrgaggctggcgctgagacagaggccrtgctgcagcgccacattgaccgtgtctaccgggatgacacctttgttggccggtccacgggtacccgggccccaccattgacccggcccatgtccctagcagtgcctggattgacaggaggggcagggcctgcagagcccctgagcccggccatgtccatctccccccaggccacctacctgtcgaagttgattccacatgctgtgctgccgcctacagtggacgtggtggccctaggccgctgcagcctgcgcacactaagccgctgcagcctgcactcggccagcccagcctcagtccgctcgctggggcgcttctcctccgtctccagcccacagccccgcagccgccacccatcctcctccagtgacacctggagccactctcaatcctccgacaccattgtgtctgacggttccaccctctcctctaagggtggctctgagggccagccggagagctctacggctagcaatagcgtggtaccccctccccagggaggcagtgggaggggctctcccagtgggggcagcactgctgaggcctcagacacactcagcattcggagcagtgggcagttgtctggccggagtgtgtccctgcgtaagctgaagcggcctccaccccctccccgccggacccactccctccatcagcggggcttagcagtgcctgatgggccattagggttgccccctaagcctgagcgtaagcagcagccccagctgcctcggccacccaccactggtggctcagaaggggcgggggcagcaccctgtccacccaacccagccaacagctgggtacctggcttgtctccgggtggttcccggcgccccccacggtccccagaacggacactttcgccctccagtggatactcgagccaaagtggtactcccaccctccctcccaagggcctggcaggtccccctgcttccccaggcaaggcccagccccctaaaccagagcgtgtcacgtctcttcgctcccctggggcctccgtctcctcttccctcacgtctttatgttcctcctcctctgacccagccccctcagaccgctctgggccacagatattgacccccctgggtgacaggtttgtcatacctcctcaccccaaggtgcctgcccccttctccccacctccctccaagcccaggagccctaacccagctgcccctgctctagccgcccctgctgtggttcctgggcctgtttctaccactgacgccagtcctcagtcccctcccactccccagacaaccttgactccactgcaggagtctcctgtcatctccaaagaccagtcacccccaccttccccacccccatcttatcatccacccccaccacccactaagaagccagaggtggttgtggaggcaccatctgcctcagagactgctgaggagcccctccaagatcccaactggccccctcccccaccccctgcccctgaggagcaggacctgtccatggctgacttccccccaccagaggaggcttttttctctgtggccagccctgagcctgcaggcccttcaggctccccagagcttgtcagctccccggctgcttcgtcctcctcagctactgctttgcagattcagcycccgggtagcccagaccctcctccagctccgccagccccagctcctgctagttccgccccagggcatgtggccaagctccctcagaaggaaccggtgggctgtagcaagggtggtgggcctcccagggaggacgtaggtgcgcccctggtcacgccctcgctcctgcagatggtgcggctgcgctccgtgggtgctccaggaggggctcccaccccagcactggggccatcggccccccagaaaccactgcgaagggccctgtcagggcgggccagcccagtgcctgccccctcctcagggctccatgctgcggtccgactcaaggcctgcagcctggccgccagtgaaggcctctcaagtgctcagcccaacggaccgcctgaggcagagccacggcctccccagtcccctgcctcaacggccagtttcatcttctccaagggctctaggaagctgcagctggagcggcccgtgtcccctgagacccaggctgacctccagcggaatctggtggcagaactccggagcatctcagagcagcggccaccccaggccccaaagaagtcacctaaggctcccccacctgtggcccgcaagccgtctgtgggagtccccccacccgcctcccccagttaccctcgagctgagccccttactgctcctcccaccaatgggctccctcacacccaggacaggactaagagggagctggcggagaatggaggtgtcctgcagctggtgggcccagagragaagatgggcctcccgggctcaggtacagtgggcagtgctagggtgaggtcccattgctgatgatgggaagtaggaatctgaagtcccgccatgggggatttgttcttggatctttaacttttctggtctgagaatgcctgggaagggcaagctgtcacccttgctggggcccagaggagaatggtgtgtgagtgtcaggcctactgtgtttgaattccaactttgcctctttccctacccttcctagctacattgtaaagtgtggggcagtgacacctacattatagtgtctgaacatgtgtagggtgtccagcccagtgctgcgggcactgtcagtaaatcaaagcggtaagaaggttgggtgagggtatgctttgttgggctcctagtgccagaaccaagccaggaggccccttgctaagtgtctcttatttttctcccccagactcacagaaagagctggcctgaccaccaggcacctcactggcactgctgacccatcccagaaacacaatctcagggacccgagcagctccaaggacgagaggatacagcagacacaacctaatagagagggcrcctgcagccttaacctccacggccttcgatacttatgcaagcctggtgttgctcctgtcctcagagtcatcctgcgctcatgccttttcccgaatgggttcacctctggcagttrccgcttcagtcttggccttagcctcatcttgaagtgggtagctggcgggagagggtggctgcgccccctgctggccctgaggctgcagagttgggagcaggacacctcacctgagtttcattttttttcatgtccaaaccatgcacatactatagtccagaatcaaagcacttttgaaaagtggctgcatggccatcctccagggcccaggaagttgcattccaagggcctgtttacatggcagcagaatccatccccggcagtcagcccatagcttgggaccagtctgtgccctcctgcccagtccagtttactcctcttggttcctgaaggtggccaagtcattgtgttcccacaggcttctctaggctgggggcaggtgtggggctgtggaattccaaagcacaaaaggtgcagaggggattggccttcctgtgcctcaactcaccaaccaccctcctgccttccagttctgccaggtgctccatgctggggacaagtaggagactgccagggcccaaagaaatgggtgagcagtagagtcatctcggggcacttggcagtgtcaagcacctgccccttgcctccttgaccacactggggtgggtgggcccccagcacttcagaggcaggagcctttgggctgagcaagcactgaggaggtggatggaagggagcatctggagggggggagcttccttgagcagtgggcccaggcctggccctccacacttcattctctgacctttctctctcctcatttcggtgcatgtcctttctgcagctgcctttcagcacaggtggttccactgggggcagctaacgctgagtgacaaggatgggaagccacaggtgcattttactcaagtcttctctagtcaatgaggggcacccagtgcttctagggcaggctgggtggtggtcccctaggtatcagcctctcttactgtactmtccgggaatgttaacctttctattttcagcctgtgccacctgtctaggcaagctggcttmcccattggcccctgtgggtccacagcagcgtggctgccccccagggccaccgcttctttcttgatcctctttccttaacagtgacttgggcttgagtctggcaaggaaccttgcttttagcttcaccaccaaggagagaggttgacatgacctccccgccccctcaccaaggctgggaacagaggggatgtggtgagagccaggttcctctggccctctccagggtgttttccactagtcactactgtcttctccttgtagctaatcaatcaatattcttcccttgcctgtgggcagtggagagtgctgctgggtgtacgctgcacctgcccactgagttggggaaagaggataatcagtgagcactgttctgctcagagctcctgatctaccccaccccctaggatccaggactgggtcaaagctgcatgaaaccaggccctggcagcaacctggsaatggctggaggtgggagagaacctgacttctctttccctctccctcctccaacattactggaactctatcctgttaggatcttctgagcttgtttccctgctgggtgggacagaggacaaaggagaagggagggtctagaagaggcagcccttctttgtcctctggggtaaatgagcttgacctagagtaaatggagagaccaaaagcctctgatttttaatttccataaaatgttagaagtatatatatacatatatatatttctttaaatttttgagtctttgatatgtctaaaaatccattcccyctgccctgaagcctgagtgagacacatgaagaaaactgtgtttcatttaaagatgttaattaaatgattgaaacttggctgtggctactgcttcttaatgtgggggggacagggcagtggtctgggcccacatttagaagggaaaatgttttgcctgctgcacacattggacccaagtatgggcctcttctgcctagtactgccaaagggactgttaaggtgtcttgtccatcttctaccccccaccccccattacagggtaaaggaaccccagactaggtgaggggccagcagctgcctcacacttgtgttctctcctgagatggtccagctcacatccagacacccttgttcagacattttatttgaatttatgacagtgatggggatttgactgagatgccttatggagaagtaccccaccctytatgaagacaraatcactctctgccattcattctgcctgatgctaacaacacgcagctgatttagggagtgtcccagcctagctggatcaagggaaattccaggagccctggggcaggccctggcccccagtgccaagcctcagagtaagcagacattgggaaagttgccaaccacttggtagaccactaggttctctgttttcccttccctttccttttcaaatcccacagtttcctgttggggagaagctgtaattagcctagtccaggtaccagatcccagctaggggcgcagctgcttggataactccaagaaaacctgggcaccagtatttttccaattataaggactgtggcataaattttyaaatgagttatattgaaaccagatttctccagctgccaagggaaraaggtagggctggactccctgctgtggcccagcccttgttaggggttggtctctcactgcagccagacaggatgatcctgggttctggggagggtaagctgccccttgccgagttctgcaccgaataaagagtccaaacccgctgcttccgtgtcctgagagatgggtaaatgggtgatggatggagcagactgaagagacagcagatgactcagtggtggaagaaggggggaagatgctgggctggctagctaatgttcccccctttcagcgatttacaggaaatggagcccagcttggtcatgaagttggtttgcttccactgtgcgatgcactcctcagaaattttgaagtcagcctggacaagacagataagagagattttaatgatggtggtgggactgcaagaaaacccccccttttttggagggggggcagagttttgctcttgttgcccaggctggagtgcaatggcgtgatcttggctcaccgcaacctctgcctcccaggttcaagcgattctcctgcctgagccttccgagtagctgggactacaggcatgcaccaccacgcccgactaattttgtacttttagtagacacggggtttctccatgttggtcaggctggtcttgaactcctgacctcaagtgatccgcctgcctcggcctcccaaagtgttgggattacaggcgtgagccactgcgcccagcctgaaaactctcttatataccagtagggtaaggtaagctggctcagcttttctaagaaatgtttgtcaaaagctttcacattcatcttttgactcaagtaagttcattttagggagttagtttaagaaaataaacctaagtgcaaaggcttatgcatgaagacatctgtcacatctgtcacatcattctaacagtgaaaaaccaaataacctcaatgtctaataagagtttagttagattgccgggcgtggtggctcacacctataatcccagcatttcgggaggccgaggtgggcggatcacgaggtcaggagattgagaccatcctggctaatacagtgaaaccccgtctctactaaaattacaaaaaattagccgggtgtggtggtggggcgcctgtagtcccagctactcagaaggctgaggcaggagaatcacttgaacctgagaggaggaggttgtggcgggccgagatcacgccaccacactccagcctgggtgacagagtgagactccgtctccaaaaaaaaagagcttagttagattttgataattatggtagaatactatacagtgcaacccctcaattttttttttttttgggatggagttttgctctcattgcccaggctggagtgcaatagcgtgatcttggctcactgcaacctccacctcccaggttcaagcaattctcctgcctaagcgtcttaagtagctgggattacaggcatacgccactgtgcctggctaattttgtatttttagtagagacggggtttctctatgttggtcaggctggtctcgaactcccgccctcaggtgatctgcctgccttggcctcccaaagtgctgggattacaggcgtgagagaaatcatggccaggaggcttggaacgatnnnnnnnnnnnnnnnnnnnnaaaccccatctctactaaaaatacaaaaattagctggatgtggtcgcaggcacctgtaatcccagctactcaggaggctgaggcaggagaattgcttgaacctgggaggcggaggttgcagtgagctgagattgtgccactgcactccagcttgggcgacagagcaagactccatcttggaaaaataaataaataaataaaataaaaatcatggtcaggtacagtagctcatgcctataattccagtgctttgcaaggctgaggcgggagaatcacttgagtccaggaggtttacaggcttgaggttacagggagctatgatggcaccactggaatccagcttgggtgacaagagtgagaccctgtttctaattaatcaacagcatttagtatgacttaaaccataaacgtattatcactccaagcatagcaaaagaccagaaggaaataatcactaataacattctttaatatctctatgtggcaggactaggatttttttttctcctatattttagatgttttctaccatgaaaatttattttatagccagaaaaaaagagattcacaaagtcagcctagaaaaccaggaaaggagggagtgggcaaagcaaatggcctcatgcaagaggatggagagtagaaatgactctcagtgtcctccagaagcactcctctatctcactgaagaaacacggtattaactagaaagagtcacccatgagtgttagttccatgaggagagtcaactcctgctgctttattcattgaggtagcccaagcacccagaatactgcctgacagctatattatggaatcggtatttgttaaatgaatgagtgaatgaattcagggatcactggggcaggccagattttcattgtccagaaggcaaggagacaatgagtgctctaaactcaagatgggcaggagggaccctgggaaggttttgatcctggcctcatcatttctttctttctttcattttttttttgagacagagtctcactctgtcgcttaggctggagtgcagtggcgtgatctcggctcactgcaagctccacctcccaggttcatgccattctcgtctcagcctcctgagtagctgggactacaggtgtctgccaccgcgcccggccgatttttttctatttttagtagagatggggttttactgtgttagccagaatgctctcgatctcctgacctcatgatcctcccgtcttggcctcccaaagtgctggaattacaggcgtgagccaccacgcccggccaatcctggcctcatcatttcttttcttttctttttttttttttttttttgagacggagtttcactcttgttgcccaggctggagtgcaatggcgtgatcttggctcattgcaacctctgcctcccgggttcaagtgattctcctgcctcagcctccggagtagctgggattacaggcgcccacgaccacgcctggctaattttttgtatttttagtagagacagggtttcaccatgttggccaggctggtcttgaactcctgacctcaggtgatccgcctgcctcggcctcccaaagtgctgtgattacaggcatgggacaccatgcctggccctgccctcatcatttctggtgaccctatgtggccttgtcaggtatcctgccaggtaaaatggggataatctcctattacagactgaagatcaaatgaagaaatgtctgaagtccctgacacagggcctcaaatgatctgtcggagatgtaatgcaaggtcctaagacccccatgctccttaggcaccttgaattcaaaaaggtctggaaagaaggagggagagaggggctcaaatgcaggaagtcccaacagagaggggcagctatggcttcagtaacaggacagtctggggacacagtccaggcagcccagccaagaaagggaacaattacagctttttacctgcaacttctcgaagactttcttcttgggcttgagctcctcatctggttggcccttttcatagcccttcacaaacacgtgctcaccaggagcagagcctgccggagggtccagaggttcaacctggcggtttatcccttctctgggaagacacaggacaagagaagagtgaggctatggatgggttccagtgactgtggaggccaaagcaatccgggcctttacacaggggccctgatgggatttagggcatcctcagtaccagagccccaggaggtcctcttatcttgctacatccctgcatatcaccagggttacattaacccaggctataccaaaattgtgtgtcaagataccaaaatctgtgtttctaggggaggaagtataaaataacgtagcgaggactttatagacatcaaaactgggatttgaatccctgctccactccttactagtagtaagacttgggtatgtactggtttgagccctccatttctattttaacaaaattaactgtaggtaaaatgcttcattaacagtacttgtacgataagtccttcatgcatcaacttttggcatcagcaaggaagaggcacgtgttctcagagcttccacctggtgtgtggaaggacatcatatgggctgattccctactcttcctggcctccccaggtcctgtgccccactccaagtcctcactcacatagaagcacacagaagcatgccttgggactcgactcctctcatcttctggggtttcaggttgcacagcaccactaccagcctgtcctgcagttcctccttgggcacgaactgtacsaggccgctcaccacagtccgtggttcagcttcccccacgtcaatcttctctacatacaggctgtctgcatctgggtgctgccagggagagacgtcaggaggaagaggatcatcgtccattagagaagcagcctggtgaactcttggattccggaaaggagcatccactccttacagaggcccctggaaagaccccctagagctaactttctttccacgtcccagacagcagacaggagaatgggctctgatggtatactctgctctcaactgaggccagatttgagtaaagtggacctagatgcttgtgttaagaggtggaaggatctctaagccatctgatgcaggagcaccagcattgatctcagggtggttttggtggttggggtacacagtgagaagcaaatccatgtcgaagggaaaaaaagcccagaacaatggtcccaggccactgggtgcataaccttctgtctctgggaaaaaggaagtcttccctccaccactttctgaagggggcaaagtggcccatccaagataaggcctgtagctagtccaggcaagccgatagggatcaggtgagtctatcagaccagatttaacagataaacaagttccctctgactaacatccgtcccccatgctgagttcctggctgtgtttggttgcataatatccacaggcaacaatcgcaacagaaagcctgatgcctggaattagacacctgcactctgacttgcaatatgacctcaggatgttacttcccatctccaggccacgtttcctccggatggaaacagacaaacctgaccccaatctgcctctctgagatgtggtgaaaaatgagtaccttctccacagtgatgattttccccacacggatatccagccgggatgggatgacctccwctggttctgaattcttggcagggcctttggccattggctctgggaatgagaagaaccccatgaggtagaattcttccctgtggcaggtcagctgctgatcccaccacgttaagacactgagattaggtaagatttagtgtagaatccccagagtctaaacactgagttgtaacttctttaatactgggttggcaacctttcagacatgacatacctgattttcatctgttctctccctcaattattagactagcggggagggagcagtagtagctttgcctcctttaggtatttccattcatgcattccacatagaatttactgagtcttggccaggtgtggtagctcacacctgtaattctagcactttgggaggctgagacgggaggattgcttaagcccaggacttcaagaccaggctgggcaacagagccagactctgtctcttttagaaaaaaaaaaaaaaaattttactgagttactgagtttttttctggaagggtcgcacaaagctatcaatgccaatatcttagcattacgcacaagtggatggccaactaagagccaggcccatgcacatagaaggaaactgggagaatctaaagataagcttctctaagctctgcaggctctgcccaacagctgtgtaagaaactatcgataccctatataccggttgggtataataggtctaatctaatttctatcatttttctttttttgagacatagagtctcactctgttgcccaggctggagtgcagtggtgcgatcatggctcactgcagtctcaacttccccatgctcaggtgatcctctcacctcagcctcccaagtagctgggactacaggcatgtgctactatgcctggctaattttttttttttttttttttgggtagagactgggtt

SEQ ID NO: 93419 - DNA, 51841 bp, Homo sapiens
tcccgccattagagcctctggcctgccctctggccctgtgggaatcagtgggtaccctattttctcacaatggccaagtcagaacccccaaggcttctcccccattcaccaggaggtccaggatcctgccctgggtgccaggagcacaggaaggggttgggtcaacatagggagctgagcagactcagcagatgtcaaggactctgacctctggaacggcacctatatataaaaagtgcctaatagatgtttgttgaatgaatgaagactttggatccaaatctggcttcttgtgactttactgtgtcaccttgggtgagtcactgcttctctcggtgctgtggtttacccagctggaaagtgaaggggctggattgatagtttcgggggcccttccagcttgaagttgggtgatcctggagagcaagtggaactgtccctgtagtacccgggggtgctgggaggggagaacggtctcagacagggggttacaagaactgggctctgctgatcctccctaccttcctccatggggttctaggtgagctcaggcacagcaggcagcgtgtgtgtgtgtatgtgtgttagggagaggtcccccggaccagaagagcccacagctggtgtcggcaacacaagtagacccagaacctaccctgattggtcccaaggcctgaggcaggcaatttccatgccttgatggtggcaagcctcactggggcccacattgcttaccctcaagggcatcaaatgacttccccagccagagttattccctccacccctctccttacccaccaacacaaaataaccaatgctgggggctcaaactcatggcccaagagctaggtctggtctaccgatgggttttgtttgacctcagtattctgtttctgagaaacactgacttaacgcatgagcccagcaggctctgtcccctctgcagcagttaccacccctccctattttctcccagctggtagcgtcacacatatctattatctgcctgccctcctgaaggtgcctgagtttggaaactctgatccagcttaacaacccattttgtaaatagggagactggggggttgtcgggggtgatcctagtgtttccggatgaacgaggtcaggctgcttgctctcgtggtccaataaggagatgcagacagactgagaaagaagggagtttatttctgtaaccggttacagggagaagatcggagtaactcaccagaccaactcgaaagtacaagtttttcccccagtgttgtctacattctaagctgtatgcctacgtgtgggagtatacgttgccagagagtaggtctgtttcattccatctttatctaatctttagggtctagggtctgggaagctttttctagagccttggaaagtttcttaatctttttttttgagacagagcctcactctgttgcccaggctagagtgcagtgacacaatctcagctgactgctacctctgcccctgggttccagcaattctcatgcctcagcctcctgagtagctgggactacaggtgcacaccaccacatctggctagttaatttttttttagtagagatggggtttcgccacgttgcccaggctggtctggaactcctagcttcaagtgatccacgcacctcagccttccaaagtgctgggattacaggcatgagcccctgtgcccagcagaaagtttcttaatcctaagtgggccctggtatgaggtgtatgtgtaagaatactttcattatttcatcagactttcgggtctgagaaaacccaggagcggtcttaacaggtttgttttcacattccagccctcatactcgggcaccattttcttcagttctctaatgtttaacttatgcattcatcagaatgagaggaaagggctctctctctctgtgtgagagagagagtggctgctccggctgttaatggaaacccagcttgccacactaggttcatggaatcttagaccatagacacctgttttcctgggctctgtatccatggagtaaacttagaacttgccttggtgcctttaggtgtgatgtactctgcagatcaataacatttgcaataggaaagattatttcaaaaagatcttcaaaatcaaaagtaaccaaataaatgtttatgtcattatcactaaggtctcatttccagctctctactccaatatcatttcttcagattggccttctctgatcacttgactcaaaacagcacmccatcccctcctctcttctattttatttgtctgaatcacttcctggtatcacagtttttatcccaccagctttctacctgcctgctctccacgatgtcccacgagggcaggggcttggtctatcttgttcactgtggtatccccagggccagaataatgtctggcacattttaggtgctcaaaaaaaattgttgaagaacagggaaaatgaagccctggccattgtagccccagcaccagccaccttccctatagtggtttcttgggttgttccaggggcttcctggggtcgtcttacagtcccctagtcaccgggcagctggcaggcctctaccctgcatggggccccgtttcaggctaagtggggccggcctcccagctttatgtcctccttcagaggggaaggaggcagtgatgtcacagaggtctcccaccctcgctcctccccagtctgaccgatcaaggctgaaatcccaagttcaaagagaccacagcatgggtgtgcaggatgtgttgtttgtgggttgtaggtagggcaggggcccaggcaggtcatggtgtcttaaaagaatgttctttgagctggaagactgaaaaagggaggcggggaaggaatagcagagggtggggagagaagccaaaaggaggaaatgcatcttatttttcctcgaagagagaataatgagggtggcttcatttttttttttccaacagtaaaaatgttgtttgctcatgaaagtgattcaaacaacacacaaaagcatggggaagaaatgacctgatattctgcctcccagggatctagtcagcaatcagcccaccagggtcagatggcctggggttgaatcctgatgggaccaacttccaaccatggacttgggagggtccccaacttctctgtgcctcagtttcttttgctgtaaaatagagatgtgcttatcctcctctcttcctctctgcctccctctgctcttccctccttgcccccctttctctttcctctttcctctatctcaaagaacattcttttttttttttttttttcaagacagagtcttgctctgttgcccaggctggagtgcagtggtgcaagcttggctcactgtaacctccacctcccaggttcaagcaattctcctgcctcagcctcccaagtagttggaattacaggtgcctgctaccacatcccgctaatttttgtattcttagtaaagacggggtttcaccgtgttggccaggctggtcttgaactcttgactcgagatccgcccgcctcggcctaccaaagtgttgggattacaggcatgagccactgtgcccagcccgaagaacattcttttaagacaccatgacctgcctgggccctggccctgcccacaactggccaagggcacatcctacacatccatgtggtctgtttgaacttggcattccaggcttgwttgatacctgccacccagtattattgtgaggattaggtaaatgaatacatggagaggtcttaaaacagtggcacatggtgagggccatatatgtgtttgcatcaccattattgttgtcatcatcaccatcatcaccatcatcatcatcatcatctttttagacagctctttatgcaccagcctgcctttcttcctgcctccctttttcctatcgttcacctatccatctgtctgtccatccatccatccacccacacatccatccatccatccacccacacatccatccatccatccatccatccatttaatcttctctaatgggaacacacccatgtgctctgcaggaaactgcttgttccactctgcattccattccataagaaatggacacgtttatgtcaataaatgctgttaaacaaaatgactgaggtcctggtaaattgaggtttggggtttgggtgatggaaaaccatccctgaacacctgtttccctgggttctgtatccatggggtaaaattagactttgtcttggtgacttcaggtgtaatgaactttgcagatcaataacatttgcaataagaaagatggtttcaaaaatatcttcaaaatcaaaagtaaccaaataaatgtttatgccattttactatttcctgcctccctaatcaggctggggttcctgcagccagggactgtgtgtcccccacatcttccatcagactgacaactcctcaggcaaggctgtttctctctctctctctctctctctttcttgctctttgctgccctgccaccccagccctgtggacactagagttctggtttatgtgccccttttcccactctgtataagagccccctggaagaagaggaccacattactgaggatgggtgtcctgcgattccagagcaaacggctcttctcatcacccccaatgcccgatatgaagggaacacgtcacctgcaattcaccacctctaccccaagctctaacagacatctcatgtcgaacaagtccaacagagaatggccaagctccctgcccagcttgccctcctgcagccttccctatctctctgatgacaactccatccttctagttgctcgggtcccaaatactccagtgatcgttgaccactctctctcacacccacatccaactcatcagcaaacctcatcggctctaccttcaagatacattcaggatccaaccacttcccaccaccttccctgttaccctgggaccaagccatgccatccctcgcttagataatgggaagaaccttaatgcaccatctgatgtcatacacactttactcatttaacttcacctacggtctgtctcccccagaatataaatgtcgtcagagcaggaatcatggtctcttttgttcatagttgtatccctatcacctaaatgagtgcctgacacataaaagatgattaacaaacacttgtcaaattaacaaatgaagttctacaaagagcctcagaacaggctgaagcttgctgtgctgagctgaaagaagagggattttcagaaatgagtccacgctcccaggtcattgctctgagctctttttcaagttccctcctctctggctccccaagaatgcttgcctggggtggcttctgctgtctgtggagtctgggcacaagggcctaccctcacctgttggggggtggtattgtgtggcgagacgggtgaacctgcgtggaagttataactctaccacttactagcagtgagacctgcagccatggttctcttacctgcaaaatgaggataaaagtcataattgttagtgttttagtgaacacaggtgccaggagctgtgctaatcttcttacacataactcatgtctttcccacatcaacacaatgggacaggtactactgttacagctgccaacttacacatgaggcagctgagtcacagagaggttaaaaggtttgataaggatcacaggtggttataggcagagcccgcacatagtcagcccacagaaacactgacatcattgtaataggggttcaggcaccaggagtctttggaggggagggcagaggctgctggggagctctggagggtctcctgtcagcaggtgagtcctgcttcgcccggggcccccagttgaagctccccttccccatctcccagacaggccttgggcacctcctcccctgacctcctggattgacagccctgagtgaggagggtgtggagccaggaggtggggaccaggctcagccaggctaatcaggtcrcagggtgaaatttaaagggaggaggaggcaccagtycatcagaactcacacttcttcctggcaaagaagtgyccaggaygggagctggggagccagggctgatctaggaggctgggagccaggtgacaggatggccccaaagagagttgtgcagctgtccctgaagatgcctacccatscygtgtgtgtggtgggagtcraggcacatgtggacattcacaggtaagagctgggaggcgctctcctggctgcagagagctgggttagagtgtaagtcaatggggtgggtgcctggtagacaagtcaggcacgttggaaaggatgctggcaggagatagcagagaaggtggagttggctgtggagtctggaaggaaggaactagggtctagtcaggtcctccttggggccccagctcctgggcactgggctcaggacattggcttcaatcccctgggtaagagtccagccttagatttctaactctgagccctggggtcaggctttggggtctgggccctgcattctgacacctaggtagaacttgtgtggaacatcagatggctcaagatggggaagagaactggttcccacctccctcaatttcttgccaagcccccatctctttgaggtgaagggacgtgtgtggtagcttgacccttggaggtcagccagagataactagattgattccaatcaggagggagtggttaggaaatactcgatgaattaatatgaagagagaacctggagcaagacggctgggacttatgtttgctgtgagatgatggtgatgacgctgattatggtgatgaacagtgatgatggcratgatggcggtgatggtggcaatgatgacatctgagggggcatcagtagcatttgcttctcctgttgacccaaatctttcctgtgctggctgtgtccagatggggactcggggactcagccttagtttccctacctggccactaagggaattggatttggtgatctctggtggcatttccaactctgagaggctgtctatggattccatccctgctggagcaggtggggctgaaccccttgcagatagggggctcgtggtgggagtctccctcaaagaggagctgggtgctgggggtctgttactgggtgagatctgagctcctttctccctcttgggactcagcccctgtacctgctggtctggttaatgtatgtggggcccagggccagctgcccacctggcctctggtgatcctctgctygagaagcccttcctgcttctctgttgggcagtggtctgtgaccccrgtggcagggctggggaggaaaaccaggagccatggaaaccaaaccttgactctaagttgctgctgggagccccgctgtgggggctggttctctcgggtytaggtggccagcagagaccccattgtctcytgccctgttaacataggcttgccagatttagcaaataaaaatacaggatgcctggttaagtttgaatttcagataaaaaacaaaaagcttttttagtatattgcatgggagatatttctactaaaataatctgctgtttagctgaagctgaagtcttttttttctttttctttttttttttttttttttttgagatggagtctcgctctgtcacccaggctggagtgcagtggcgagatctttgctcactgcaacctccacctcccgggttcaattctctgccgcagcctccagagtagctgggataacaggaacccaccatcacactcggctaattttgtatttttagtagagacaaggttttgccatgttggtcaggctggtctcaaactcctgacctcaagtgatcaacccacctcggcctcccaaagtgctgggattataggcgtgagccaccgtacctggccactaaagctgaaatctaactaggcatcccacattgtatctgggaatctactttcacaccaagagtaggaaaagggtcccttgcaggcccccttcttcttatttcaggcttctgctctcatctgagggcatggctgtttctagaaggtgatttcagaacctctggctctacactgtgctgctaaggccagaaacatttcacggggagccgggagacctggtcttagctctgccactgacttcctgctggatgtgggccaagtcacttgtcctctctgggtttcatttcctcatctgagcccccatgagatgagctgagtccactctgcagttcactgtggaggtgaagtacccagaccctggagttgaacacactccattctcaggctggctccaggcgtggctggagctgcacttccgagcctcagtttccacatctgaaaatgaagaaacaatataacaccagttataatgggttcaggggaagataaatgagcccatgcatgtataagaccccttgcgccgtgggtgccctggcagtgcgcacagctctggtagctctgtgagtccccttttctccagcatctgtcctttccctcacacctgagaggatgggaggagacgaggacagctcagactgcaagtgctgggagcatagggtgtctgtaaagctccttagcgtcctcaaatgcaggccctggcccagcggaggggcaacgggaagttgcctgggctattcatagctgttgtgctctggttggctctgggaggcagaggttgctctgggatcctgagtgagcacacagggcacctccatccaagagcccttcaggaacyttcacctgggtgttggtggtgactatggtcatagctactgagagcctccaaactaggacacagaagttgattctgcagcataaggaagagcttcctgctggccaggtctgcgatgggcagggaaagaggggcatggaattgtcaacctgggaaggtttttaagaggagcctgaagctcactccagcagctgggctggcagcaggaggaaggggttacacttgatgacaagtgatgaacttggggcctccccaaccccttcacccagtgtctgactctagctaaggccaagtaaggggtttctagttggccttactggtgggaggggggaagcccccagaagaggaggtgttgccagtcacctgagctgctgggagtctgagccctccaggagatgggtgtgtagggatgacatcacaggaagtgattcattcccccaggggctgtgtgaactggttatttggagaaacacttgtgtttggggtaattgtgtgccccagggtgtcccagcctaggaaacccttaggaatcctcgactcagcatgtgctgcaggtcccatccccacaccccagtaggctagcccaccaccctgtccacccccgactccagtgggctagctcaccaccctgtccaccacccaccccagtgggctagcccaccaccctgtccacccctgactccagagggctagctaaccaccctttccaccccccaccccagtaggctagcccaccaccctgtccacccccgactccagtgggctagctcaccaccctgtccaccacccaccccagtgggctagcccaccaccctgtccacccccgactccagwgggctagctcaccaccctgtccaccccccacaccagagggctagctcaccatcctgatgacccacactccagtgggctagctcaccacactgacccccacaccccagtgggctagctcaccaccctgattccctggatctggccagactgccctggctatccttgtccttgcctaaggagttcaggtggctcatgccaataaagacaggggtgggaagtgtgaggaatccatctgcggtcctgtgtggccctccttgactgcccagaggccagaaccagagcctgaggctggagaccataaagaacctttattctttgggatgcagaaggccggccttgtaggagacagggacattctcctgcactttcccccaagccttccccaccactgcaaaagcagcaatgcaagactgagtcaggatcagacagcggtagaattggaggggcatagggagaagggactctgcaggcctctcagatgcattttctggaattctctgtatttcagaaaatgaaaatgccaaaacagagttcgaaaacttgtggtatgtgtaatgtgtacatcgagtaaattaatgcttttaactcgcacagaagaacaatgaggcataattgtgctcctcaggggaaaattacaggattgacactgacactaatttccagcgaccgacaggctgccggcccctggctggacacattctctgctccgtcctgtcactgtgtcactgcagcaggaagaacactattcaccagaagagacattaaaagttcaagtttcagggtccctggagaatatgaagctggggtcctccgcaagttccacagggccctgacaggcccgggggttgtaaaaactggactcagaatggaagagggtagcattcttgaaacataaaatattgacatcacgaagggcctcagaggtcagccaccccttaattctgtggaactccctgctcccctgggtcctagctgccacttgccattttgggactggctgggaatctctccccctccctctggccccccaggccctcygctttccgcctccttaccccttcctggcatttcctggatcctagtcttggaatgtctcctcactctgagccttcttctcttcccttctcagctcccatcccttttacttccagctggtctttgcaggctgtgtgaccttgggccagtcacttagcatctctgagcctgttttcttcggagtgacatcccttattgtttgtacctgcgaagctggcacctttattttttccattttattttatttttatttttatttttgagatggagtctcactctgttgcccaggctggagtgcagtgacatgatctcggctcactacaacctccatctcccaggttcaagtgattctcctgcactcctctgccccccaagtagctgggattacagttatgcaccaccccgtatttttaatggagacaaggttttgccgtgttttccaggctggtctcgaactcctgacctcaggtgatctgcccacctcggcctcccaaagtgttgggattacaggtgtgagccatctcaccctgcctaagtttttattttattttattttattttattttttgagacaaggtctcgttctgtcacccaggctagggtgcagtggtgtgaccatggctcagtgcaacctcaaactcttgggctcaagtgatcctctgccttagccccccaagtagctaggattacaggcctgagccaccgcgcccggccaatttttttccattttaccttgaggaattccacaatccacagaatgcggacatgctttggggagaggatcggtgactcaygacttggactctaaattcagggccctatctctcagggacattctggtccccagccyctgtttatctcttctgggaagaccagtgagtgaaagctgtccctcttctccagcctccattcctggctgggcagagctccacttgggagaaagctggttcagcctgcgccctcagcctgggctctctgggcgtgcccctccccaagcaatgacagggcataaggcacccactagtgtgatttctgtgaatgagggagaagacaggacacagccacatcatgtgtgattctagactcctgagaaaatgcctgagcctgctgaggggtctgggacatcagccattgccctccctcaacctccagcarccccagccagccccggggagaggatgcaggggaaagctaaagccagggttgcagccaggggactgggggttggagctgccccctcctactgtctggtgcccacacctcccatctcaaggaacctcctgtggtcttttccccagggccgtctgctcccgggcacctgctctgtgctgggttctggcactcggtgatgatacggcccatggccacatgtgaggagcttccatcctagttggagagttaaacaaatttcaggatgtgggtttcaacaattgcacacctgacccattttcttggtcagggaggagagtgaagggaggtgccagggtcctattaacgacagggccctgtgtcctcttttgyccgggtctgcccactcctccatgcctttcagatgccctctgtgactgtaatgatcatgatggcagccctggtwttttgtttttgtttttgtttttgtttttttttgagacggagtcttgctctgtcacccaggctggagtgcagtggcacgatcttggctcactgcaacctccgcctcccaggttgaagcaattcctctccctccaccatgcccagctagttttttgtatttttaatagagatggggttttactatgtaggccaggctggtcttgaactcctgacctcagcctcccaaagtgctcggattacaggcatgagccaccatgcccagccggcagccctgttttaagtgctcactgcaccatctcagttaaacctcacaacaagcctgtgagatggggactactataatccccatttgcagacacgcggagacacagagaggttaagagacttttctgaagtcacacagcccacaaatgccagagctgggatttggacccaggtccacctggttctaaattctgtgagcctaaccctgtgactgcccaggctctgagactcttctatgttgctgggtaagtgaggggtgaagtgaaggcagggcagcagatgagctttggaatcagacccaggcaggggccaagcacggctgtgccccatcaccctctgtgtgacctctctgtatttcagctcattttctgtaaaatggggagaagaataatcactcccctattagcaggcaggggccatggggatggaatcagagaatggagtaaaaaccctccgtagactctgtggaccccacaagggcaaagccaaggatgatttgtctctgctttcctggtgcccagcatgggacctgatgtacagtagctacccaggaaggtacgttgaggcagagccactggcagcactaatgggagccctgtgtgccccagggaagctgctggcctttagctggagctcacggggtggcggccagtaccccgggactatcagcctccaggcagatccctggctccaggcagaatcacccacggagctggtcaccccaggagatttgctgggccctgctgcctgaccctacggcatttcttgtggcttcattccaggacacctagcggctggcacctgtggggctcctggcaggccagatcctggccaggcgtgcaggggagccacaggctcagccagcagtgcctgctcttcagccttttcrtccgattctgcctgattctccccctcctgcccccaccactcatccagcacagtgccccagacgacccccaagagcacattggcccccacccccacccactcagtttctgyccccaggatctggccatgtccaaastgcaggataggacagttggcagggaagcattcctctgtgactgctgtatttctcttctccctagagaccaggtggtacatttctgagctgttgacmtaagatttggccggtggagccscagtgggccgaggcttctgggaagcaagttgcagccacgcaaaaggaaaagctttctaattacctgaactgtcaaagcagagaggggtgtgaggtagtgagctgtcagtctttgggagtgggcagggggctggccgggatgacctccaaggcccgtctctgacccaaggcctatgctatgcaagatgctccctggtctcttctgtcattttagggcagacaaggacaagaagatcacaggcaccacccccctcgccttgccgctgtaagatgtgggtgtgtggtggggccagggggctgtggctttcctgccttggtgccgccaccctccctaggcctccctggcctgctgccaaagagccatgcagaggagctcgaattgcacactctctcaacacattcctgtttccttccgacatccctgatcgtctcctccttccagtccccgacaagggcatgctcagggcacacacgcactcattttaataccagccaggacagcttctcactttgctatctgggtgacctgagtaaagttacttaacttctccgagatttcttcatctgtgaagtggggacgtaattcggagtcctcattagggaaaaggagccaggctggtaggagcagggaaaagtaaaaaaagaaaagaaagctgatcagctccaagcctgcctttcttcatggtccaggacgcattgccctcctatgcaagtaactcacaatcttcctgcacccagctttcaccagacccctgcaactgagctccccgcggcctgggcataatcagtactgcacaaagccctcttcaacagacagataaacatcgtcctataaaatccccagcaagtctttgtttctttgcagtcggcttcaccccagagagaggcttctttcttgaaggctgacttttgtgtctctggcgatgtattttcctactttctgtaatcaatctgctttcctttacacacagctgtcctggtaaattcttttactcctgcattaccggccgtcattaccctgtgacaagtaacacctaccttggtcggggagcaggagttggagtgaagtctagatgagatcatggatagcaaaagctaagcacgtgcctggcacacggcaggtgcttgaaaatgcaggctctttccctgccccactagaacccatggaacatgctgccttatgccataaccagtgggtgaacctgcaccttaccacaggaggcgggcaggggtggagagtagttggttttacactcctcatcccgccctcygcgtctccttttgtgagattctctaagaattcaccccattctgcccataacctctctattgaacctgatgcaactggccctgctgtgggcatgaggttggtgggcattgcagggtgagtaggaggaygctgctctgggcggcgcagacgagatgtgaagtggcccccaggaaggtctgaaccagggccatgggggcacagaggaagcacataaggtttctggctggagtgagttgggctgtctggggattctgagaagagtaattgtaaccatggtgacagcatctaacgctgagaagtcatcatctcagggaatccctccaacagtctaggaagtagctcttgggattrtgtccattttacagcggaggaaaatcgaggcagttgagtgacccagttggaggccatgctccacacagaacccacacttcactccatggaagaggtggcatttgaagtgggtcttgaagaatgcaaaagacccccctgccccccgccccatgacttggcccagcagagatgggggagcagcctggtgaggggcaggctcatcagcataacagtggaaaccatgatgatataacagtgattaccaagacacctgacagggtgactcctgtagtggtaatgatttggccttttttatttggaggggtgctttcaaatctgtgacctcacctgactgtgcatttggggacatgccagtactgcatatctgggggttggttaggtctgggggctacatcatgagacatcaccaaagagaagcatcttggagaggattattagatttggaggaagccgggagcagctccagaaagctggcgcaatacagcccactgcagggtggcctggggctccccacaagctcccactcctgcctgtcacacctcccaagggcagcccttcatccatgaccaggcccacagatctgggcacctgagagataaggaaaggcagtataagccccgtctcccagccccggggcaagggttggggtaggatgccaagggaatgagaatcaaaggcagcgcagggctcacccggcataacctgccttgcttgggtgccagagagaataagcagacccctcctcctgcctcttcctggtggttttcaaagctcctgctggggtacctgccgctcttctgtagctgaagctgacctggatrggggtgatgggaaccaagtcttgaaggcagtggggctgggaactagaataggcccctccccatgcctgtgggagtggccctgggcctcagacctgcatagcaggtgtctcctgcaggaagccacatttcccccaaggcctgacccctctaggcactgcccactcatctgttactcacaggggagggagacactgagaccaggagcccagcamcccagagagaggtgaacagaggtgtgagctattgagcaagtttggggtggggagggagcagatctagactacaggaagctaggctgggcttggagggtcttgatagccccagagaaattgtacctgtcatttcttcccccttctttcatcatcatcatcatcrtcatcatcatcatcatcatcattttctaccaagactccaaatagggggctgtgacttrgagatgtcaacttttgcccaaagctagggattggctccacagagtcctgcttcccttgaaagggctgtgtctggcaccggtggtccctgagtggggtggagcaggagtcacccatgagctagaaacccttctgctgccagctgggtgccctgggcttgtggctacttgctcttggaactcatgggccaggccgactggattcaatcatgactcagccacctccccgctgggcagtcctgagaaagccactccaccatcctgagtcgctgtgtccttgtccagaacgcgttgattgtgcccctggttcatgccaggcactaagctggatgcagagatgacagcagcgatgcagacagcataaaacagaaaaaaaatctctgcattttagagggagagactgcaatgagcagatatgtgctctgtcaggtggctgggaggtggccggtgccatgggctggaatgaagctggggttggggaaccagactcatggtgtcattygtgtcacgccatttgcaacaggcaagaagggtacatcagaaaggcctcgtatgctaccctgagagaaggaagtgaggggctgggcggaccgcagggattggtgacaggaacattccggacagacagagctgcagccctggcatgcttgaagaacggcaggaacaagcaagagggcgtggggagggaaagcaatgggtcaggaaagcctgggaggccacacaggctctggtgacagcctctgagcaggagggatgcaacgggacttctattttaaaaggtccctctggctgstatgttgaagctggactgtggggagagaggggaagcaggtcactggcctatgataaaaatccacatggaagcaactggtggcttggacaggatgtgagctgtggcagaggtgagagcggtcagggtctgcagttgctatgaaggtggagctgatgggatttgctgaggggctggctgtgcgagtgagggaacaagaggaggtgaggctgaattggaaggtggagctgctatggacagacttgcggtgggttgggcaggagcaggtttgaaaggagtggggaaggagtgggcatggggaagcaggagtttggctttggatgtgtgaaatttaaaatgcytggtagggctgggcgcagtggctcacgcctgtaatcccagcactgtgggaggccgaggttggcagatcacttgaggtcgggagttcaagaccagcctggccaacatggcgaaaccccatctctactaaaaatacaaaaattagctggcgtggtggtgagctcctgtaatcccagctacttgggaggctgaggcaggagaatcgcttgaacccaggaggcagaggttgcagtgagctgagatcatgcctttgcactccagcctgggtgacagagcacgackttgtctcaaaaaataaaaaataaataaaataaaatgcctggtagacacccagggagaaactcagaaagcaagaagtctgagagttctaaccatattgatgtggcaggtggagaaaaccaagggagtgggtgtagacagaagaaaggaggagaggagaggggagggaggggaggagaggaggagaggggaggctgagccctaagccaggtgcgctggggccagccgcactctgaagagtaccagtgtagggattctgcccgttgccgatggtgcctattccaattacacatttcagaacttgttggggtggggcggaaccacacatgggctcaggggctactggacccactgtaagatgaasctgagctgaaactccatggatcacctggcctccatgagcccctgctctgccaggtgggccgcagtgttgtttagggtctcctagaccagttcagggccggtgtgcaggagaactagaaatgtacgattatttccttttccccagtgacagtcaccctggtaaaaagttgtgtgtcctctcggggaaggctgggagaaagttgaacagtgtgtttgtggcaatgtaccagggtccttcctcaaggagatctgattgtttaatttttaagaaggttatgaaccccttgttaaacacagccactatttaaaattaaatatacacacaattaagcaaattatattaaaaacaaaggcagtartactgaaaactcatcactgcttaattattttactgcattttaccattgtccagatatagtggaaatagtgatgtcacgaggtgctattatgcagctctttgaaactctgagtccaatgatgttgggctggtaacttgaaactggctagagtgggagtgtttacaccacagacattggtcaaggctacaaatcagggcttcattcatcgttttatcaaatgcctagagttcagaaagtgakggagacaggttaacaatgtcaactcaatttaaaagtgtattgcgtctatagccatgacattgtggttagtaccaaaaattgatgaaatgttcctccaggattatctgattcagcaaagaggttgctcatatcctagatgaatgaatgaagggtgacatgcatcttcattgtttcccctttcatcttattcgtgaatgccaacaaaaatatcaaccaacgtttacgtcacatatcagatttagtgacaataaacttatggaggaaagaatgagcagattgggatgcaattgcattggtcaaatcatggtcaaattgcaaccacaggttggctacagttgcaagagagggcatctggaggaatcaatgtactatatagaatttacaacacattttacaataaagaattatatgtattatactattatttttacattatgtgctacacactatttacatcagtaaaatttataataaatttatatatacatatatatgcataagaacccccccactccagagagctggttgttaaacatttgccagcacaccactgcctggagttasggggtaagggggagtgacacagcaaaggcattagaggaaaggccacggagtcagaggagagcaagcagagcccgtgtcccagctgccaagtgggaaagtgtttcaaagacaggtgatcatctgggccaagtgcctctgacaggtcaatgaggggaagaagagaaaagacccactgggtttggcaacagtggagtttccttggtgtggtgggaggaaaggctgattagaggcaggttgcagacgcaaagagaagaaataattggaggtgtcaagggagcagaagaaatgaggaggtcaaaggagaatgagtttggggatgggtgatattcacgtctgtgtgctgggtgcaagggaggggagaaggggcaaggccagygatgcccttgagtaggggatgtgccccaggagggctggtcttgggcaagagcccagacagcacacccctcttcccaggagggcaggcayggtcgtggactcaaaggcaggagggctgggagatgaggtggtgggaggagggaggttgaaggctctgagtgacaagggggaagagtggggaggcttctggagataggagaagataggacatagtcctctaggacactgaaagagaaaagagcctggagcaatgctgtaggagcacragcatgtcacgcatccattgaggtcagcagtcatgagtccaagtgaaccatggtcagccgcgtggtgcaggtgcagagggggtggagagttggatctgattgtatagctggagctctgccaggcagctcaagggagggaaggatgagcaaaagattagggagtggagcaagggggtggccgcagcgggggactatgggatctatgggactatcctggggaagggaagagggaacatgagggatgagggacagcagtggggggcgagtagagaggamtcagccttcaaaggtcaagcgtcccagtgggctgaaggtttggttgcactggtgtgttaggagtgagctggaatattgggaagcggtgtccgagtgggttgctaacaggggagcttgtagtgggtgcagttttttgataataacattctatagcacctgccccgcgaaggaggggatgaggccaggtggaggacaggagcattggatgagaggtcaagggactgagggaccagggtgcagcacaccatctacatcgccattgaagtataaactggtgacggcagccggctgaggaacatggcaggagctggcaccctcgagatgaggacagagcgatggtgtgcaaaggtgtccctgtagatgggtggtgtagtctggaaatgtcaatgcaaagctgggggtttacggagtgaagaaagatgatgatctggaagggacattgaggagcatgaaggacccttgcccacctccaggcccaggggctggagggagtaagggggaagcagtcaccagggagatggctgaaggggaggccatgcctgctattgggggcaggcttcttttacagtacaagatcaaggaaactgtccagggtgggactgaggatatcgtgcagatgatggtggctgggattgaaagggagttggggaggatgaggaagggggtcagatgagaggatgatagtccaggagacttggggtttccatggcaactgatgtaaacgatgaggaagagcaggtaaggtgcgaggacccccaaaagtgcygtggaatgtggtgattgtaaggccaggagtgggggatgggggaggtgggtcttgccagcagcctgcaggggctctggggcccctgcacactcctgcctcttctgtaaaatggggattataatctttgctttggggggttgtgatgagcattagggagcgccaagtaggactcgtgattgttggaattaggactgttgtcaccgcagtcaatggagayagttttttgatggggccaagtgatcatggcagaggttgtggagggggtctggtttctccagagggctgaatatttgggtggttttttaggggtccaggaaaggatgaaggcgggagaatatgcagaaggaccccttttgcagagtggcagaaagtgagaatccaaccatttattaacaagtgtttattgagcacctactatgggccagacactgttacaggtgttggggatgcagctgtgagcaaaacagacaaaattcctccagcagcatctttgtagtcaggtggatgtctgtaagtggacttgaccttgggtggtgtcctggtggctgatggctctgccgtgggggatgatgttggagagccctgacttacaaaggaagaacaagcaccaatgtgtagttctctcattcaacctcctctccagagtgtgagcgccacaggctcaagagcctcctggaactctggggattagtgcagtgcctggcacagagaggccatagttcacgcttatgcaggggatgaagaagaatgagatgccacccacagaggccctgttggttttgctctgsgtgccctgtagcctgagtttgcagtgcatccccctctgatgctgtgggccaggaaggctggccccaaccagctgtggctgggagcagctggtggtgtgaggggtagggtgggggcccggcagatgagtgccccaggctggggccaaggcagatgggaggcttctcaacacccatttcttgatcccagagctctgatgtatcaggtgaatgcggtgtattgggtgatggaaagaagttgcacggggtgctggcattagtcaagttctagatctccactcaagtgcagatgggcttgaatccccctgcagagtggcagaaagtgagaatgcatccattcattcacacgtgtttattgggcacctacacctaccatgtgccagacactgttataggtgctggggatgcagctgtgaacaaaacagataaaattcctgcccttgtggagctgaccttctagcaagagagatggacagttgactggcattgaggtgggagaatcgcttgaacctgggaggcggaggttgcagtgagcagagactgcaccactgcactccaacctgggtgagagagtgagactctgtctcaagaaaaaaaaaaaaaaagaatcagagcaggggaagggagatgggggatcagtcggggggaaaggtgggcaaggtgcagcattaaatggagtgattgggtgggggcaggagcttgctgagaaggtgacatttaggcagagccytgaagagggtgagggaaggagacttgtggacatcttggggaggagcagtccatgcagcaggagcgggcagtgccaggacagccttgscatcttcatggcacaacaggaaggccagcgtggctggagctaagtgagcgagggaaagcgtagtagggaggaggcagtcagcaaggtggcaggggcgcatcagaagggcctcttatgctactcaagaggattctgccttttactgagtttgatggaaaccactgctttccagcaaaggaacaacacgctctgctgtgtgcaaaacagactggaggggcctgggtgggaccacggacccatgagaaagctgctcggtgatccaggcgaggggtgatggtggcttgggccgcagtgatgtcagtggaggtggtgagaggtggtgggttagtggatytctgttgagctggagagtttggaagtgtcagatctggaaaggacttgggtgtgggctgggggtgtccaagggtttaccatctatgccctggcttccagatgctcctggccagtggcactgccctgtgcctccccagcctgactgttgaggggtgccatttgaacggcctggcagccccaagcccccaccccactgtggccactcccctgaagagagatgggaagactggttctcttcccatctctcttctctgccagtgatgtgcccaagggtgccaacagcttcagggtctctggaagctccggggtggaggtcttcatggtctacaaccgcacacgtgtgaaagagcccataggcaaggcccgttggccgctagacactgatgcagacatggtcgtatctgtgggcacagccagtaaggaattaaaggacttcaaggtaagaggccactttctcatagaaaagggttggatctctccacccccatccaaggtaagagccccacattggcaattcccattccaaagctccccacttaaccaaacctcacaaagcttatcacagtacatacacaaaacgtatcctgatacaatgccactgacgcccaaaacacgcaaacctccaccaccactccagtatcacacatgtacacgtgagtactcccacaaaacacaagctctcctagtcaccccctcagattcacagacaacttcacattaatccctgtattcagcccacacacggacccagcaagatgccccagtgctctcgtgtgggcaggaccgcacaacaacaacccgtgcaggtgcacacacacacgtccacatctttgtgtgcacggatctcccacacctaagccaaccttctctctcatcgcctgcccgaagctcagacgagtccctcctcactcgccccagcccccagcacccaaatcctagacatggccctttctccccgacagggaaaaggcagggataaagcagctgttgagggaggggctcaggagcccactgtgggctcagaccccacctcctctgcttgctagctgagggactgctggactgcaggcagggtccggacagtctcctgtcgactggggccatcccaggggctcactgggatgacccggctggagggcttggcacggattctggaccacgctaaaagctccaggaccactgactggggtgatggagtgggggttctcattcccatcttattgaggaactacccgaggcttagaggagctgagagacttgcctaagtcgatggagccggctgctcctccctcawctgccagctgctcctgctgggagctgccccacctttcccatccctccacctttcccccaccctccttgctcctcacacctgctctgggaaccaaggtgggctccacagccacttgctggagaaggtagctctgaatcccagccgggagcccttgagtcttgggacttcagagactgggggggtctccaggcctcctgtgcctctaagtagggctgtcaggatgtgtccctcatcacctctgcctccgccatctctgaaggtgatggccgtgcaggcttagggctatgttctgcaggtgagrgtctcctactttggggagcaggaagaccaagctctgggccgcagcgtgctttacctcactggcgtcggtaagtagcagctccctggctgcccatctatcccttygcccctccaggttgactgtttgagggtcttagtggattccttggagtggaagacccatggccagcttcctccatcacygaggggcttgrattcctcgggaccttctgtccactctggaaccacagggattgagacccagcagtccttaggaccacaaggatctagaaacttcactgcccagtgaacaacggctagacccacaataagcctccttcatccagagtcccacgtataccctcattagacctccaagacccagcacggaacgtgcccccttcagccagggccagggtcaatgtaacggcagaacccagcccctgcaacctcaggccatgtccccagttctcagagtttggggtcaccagcatatgatttrgaaccccaaagccaccaagagctagcaggtggacatgcacaggcaagcaagtgattcaagagccaaaggcttgggtccctccaactcccagaaccacagggcaagccacagaggtctcccaagtgtggggtctgacccccagacagggcttccagtcctcacgggcttggggaggggtcagagtttgcccaacctggactttaggggtgtgaagatggggctggatgagcccctggcagcccctctccatctctttgcagatatttcccttgaggttgacacaggccgcacaggcaaggtgaagaggagccaaggggacaaggtgagacccttccgggcaccccaaggctgcggggttgaaaggcaaacttggggtggtcccgggtggattgtgccctccctccagaagaatgatggatccccagggtctgtwgtatccaaccatgtagggaacccatctgggacagcaaaattggcatgagtggacattaacctacaccctgtaaccgacatgctgtgtgactgctggaaaacagcttaccctctctgggtctctcttgtgccactttgaaattgggattggttcttttgttgctgccttttttattttgagggctatatttggacccctacacatgtgggagtgcttcctaaaagattgttgagtgacagaaggcaaggagaagacaagccttggggtagaggaggctatggtggtcagccccaggtaacacctgaagagtaaggaggaggacagagtgggctcaaggcgtcaccccacaggaastatctggaagctgtcctgggaggggtagaaggtacaatttaaagggaaagactccagagaggcagcctggatcacaaagctttgaggacaaggtgggcagggctgccatggatggctgcgtgggttgttcactgcacaagactgcttgggcatggtggcaactatgatacaaatcatgtctagggccctgctgcagagtggcatctacccagagggtgggcaagagtgccataaaggctaacagtggccctgtgcaatcccaagaacctgggtttaaaggccagctatgcggcttgggactcacctctcagaacctccccgcacccttctgtgaaatggggaaagtaagccctgccttgtgggtctggtggggaggtgtgttggggacagcagcaaccacagaggcagggagagctccagccatgtttcccgacttggctcagacctcagcttgcagagcctgcaggactgcatgcggatgccagagatatctatgggacaggttccaggagagtgctgggatgggaagggtctcccaaagattctccagatcccgaccctcatcaaggtcatggcaggcagcctctgcccacccccgccccacaggcagagctaaagcttagccagcttttgagggccatttcttggtgtggtaatgacacctttgcttctccagtgtgatggctgggtagagccattgtgtatggttgtgcaggttgctcactgcacaaggatgaggtgggtctagagccttatctggaactccattccccaaataatcctttttaaaatctttaagcaaactaaaaatatgaaaatctataatctaataaagcagcccgccctggccatgtctagaaccccttcctggagcctcctgggtcccactgatcccaaggcatcttattttgccacagaaaacctggcgctggggccctgagggctatggggctatcttgctggtgaactgtgaccgggacaatcacaggtccgcagagcctgacctcacccacagctggctgatgtcgctggctggtgagtgacacaaggtgttgtctggggagtggggaagggggatggaagtggatcctgttggtggggtggagaaagggcgatctcaagagggccactctctccagacctgcaggacatgtccccaatgctgctgagctgcaatggccccgacaagctcttcgacagccacaagcttgtcttgaacgtgcccttttctgattccaaaagagtgagggtcttctgtgccaggggtgagtggcctgatggggccttttcctcccagctccatccatatctatcctctcctcccccatctctctctctttttttccatcacctttttgtaactctcattacagcttacaaacaaccactccatcagtaccaaatatagtcctcaaggaggaggttcaacaacaacgagttccattttatggagaggaaaaccgaggctcagatgcaggaattcactrtggcacaaccatctggggtggagcaggcattccaacccaggtgtcttgggtgcaccaaagctcctccttttaccattgccccacacccgttccctcctctggtcaatcagcgtggactgaactgcatgccaagcactgtccaggcagggagggcgtgagaaccagtgaggctgaggcccgggccctgcctctggccccagaacctgtctttctcatcagagtttttattaatcagcctgtggcttaaaaaaatatggccaaggctgggcgcaatgactcacatctgtaatcccagtactttgggaggcggatcacctgaggtcaggagtttgagagcagcctggccaacacagtgaaaccctgtctctrttaaaaatacaaaaattaggccgggcacggtggctcacacctgtaatcctagcactttgagaggccgaggagggtggatcacaaggtcaggagrtcgagaacatcctggctaacatggagaaaacccgtttccactaaaaaatacaaaaaaattagccaggtgtggcggcaggtgcctgtagtcccagctgctccggaggttaaggcargaggtggagcttgcagtgagctgagatcacgccactgcactccagcctgggcgacagagtgagactctgtctaaaaaaaaaaaaaaaaattagctgggtgtggagactcatgcctgtagtcccagctactcgggaggttgaggcaggagaatcactcaaacccaggaggcagaggttgcagtgaaccaagatcatgccactgcactccagcctgggtgagtgaaccaagatcatgscactgcactccagcctgggtgacagtgcaagacttcatctcaaaaaaaaaaaaaaagaaaaagaaaaaattggccgggcccagtggctcatgcctataattccagcactttgggaggccaaggcgggaggatcacttgagcccaggagtttgagaccagcctgggcaacatggcaaaaccttgtctctacaaaacatacaaaaaaattagcctgtagtcccagctactctgaaggctgaagtgggaggatcacttgagcccaggaagtcaaggctgcagggagccgtgttcatgccactgcactccagcctgggagacagagtgagaccctgtctcwaataaataaataaataaataaataaataaataaataaataaataaattaccactccttaaccccggactgctcttacttgtttttacaaacagcaacaggcttctaccccttcccgattccccttcacccttcgctgttcaaactgacccagagcttgttgttccagctaaatgagcctggcaggagccagaatgttccctcccatgcaccagtggtggatgtttaggcagaggactcagcttaaaagtacttagtgtgacaccagggcgtaagcaaagtctcgacaagtgaatggatagcctctcttgccgtgtgcagccaccaatgtgctctctgtatctctgaaattccctatctggatatttcatataaatggaaccatacaataggcttcttttagttagcataatgtcttcaaggttcatccatggtgtagcatgaatcagtgcttcattacttttcttatgttttagagacagggtctcactctgttgtccaggctggcgtgcagtgatgctatcacggctcactgcagccttgaactcccgggctcaagcgatactcccacctcagcctcccgagtagctgggactacagacatgtgccaccacgcctggctattttaaaaaattttttgtagagatggggtctccctatgttacccaggctggtctcaagtgatcctcccgccttggcctcccaragtgctgggattatagacatgagccaccatacctgtctggtcattactttttacgaattaataatattccatcttatgaatatattacattttgcatatctatttatccatgggtaatkttcaccttttgtgccaggtgcttctatctctttatttagtttaaagtttatattggcctcatgagaaaatgttagccattttacagataagaaactgaggcttagagaggttgagtcattgagctaaggccatgcagcttgcacgtggcagarccagagaggaacccaagctgctctaaccacaaagggggctctgtcctggattcctgggcttgcagcccctcacccctgtctcctcgctagcccctgactcttgttcttcctaggtgggaattctctctcggactacaaacaggtgctggggccccagtgtctgtcctatgaagttgagcgacagccaggggagcaggagatcaagttctatgtggaggggctgaccttccccgatgccgatttcctagggctggtttccctcagtgtcagcctggtggacccgggggtgtgtacagcactggggggtggscaaggaggctgaggggtttgggggcccagtttgcaggctccagggctgggcaggctgggggctgggggggcttgaggcaggctaggggtccctgcagggcccaccaagtcctcattttcccctcagaccctgcccgaggtgaccctcttcacagacactgtgggcttccgcatggccccctggatcatgackcccaacactcagcctcctgaggagctgtatgtgtgcaggtgaggctccctccctccagccctcccccaagtctggagtgcagaggtagggacagaagctgcctcagggctgcgcccctcactcacaccgacggattcattgcgggcacccattcaggcagagctggtggcaggacagcagcaggtgggctggggccccaccctgcccaaccctgacccaccctgccctgtgcagctaaggcctctcccaggtcactggctcaagctctggctttcctgcccatcctgtcctgtggctgcagccccagaacatctcagatttagtctgggcagtggagccaggccctgcacaggctgctggtggccatcggagacctaccctcactgtaacatgggtacgatcccttgcctgctatggacatgggaacccagtctctgcaagcccgatctcacccagcttgctggtccttctgccgtctctcagaatcctcatcatgcccttgagggaaggatcagcctcgattggcaaagccctgccaggcctctgtgccagaggtcagaccactggaaaaagccacagttgagctggtcataagttaaaaggctgggaagggtgtggccaaacaggtttgctctgcttccccgggtctaggtgtgtgtaggtgttaaaaagagactgttctcctgcttgctaaccccaccctgacccctttgcttaggccaattgtgtggaacaggagtagatggggctacctgcccctcactgctattttaacccaaaagattcagcctcaggtcacctctgtggcgacttccctgactccctgtgctgggttaggtgccctgcctctgggcaccactgcccgcgcttatgcctcaccttgcacctgtcacctgatgtgatctggagactttatccatcttccccatgcgcctatgagcctctcaagrtcatgaactggaacccctgtaccccagaggctgcacagggcccagcacaaactgaaggccactcacacctcagccacagtcagaggccattagcatgctcccctctccctaccttttacagagtgatggacactcatggctccaatgagaaattcctggaggacatgtcttatctgacattgaaagccaactgcaagctgaccatctgccctcaagttgaaaatcgaaatgaccgctggatccaggtgggagctgggggcagctcgggaagcctgcagcctggcttggggaaagggaagccgcacaggtgcctgatggacccagtgtcgctagagaagccacggcagcctgggccaggcctctggggcgagggcttttccgctgcctgcatcagccccagcctccactgcttccctccaaacgctctggtcccagatgaaagtcctctcctggctggggtcctaagaggcctcacttctacctctgcccctcaccaggtcttagggaagacccgctgccctgccctgccccaggcctggtggggaccaccctgttctgtaaaccacccgaaaaaggtcacygtggctttttcatctctcccctcccaggaygagatggagtttggctacatcgaggcccctcacaaatccttccccgtggtctttgactcccccmggaacaggggcctgaaagatttcccctataagaggatcctggtaygtagmgacaggtagagtgcagaaaccctggttgggtcctcctggaggcgcaccagtgaagtctcatctggacctagtcctatagggctcagagaacaggaagagggggcagaaggatacaggaggtgggatrtcagcaaactgrggagccagtgcggagtttgggcaagagaggaaatgatatgcaaatcacatgcaaataggcagcagcctgattgttcctgtgttgggaggggcaggtcagcagcsctcttctggataaggcggctggtcaccaagggggaattggcagtgtggtcagctctggggagaccaaactgccttttggagagaatgcacccttagtgagcctgcacggctcttgttcttaagagctagggcctctctttaggtgccaaatgttttctgaacacctactacrtgccaggcactgtgctacctcctgtgcacaagatggcaacagcagcacccaccgttacktattgagttccaggcactgtctcctagctttccatggcttaccttatgtattccatggggtactcctacagataagtgctatcattatttcctctttatggatgaggaaatcaaggctcagggaggttaagtaacttgccccaggccatgcagcaagttaatagtggcaccaagatgcamaactaggggggctgtccccacagccctgcactcagcctcgaggctgcactacccctcgaggtgagtccacagtctctgcctgtttcccggctcccactcttccactgctgggacggtgatggtccaggtaggagctgtgatgggatgcagtctgtgggcacacagagcagggacattcaacccagcctggagggatcaggtgacaatgaaccctgtaggtgagtgcacccgccagggccagcgtgctggagggggacccacctgacctgccccgggcttggcctrtaggagccaggggattttttcactgatttctgctctcatctttatcattttcattttctactttctttgtgtttagtttgctgttctttttctggcttgaaatggaaactaagatgtttcagccttttctttttattttatttatatgtatatatatattttttattatactttaagttctagggtacatgtgccatgttggtgtgctgcacccattaactcggcatttacattagttatatcttgtaatgctatccctcccccatcccctcaccccacatcagccttttctcttcctaaaaaaaacacgtgtttgtttgtttgtttttgagaaggagtctcacactgttgcctgggctggagtgcaatggcgcgatcttggctcactgcaacctctgccttccgggttcaagcgattctcctgcctcagcctcccgagtagctgggattacaggtgtcccccaccctaccaccacgcctggctaattttttgtatttttagtagagatggggtttcaccatgttgtccaggctggtctcaaactcctgacctcgtgatccacccacctcggtctcccaaagtgctgggattacaggtgtgagccaccacgcctggcctactttattttatgaaacagggtcttgctctgtcacccagactagagtgcagtggtgcaatcctagctcactgcagtctccacctcctgggctcaagccatcctcccacttcaccccctgaggagctgggagcacaggcttgccccaccacgctcagtttaaatacacatgtctagagctctgacaactccctagcagtgctgcctcgtcaacatctcatgagttttaatgtgctatcaaaagacagcagatttttatgaatttcacttcaaaatcttgtctaatttccactttgatttcttctttgatccatggmttctttagatgtrtactgcttaatttccaaacatttgggggagtttttagttatctttggttattgatttgtctttaatcgcatggttcgcagagcccaggggggatttgtaaaaagtggacagagatcgtttttcaggyactaagagccatggagtgggagacccccagcaactcccctctactccaagaactgcctcgtcctgtcctcactgacctctccttcttggggtgggggtctcrctggttcttccatagggtcctgactttggatatgttacccgggagatcccgctccctggtccctccagccttgactccttcggcaacctggacgtcagcccgcccgtcacggtgggcggcacggaataccccctgggccggatcctcatcgggagcagcttccccaagtgaggggctggggcgggaggtggggaggcacaagggaatgactgcagcatccaccctccctgtgcccccatcacaaacacaattccccagtctgagaagtgatcttaacttcctgcgtggaatcctggaatcwaagactcggcaacctaggatctcagatttaaaagatcagagaatcttaggagaaaastcacacgcttgtggcctgcratcttttggcctacctcattttatgagcttaatgagtcaccaacataaacagatatcgggagggcctcccataaaaaggcaggtttctggcttctcatgaaaaattggagaagctggggaggtgagatacagtctggcacagagacagaggaatagactcrttgacttctcccattaggaagtcagaatagcttctgtcctaaccatggcttaaaagggtcctgaggtcatgaagttcccagggcaggtggctgcaggtaagcaagtgattggccaggataccctgatgacagaggtgagtcagtggatctcaccctggacagatgtgatggagcaggaaacaaggtatttaggttttaacgctcaaacaggtggcgatgtctgttaggtcctgctgagtgggtgcacaccctccctgcaggtaaccaaagaatgacgtgtgcagttcagggtcctggtgggtccccctgtttcctccctggagatgacacccactgtaagccctggagatcaccttcctgtttgtggggtttttgcatagcaggggtgcccccacttaccccccaagccctggctgaccatctggtctccagcccagaggagtcaggcagtgctgagaaggtcacagcctcacctggtgaatctggcagcctcagagctctggatcggatgaggcgaggcttcctggcacctacccaggcaygtaactgggwgcccagacaggatgcctggggctgagactggccaggcgagaggcatgtgctcaccctgttggtgactcatgcccagacactactgtgtgggctgttctacccacacccttgggggcagacggtccttgaggcctcaggacagtctttctctaactcagggaggaacccgtgaggaaggagcacaggctttggaatcagatggacttgggtttgagtcctggccctgccacttgccagctacatgatttgggatgagtcccccaaaccagtgtataccacagtgcctggcacacaataggtactcaattaattcacttaaaaatatttattgtatgccaggcacagttaaaggtactggggatacatcagtgaacaaaacagatgcattttaaatgagcaaattattttgtactccatgcctcagtttccttatctttaaaacgggcctgatgaaaatcccagtcctagctacagaatcagcattactggggataaagaattcgtgtcaaccacctcttgaatgcttaggtatttttcatttggccccagtagtggggctgcttcaaagcaggttggaactaactggaaaaatgtattgaccagctactacctactacatgtcacacccatagtgctttccccaggctacctcatttaatttctacaacaaccctgtgagactgagaccatcattatccccactttacagataaggaagctgaggcttggaaaagttaagttacgtgcattctttcatacattcatttaccagttcagtaaatatttatggagacttcctataggccaagcccaaagtctaatgctggggatacagaaatggctgaggagcttgcccttgagatttagagtctaatgagggagacaggcaagcaatggatcagagaggggatcacatatcatcccacgtgcgttgtcctagaaggcttcctaggggcagccaacgatattgacgcttctttgcgaggccaaggtgggtggatcacctgaggccaggagtttgggaccagcctggccaacatggtgaaacctcgtctctgctaaaaatactaaaattagctgggcctgatggtgcacgcccatggtcccagctacttsggaggctgaggtaggagaattgcttgaatccaggaggcagaggttgcgctgagctaagatcaagccactgcactccagcctaggtgacagagcaatactccgtctaaacaaacaaataaatgaaggaaagaaggaagggagggagggagggaggaagggaaggaaggaaggaaggaaagaaggaaggaagggagggagggaggaagggaaggaaggaagggagggagggagggagagtgggagggaggaagggaaggaaggaaggaaggaaggaaggaaggagggaaggaaggaaggaggcaaagtagtgtggagtggaccatgttgcaggcagagggaagcgctcaggcagaagcctggaagccagagaaggtacagctcaaaggaaaagtcgaaaaaactcggtatgggtggcatgtagatgggcagggatggaccggtaggacctcaggcaggagggggctctgcgggtccagctggggacagagttcagggagaaaccattctgttcagatgcctcatggggcagttctctcctccaggatccttgggacctgggctcaggagcagagagctcagaggatgcaggctcaggggcggagagccggaggatgtaggctcaggggcagagagctcggaggatgcaggctcaggggcagagagctcagaggatgcagactcaggaaggggaggggctccttggtgttctccaaggactttgctcccttctctgtcccaggctcctgccccagtctctatatcacactgcaacacatggacatccttacctgtctgctcccacaagcctcacgagccagtgagccaagccaggaaccttctctcaagggtgcaggggtctgctctgggaactcccaggcacagagcaaggaycccacatgggaaagtgaggggtctcctgtgtggacgtgtccccattccattggctgttggactgaaaaccaggaatgaggcctttggtggatagataggacctgaggtttgaaaagggttggctacgtattaggaccacatagcaagttagcagtacggtcagaacccaggtctccttctacctgggctccaaactcaaatttagcacctcaggctgctgtccagtgaccctgccttggtttctgaccttagcaatggacaaaccagacaaccaaacattccagcagagagaaacagacaataagtgaacaaaacaaataagtacctccaatcatatgtatgaatatagtatgaatgcatgaacaaatgcatataactttaattttctgggactcaactccctcacctgtaaaatggggacagtaakagtcccaaccccacagggctgtcataaggattaaatgaggtagcctgggtaaagcatgtgtgtggcacatgtcaataaatgtttgtctcagctttgctgagagtctgctgtttaaacaaagccttgaaggaaaagaggcagttaggccaagcacagtggccctcacttgtagtcccagtgctgtgggaggcsgaggtgggggggtcgcttgaatccaggagtttaagactagcctgggtggcatggcgaaacccacctctacaaaaattacaaaaattagccgtgcgtggtggcacatacctgttgtccaagctactcaggaggctgaggtgggaggatcacttgagcacgggaggttgaggctgcagtgagccatgcactccagcctctagrctgggcaacagagtgagtgagaccttgtctcaaaaaaaaattaaaaaagagagagagaaagaaagaaaaaaagaaaggaaggaaggaagaggaagaaagagaaaagaaggaaagaaagaagaggcagttaaagatgtggctacttaggagaatattccagggtgtagaaacagctgtgcaaaggccctgaggcaagagcaggctggagacagcagatcagcagggaggctggtgggcctggagccaagtgagcaaggaggggcgcagtggggagtgaggccagagagcttggccgagcacgcttcagatgtaacttggagctggtatttctatgtatatcatagggtcatcaggaggcttaaacaagacacttactgcgaggaccctaaggacagcacacagtaggtgctcaaatgcacacacaaatgcacagtccattctctgctgtcttggcttctccacgctctacgccccacgtttaaagcgttctttgagcaattccgccccctggtggcagatctgatgatgactcaggcaaggcctgatrcctctcaggcacaaggtgactgcccgccctctccctcctggccaggtccggtgggcggcagatggccagggcagtgcggaacttcctgaaggcacagcaggtgcaggcacccgtggagctctactcggactggctctctgtgggccatgtggacgagtttctgacctttgtgcctacctctgaccaaaaggtgcgtcccctccytccctgcctgagccacctctgcccttgtctgacctgatgggatgagtcagggcaaagccatctggaaccagctcaaccctgtgccccgagtaagctctggattgggacattttytgggtcagggcaccctgacacgctcatcctcacacttccagggtatttgtgcttggacccaaatcccttatccaatagtcaggaatgatattgataataattggtaatatttattgagcacctactatgtgccagatactcacatgttttaattcatttaatcctccaacaagcccgtcaagtgggtgcaattattattgtcccattttacaagcgaggaaattgaggctcagaagggcaattaacccatccaagctcacccagcctgcaggtgtcaggataggattcaaatccgggttctgggcctctacagtaagccttgcagaggtggcttgggaaggcatggccagggagccagcagcctgggagaggaggcttcccagygaccagtggttacagctctgctagggacagctctgacagtgaaggaggagacatctgaattgggtattttgtttgttttttgtttgtttgtttttcgagacagaatcttgctctgttgcccaggctggagtgcaatagcgcgatcttggctcactacaaccttcacctgctgggttcaagcgattctcctgcctcagcctcccaagtagctgggattacaccaccatgcccagctaattttttgtattttaagtagagacagggtttcaccatgttggccaggctggtctcaaactcctgactgcaggtgatcygcccaccttggcctcccaaagtgctgggattacaggcgtgagccacsacacccagccctgaattgggycttgaaggaagaaatcagaatgccctggtgggcaaaatgcgaagggcstccagggagggagaacagcacagacaaagttctggaggtgggaacctgcttggaggactgggagagttgcagacagtgctttgtggctggggtgyagaccgagtgggagaggggagtcccaagaactgtcaggcccctcctgagtcctgagtctggggtctcctgtgtctaaggggaccctgtccactgagccattctccctccctccgtgccagggcttccggctgctcctggctagccccagcgcttgcctcaaactcttccaagagaagaaagaagagggttatggggaggcagcccagtttgatggtgagtgccaatgacccggtcacccctgggggaccctgccctttcatcaccatccttgggtacagcccctgcacctgcagatctctcagctggactcagaacccaacacccactctctgtttcttgggtccccaggtcctctgatgggtgggggagttcctgggccacaccccaggagaggaaaggcacaggaagtcatgagtgccccasgtgccggtcaatgccaggcatgttcttgttctcactcccctttgatctctctcccctcttccttatccctgttcacagaagtggaaactgaggctcagaaaggtgaattggcttggmcagggctatgcagccagggagcagcagggctggggccttgagagaggaaggaggagaagccaggcttggtcagggcccctctgcagagcttcctgcaggagctaacagaccctccaagggcttggttggcccatctcccctccttatcacagcctcagtgttctcatctggggaatacctggggaatagagcattggaatggatgtggtgcagacatccacaaggatagccctgagttcaaatcctgatcttggcatttgctggctgtggtatcaagggtgtgttctgaacctctcagtgcctcagtttcctcttctctgagttgtagatgataattaatccctcctatagttgctttaaatattaataatacattaagtaggatgcccagagcatggcagacattcaataatggtagctgtgccataattattaggctccaagtccagagtcacttcctgaggggttccttatccatcaccaggttttccttgcagccatggcttggtcccttcaggggttctcagtctctggctttctctgtcctggcttctgaccctggcactgaggtaggagggaaatcctggcctggattatgtagccccaggctgaagacggcctccaggcagtgctccctgagctatgtactgtctttctcttcttgcagggttaaaacaccaggcaaaaagaagcattaatgagatgctggcagacagacacctccagagagacaatcttcatgcacaggtgagaggcaggaccaccagctgctctaaggggtcctttcccttccagggagaagaagccccaggaactgggttgggtcagagattcagcgctggagctctcatggtcctgggggctgctggggcctgcaggtgggatagagcctctgccttcaggaacccacagtctgatggaagagacagagccatgccctcagagagctcccagcctaatgagggagacccggccccacgctggggcaatgacctattttcacagaagcaaatctgagcctctcatctgagaagtctggtgaaatgcgagagacacggtggggaaataggaccttgmggggcccagaggtggggtgggtaagattcagggggatcctgtgggaacaggtgaagcaaggtgtcaggaaggggcagggctcaccccaaggataaaaaatgcctgccccatgcaaggcgaaggggctagcacagagtcggtgctcagttaatggcaggagggcccttaccccttcccggtagtgcccagcgctttctcctaagctgctgagaagggacaggagcatcagccatgctgtggctggggctgggacagtgtgttgtgctgacaagaacatttgcatccagaaactgcctgggttcgaaccccagctttggcacatcctagccttgtgcacttsagcaggttgcctgagcctcagtttcccccggacagcaatggtttctattgcacaaagctgttgtgaggcttgaaggagctagcgggcccagagggctccacacgggcccagcgcacagtaggtgcttggccagtgttatgctcttcctagtcctgggctgcccagctgcctccttccccagaaatgcattgactggaaccgtaatgtgctgaagcgggagctgggcctggcagagagtgacatcgtggacattccccagctcttcttcctgaaaaacttctacgcggaagccttcttcccagacatggtgagagcccttgtgcagggtcctgctggggggtctgcggggctctgagaagaagcactccctggcccagggcaggctggtgcagaggctggagggccctgcggacctctccagtgtctgtttttgtgaatatagagaacattcccatcagtggctctcaaccagggcaattttgcccccaggggatttttgttgccgcagtgaggtgcatgcccctggcatctggtgggtagaagccagggatttcactaaacatcctacagagcataggatgccccgccacaaagcacttttttttttctcacccagatggaaaaagaaagcgtggtttggttccaagtgtttcaggcttctgtctctgggtctcagctgcctgctgtgttccccaccacagcccctcgcttgctgctccccagtgggggtcctgtgtcaggcggkgcaggtggggtgggcggtggcctcgctgactctcattaacagggcagctgacaaggagatgagcagatgtgatctcaactgggaagggcctgagcgatgctatcggggtgggcctggcccaagtgcccattaacctcttgggaaaggatgttggggtgttggcagctggcagggatggtcccccgggatggggatagaccctctttcttcagactgcggtctttagcttgaatccctctcttgggacaagccgagggttggaagtgaatgtcggaatcgggatggaatcagggttggaagtgaatgtcggaatcgggatggaatcagggttggaagtgaaagtcggaatcgggatggaatcagggttggaagtgaatgtcrgaatcggsatggaatcagggttggaagtgaatgtcggaatcaggatgcaggttgcaggaggtggggagggtcagtgtgctttcctgactcctcatggggagattccagcctctaggtcctggcagagacccccaagcaggatttctcgactctgtagctctacttctgttttaggctggataagcctttgttgtagatgctgtacagtgcctcgcaggatgcttagcggcctccctggtctctacccactagatgccaatagcactctcccagatgtgacaaccaaaaatgccctagtggacaaaatggaccctgattgagaaccacggcttgaaggcagtgttgtctgttagaacattctgtgctgatgaaaatgttccatatcggtacaatacagtccagtagccactcagctaccacctgaaatgtggctagtgtcaatgaagaacagaaattgtaactttatgtaagtttaattttaatttaaacaactgcatgtggccagtggctactgtggtggacagcaaagctctaagggactgctgagctctggttctggctgaaggtggsggggagggcctaggctggagcgtgtgtgtctgtggtctggcctccatctgccrgaagcccctgactgtgggtcatcctgtggggattccctagcttcgttccaggctctgctgaaggatcccagcttgtcttcactggagggtcccatagggaacacccagttaaccccttggtttgtcatatggggaaactgaggcttagaaggagagtgggtcatgtgtctgaggtcacacagtgagcgagtggcggagttgggaccagcccccaatcccatgactcctcctttaggaggaagcagaggcctggctggctctggccctggtcctggtcctggtcctggctcttttctcctctttctgccctttgccccctgcatgccccacccccactcccaccccagcatgttctggcccattagtgggcaaagaggtagttcagggccaaggccaggggactgacctcacgggaccctccagctttatgttggtccctgccatggatgagggtggggcagacttgagggtggggggcagagcacggagagtttgagggcagagtccaggacaggctcacctcaaactcaagacagcccagagccgccctctagagagaaggtccggagtcccctttgaacaccaagggtcaccccttatgacctcttgccatcaacctgggctgagatttcctctaagaaacccccatascacagcatgggggagaattcccatccccagattagggccccaagccaggtccgcaaccaagggaaggagaggtgcccccagagttaaactcaagtgtccccaaaggctttcagccctttcccccaactcctcagtcccacaggtggccagataaaaagcatggattttggcaccagccagatccaagtccaaatgtcagtctcatcattctctggctgtatgattatgtgacttaaccygtctgagccacagcttcagagggaggctgtggcatttagtgatgatatatctggcacataaaagatgctcaataaatgctaacaatgatcagggctgccaaagacagttaagcaagctgtgcacagcaaaagcacaccacactttggaagacatccacaccacagaccttgtaggtgtgtatatttgttgtacaagtttctggcagatgacacgaaaatctcttgttctaacaaagttgctataatatgacaattttctcatagatgaaagaaagagtgggagaagtttttttttgttttttgtttttgttttttaatgtacaaaattcctggtagycctggctgttattcaacctcatttccaaccctgaatctttttctcctctgctttcataggccctaactcttgagcaaactccagtcctagagccctttctaggctgtggctatggccaacccattccccagggcctgtctcattctggcaaggaaggggtgccaraagcacagcacttayagccagacagcctccctcttgccttttctcttttgcaggttaacatggtggtcttaggcaagtacctgggcatccccaagccctacgggcccatcatcaatggccgctgctgcctggaggagaaggtgcagtccctgctggagcctctgggcctgcactgcatcttcattgatgactacttgtcctaccacgagctgcagggggagatccactgtggcaccaacrtgcgcaggaagccctttcccttcaaatggtggaacatggtgccctgagcctgcccccacccgccatcctctctgcbctcttgctagggaaccctgccagggtgaaggcaaggaacaaccacctggcctccattctcttgggggagtcttggcactttgcaaacatcctggccaccatgggcaccaggacacagggatggataccacctaccctcgcctctggaatggcctacccaacccgagaagaatgcacctcattcttccctggcctctttcccacccacagcccccagaggctctagatcaacaatgttagcatgttccagaatggctgtgggaggcctagggagatgggccccacttagaattgctcccccttcattctgatgcctccctggggaacaaggataatgactttgcatctgcacctggaacggggcctgggggaccwggggtctggtgtgccaggcaccaggctgcctctgctcttggaaaactaggaaaggggatcagaaacatcctctccccgctctaggtttcttctcccaaaggggacccaaggctgtgacacttacctccacccccatccagcacccttcagctgtgtgtggacaaacaaggacagaaaaacccagtgtccaagggccaatttaaatagaaaaaaagacaacaaaattttaatagctgactccgacctcagaagagtgattgctacctttctggaaagactttaattaccagagctggcttctcccagctcagaaatgctgagaagccaacgtgaggcctgaggacacacaaaggatgacggggcaggaggggatgaggtcagggtagcagagtgtgtgacgacggatttgggggcctagaggtgtccgtggttcctgggctgggattttggactctggatttgaagggagctggagcttccagatgtagcaggggtagggggccagatgttagaagagggtgtgtgtgttgggaggaaattaggttatctctgaaggtggagtttaatttcctttaatagtctttaattattccccttcattctgcaggcagtgggaggggaaggcttgcccggtctctctcagcaacccagggaccctgcacatagcttaggtttcatccctgaataaaccgctgtgcaggcccatgtcccctcccacagtagggaagacagctgccacgggaggttaatagcccggagtgaggtcactgagacatgcacaggcaggctggttcagctgggctgcagggcacgggcaggaggaagccagcctaccctcttcccccactgccagtgaggccattgtagggcagttggccctagggcttcggtccatctaggttttcagtggcccctgctgagacctcacactgagccaactactgtcactgttttaaccaacaaaagctagcctggaactgctatggttaaagtgggtgagcgggaacctgaaaatccccttctggaaggttctacagaactctatttgcaagctcctgctttaacctgagcgtcctctgctcaggatcataccccagcctgcactgagtcaagaaggagaaggaggctctgaaggggccgggggtgtgagctggggttgggactcccctgagaaagagctgtgggtaggaagggagtgagcattgcagagatagggctgggggtcggggccacactgagtgtgggaagctctggagttgctgctgggccatcgaggggccctggtgttggctctgagaatgttctgggtgaccagtcacctactttctgatcaataaaaatgtcgacatgcatttcttacagggctgtctacccagcctgtttgttgggttggggaggaggggaggaaagcggagaagactgcttccagttccatccactatgaagctgcttggctcaatttctgctgccacaggcggcccctgctcagctaggagagcctcacagtgccacggccagtgccacggccagtgccaggcaggctgattcagcaggatggctggcacattgcctcttgctctggggctgatggccctgctaagatggagatcagatcaggggagggatgggtcctgcctcttcatctcttctctcttccttcagcatcccctccatctctcagggacaacaggtcggggaggcagcccgggccctattaacagaggtgagagttccccagcagggctggttcccagggccacaggccactacagttccctttctggttttcgttttgttttgttttcttttcttttgtttgagaccgagtcttgctctgtcacccaagctggagtgcagtggtgctatcacagctcattatagccttgaattcttgtgctcaagcgatcctcccacctcagcctcctgagtagctaggaatacaggcacaggccaccatgcccagctaattgctaatttattttttacggagctggggttttgctatgttacccaggctggtctcaaactcctgggctcaagcgatcctcccatcttggcctcccaaagtgctgggattacaggtgtgagctactgtgcctggcccaattcccttccatttttgtgtctgaagcttctaagttacctggcttcagtggtctgattttggatgcctgaaatcatcaccctctcatcctacacatttgctgctgcctcaaattacaccgtttgatactcactcactttattttagcttttgttgtggagtaagagggcaaaaagttgctgcctattagtcattgacactttagtctgaattaaccacaaacctgtttctaaaagttggtattaacagaggagaagtgaaggcatgagtctccttccaaagacatatacagttctccgagaaagaggcaggtagtgggccagcaccccagggaaagcccctactttctgcatctattccccatctgtgctcacaagaaggctagggagactaaggcttcctcctgagctcgaactcttacccagggctcccaaggctgactcagccatcaagccattccacagctgaaaaaagtgaagctgtcccttgacccagaagcccagcagttctccttgaaaagaacatctttcccaaaaactgagacatgggaatgacaatctcagggtcctgttgaggcccttgaactggtgcagatgtcccagctggagatgctggggagcgggtcctggtccccatcctgtctcaggctgtcagcactgccagggagaagggaggaaacctctattcagcacctcctgagcctccgccaggcagggtgcgtcttcactattatctccgccagggccagtgattagctgcattttctacagatgaggaaaccgagtctccaagaggggggacactgacacccaaggccctatagtgggtgcacggtggagcctgcctctgaacccaagacttctctccccagagcccttgctcctgctcttccaggagcctgaatgcccctctgacttcggtttcccacctgacgactgagctttcctactctgacatgccaagctccccctggctggagagagttctcaccctcatcatttaccgctttcagaggtttttgggacctaataacagcaacaatagtaatacaataacgccaagctccataccagagctctaccaacgctggcccctgaggcctcacagcaaccatttttcagacgagaaaagtgaggcacgaacaattaagaaagttgcccggccgggcatggtggctcacgcctgtaatcccagtactttgggaggccaagtcgggtggatcaagaggtcaggagatcgagaccatcctgactaacacggtgaaaccccgcctctattaaaaatacaaaaaattagccgggagccgtggcaggcgcctgtagtcccagctactcgggaggctgaggcaggagaatggcgtgaacccgggaagtggagcttgcagtgagccgagatcacgccactgcactctagcctgggtgacagagcgaaactctgtctcaaaaaaaaaaaaaaaaagaaacttgcccaaggtcgcccatccaggaagcagctgaggcagggctgaaacccaggtctggctctaaaatccattaaaaaaaaaaagttggtgtttctcaaagggcaccaaaatgctttgggggtgcttattaaaaaatccagagggccgggtgctgtggctcatgcctgtaatcccagcactttgggaggccgaggtaggtggatcacctgaggtctggagttcaagaccagcctgaccaacatggaaaaaccccgtctctactaaaaatacaaaattagccggaagtggtggcacacgcctataatcccagctactcgggaggctgaggcaggagaattgcttgaacctgggaggcgaaggttgcggtgagccgagatcgcaccattgcattccagcctgggcaacaagagtgaaactccgtctcaaaaaaaaaaaaaaaaaatccagaggccaggctgcacccctaacctgctggatcagagtggacaacagacctgggaatccgcattttcaccagcttccccagcagagtaagaaagctccccattatagtctctgaaaatgcagaaaatggaggtgaggaagcaagaagcgtccgagatcaatatcatatatctctgcaccccctcaacagcacctgcccccaacagttcctggtgcctagccaggtacctgtggggacttgcttcccaagaaattaacttcctgggtgccggggtcgggacaacaggttcgtatacaaatactgggtcccttccagccaatcctgagctctcagctctgggaaggggctgggctttcatgactggagccaatgaattggcaccctgggctggaggggtggggccaggggcttttaaacctcatcctaaggggcctcaggggcagtgttgrggttggcggccacagctaagtccaacaccagcatgtcgctgcagmgaatcgtgcgtgtgtccctggagcatcccaccagcgcggtgtgtgtggctggcgtggagaccctcgtggacatttatgggtaagagtcagaggcctagtggtttgcaggcccttggtgctgatgcccttggaccttcctccctgcaggctgggcagggcttcttcagggcccactccccagccttggcctcggaacagcagccaatcagggaagcttgggtcctcctcttgctctactgagtttcctgaagaccttagccagggaatttgaagtttgggaggctgagccaggtagaagaggcttcagtgactgagctccagaccgggggcttggagggggctggtgccgcgaagagatggcacttttctatgtccaagggatgctgcaggttgggctgaggatctgtctggggcacacaagaataggaacaggcagatatccccagccccatcctgagcctatgagcctagaaacagagcatgaatcatttttaaaaaataagttaatacatagcacttaccatgtgccaggcactattctaagagcttcacaagtctcttgagttaagttttgaactttaatcttgaatttaacccttacaacaaccctgtgagctaggcttattattagcatcatctcatcagacaaatgagaaaaccgaggcagagagggcaagccattcgctcaagtcacacagttactaagtggcaaagccagggtttaaacccgcttgtggtcttactcaggagtcttatggttttagctgctctgatacttggaaaataaagatttccaacctggtttcctctagacactcaatgcccatgcattatgctcctactgtgtgccaggtcatgcctttgaggcccatggtagagggaggtaaggccttatcttctctctcttaggaagaaaagagggttagggtagggttttaagagctgggctctggggaccaccagggagctggcttcttaggcttttggggagaatccagggtcctggcttggaggtaatcaggatactgggaggggagggtgcagaactgtgggacagctctcacctctcaagtctcccagccctctcctcaggccaggtttctcaacctcagcactgctgtcacgatacctctttgtcatgggggccaccctgtgcactgtaggatggagagcagcattctgggcctctctttgctagataccagcagcacactcccgagttgtgacaaccaaaaatgtccccagacattgccaaatgtgccctggggtgggaagaaaatagcccacccattgagaacgagtctccaagactaagactcgaaaaatcagggcgaacttagtcgggagcagcgatggggttgatccagggcattggatgagagggggtgaggagctggtcatgggagggaaccaagtcgggagcagagccagcccaggaaataaatcctggtattggtgggtgggcagtaggaggaggaaggggattcagtggttcttgaaggaaggggcagccacggaggctgtgccaaggaggtaatgaggaaggaggggtatctgccacttggcaccactgcctgcctgccatggggtgactgggctgcgtgccatggggtgactcacctgcccctgctgcctcgtgcccgttgggcagatgtgtctccggtttgacctgycccaggaagcctgggcctggctcctcccccgcagagcttccttagaggatagaggatggattggggcaataagagataaaggccatagcttcctggagtcacctgagccacactggaggtttgcagagaaggccatcggtgggacagccacagggtgggggatggaagctctgataccttcaaatgagggattcttgggccctggtggccaaaccccccaggggtgggagtggagagctcctagttcgttcattcacatattcttcaagtatttcttttgggtctagtgtgtgtaccattcagagccttgaaggatgagcacaggctctggggacacatacaggggagaacaagcagctcctcctctctgagaagccagcagaggctggacaaccttcttacaagggtgccacagaaaggactcctttctgggaaggggagcagga

SEQ ID NO: 93420 - DNA, 12758 bp, Homo sapiens
ctgccttgttcccatctctgcatgctggaattaatgtcctgggagcagtggctgatggagtggttgggtaagtcccagctcccctgtccctcatgggagtggggttaacttgtcttacatgagtttcctagagttttcctgcaagattaaactccagtggcccagggtaacttcttcttcttctttttttttttttgagatggagtctctctctgttgcccaggctggagtgcagtggcgcgatctcggctcactgcaacctccgcctcccgggtttacgccattctcctgcctcagcctcctgagtagctgggactacaggcacccaccatcatgcccagctaatttttttttttgtatttttagtagagacagggtttcaccgtgttagccaggatggtctcgatctcctgacctcatgatctgcccgccttggcctcccaaagcccagggtaacctcttgagtacacactctctattggctggtttcccttctccatctcacttctccattcccccaacttcatctcacaaataagctacgttgaattcatatctcaggttctctgtctgggggcagacaaacaagattccaggaaatgatataagtttcagacaagaggcttctgcctgttgggtgtgtagaatggggatcctgacgtgctacctcattgtcttcttccgtaagcagttattatcaatctcttctcatagttggatttttaaacttgtatgcatctctcctgcccatgttctgagtttctgggagcagggatcacgtatctgcccttctgtgtatcccatgcaggctccagctcattatgttgggcaggattggtacttaccaaccctcaattgaaccatcaatcctgtgagaatttctgggacccaggccagggctcagcattgttaaaaatgtgactggattcagcaggggccagggaagtgggtgatggtcctactggaaaccagatggcccacagaacaaagattttaagccttcagaggagttcataaaagttgatttcccatctgtgtcgaggctcagaaggtatgatgtcttctcaatgtggagatcctggtttatgcctctggtctttgggtctttggtggagacactttcagaccttcctctggggactcatggtgacagccccatgctgccaggaagcagccttccacctgacgagtgaagaagaaaccccagctcctgcttgttcatgcttctgcacacactgcagatggctgtgtgtctctcaaggcaactgggggctgtgggccacgtggcattcagctccttagtactaaaatgtgttatattcaggtgtgtgcattggtcaactctcagcaaatgtacacttaagatttgtgcatttctttgtgtgtaaattttacatgaaaaactaaagaaatattgtactgtagtaaatgctttgcatactcaagtgtttgggggctactgatacctgtaatttactttgaaacataaaaataagataaaaataagatggagagcttcaaacaagtgtaatatagtgcaatgatagaatattggtgaatatttgagtgttgactgtagaaatctttcaactttgcaaaatatgcctaaaaattttaagaataagatgttggaaaaattgtattcaattaagaaaccatggagagagtgcacactcattacaaacaaagcagaatatataaagtaaaaggtgaaagtcctttccttctcctctcactgcatctgatacccaggtgcaggcaccttgtctgaggccctcacagcaagggtaaactcggtgacatagatttgttcccattcaggggatgggggtgggtgacacttcttaatcccattcccctattctgtttgacccatctgccagcccgacacctgtgagtgaatacacctgcccaggtgctgggttggcaagtgggagatggatttgcaaactttcagaaagaaagcccccagccacattttgttcccaatgaggaggctggcaaaaaagggaaatgacctttgttattgaaatgtaatgacaccaaagctctcaaaaatgatggggtttctccttgttgccttccgaggtgcaatggaagaagctgtgggtacctgtggtgggcacttgtcgctgtgcaacacccttttctttcctgttaccccaactccaattctgtccaagggacggggagccctgctcaggggtgtgaatcctgatggacatgtgattcagtccttgccagtgagaccagtggaggccttgggaccttttctttctggtaagcaataggtccaaggagaggtcttttttgtccctttggcttgggctgctgtcttctgaggatgtgatggaaggagccatggcagccaggcagccgtgaagtgacaaactggggacaaaaggcaacacattgaggatggtagaatgcaagagtggacacagcacagaggtcttggctgacctctccaagccatagtagaaaaacccaattttcagaccttggagggcctgttataaccccagttgctggcatgatggttcactttatgtgtcaacttgactgggccatgggatccccagaccagaggtaaaacattatttcagagagtgtccatggaagcatttctagaaggaggggacagcacttgaattggtggactgagtaaggcagatggccatccccaatgtgggaggcatcatcccatctattgagggtcttaatgggacaaaaagtgaggggaaggtggaactcagcctctctgccaggcctgagacatggatcttctcctgcctttggacatctggggtcctggtccaggacttacaccaacccccgccgccccccagtccaggccttcggacctggaatgaattacaccccctgtctgtgtcccttgtttgcatgtgggacttcttgacctccaaaaccatgtgacccagttcctataataactcctttcatctctctctctatatatcatattggttctttttctttggagaaccctgattaatacagccgggtcccctccccagagtttttgattcagcagatctggcatggggcctgagaatgtgcatttctaatgaatccctaggtggagttgatgccactggcctggggaccccattttgggaccactgaattgaaccattatcagtttttatggtagtggttgttacttgaagctaaaagcatcctatttaataaaatggttttgcaattttttatttttaaattttaatttaattgtatttcttagggaacagatctccatgcctctcacattcctttaaagcatttgaagaattcagaaacaaaaagctacaaatctgctgggaccagatccttgggtctgaatggcaaccaaaggggaaagaatctcaacagggctgaggaagattgtgtccagttgcagggtgcgtgttttcaagatgccaatggggtggcagtcaaggtaggagaagcagcctgccacggtgcaggtaacaaggcagtagtatctgttgagaatttaaataataaaactgactagacagtgtctctacttttattatttctattggaggacaattctaaagaatgtcgttggggaagtgctcccttgagtcctggcatgttttggatttcttatgtatgagctgtggaactgcattcccctcggacacactgtggcaggagaatgacagccctattggggacctgcctgaataatttagatgggacggcgctgtctttgaggaaaatgagatacgggcagtggtggggctcagttctttgttgactgcttatagtgaacttgctggggaattcctgccctcctcattttaaaatctctgtgctgatgttgtccatacctggtgacctcatggcaagaacatggttttggaagacactgggctttgtttaactgctcagctttgataacagcagctcatccatctttgcaaatgtactttgaagcctttttcattcttctgcaacattcccagaaagaacgaagtttccagcaactccatataacagagctttgcttacacataagagcagtttggtataggaaaggatacaggctccaacttgatgaagctccctatggccaaatctgggacaatttagcaaggaaataaacaatgataatagtagattatgacccacagaataaacaaatacccacaagtccatgctgagataaataaataattgaacaaataaagaaatgggagagaagagggcaattttccttagagcagaattccagttattaaatctcaagggagtaagaagcatagaagatgactgctgggcctacctcacactgattgctgcagggatgggccatggatggatgcaacaagagtaggccagaggatgatgcaaaacagggcatttgcaaggtctcaaggcacctcccctaaagatactaatcacagagggaaaaacagtaactctacagtgcagaagcctgaaggagccgctttaaccaagtgatcaaggacaacatcggcagaaatgggacataacatcatggacgcctgctatggcacagtgggaagagcacaggtcacctctgtggcatccttgtcccaaatgcataacctccacctaaccaggagaaagcatcaggcagtcctcaaaggagggacatttttgggaataactggccagtattcaagtgtcaaggtaacgatagacaaagattgaagagctgccccagactgcaaggcactagggagacctgcaaccaaatagatatggtctcacatggtctgtagattagttagtagtcatgaaccaatgtgaatttctcagattagatcactgtactgtgattatataagatgtgagttttggggaaagctgggagaaggttaaacaggtactatttttgcaaactttttataagactgaaattatttcagaataaaaagtaaagaaataaacaggtggactttggagtcattctgcctctcctcaaatctggctacactacttactaactgtgtgacattgggcaagttacttcatttctcccctcagtttccttatatgtaaaatggggataaaaagaatacctatctgggaggccgaggtaggtggatcactttagcccaggagtttgagaccaacctgggcagcatggtgaaaccccatttctacaaaaagtacaaagattagccaggtgtggtggcacacgccgtattcccagctacttgggagactgaggtgggaggatcaaatgagcccaggaggcagaggctgctgtgagcagagatcgcgccactgtactccagcctgggtgacagagcaagaccttgtctcaaaaaaaaaaaaaaaaaagaaaaaatacctatcatagagggttgtaatgagagttaaatgtgttaatacatgtgtagtacttagaactctgcaccttggcccagagcaagggctatactattacgtgtaattatcagaggagactggcagcatcttctgatcttagggacatttaatctctctgtgtgtgtctcactgtgcttctggaaagtttctgatgcaggctcctggactgattccttctccaatcaattactctggcctaaaagcatttccctttctaccagcagccagataaagccaaattcagcactaggatctgtagtattaacttaagtattacccacttaatgggacttaagtgttacctagttttagaggaataagaataacttctgtctcacgttgggtttcactgaggagatgtctgcattggaaagacagagctcatgtcactaaagaagcttctggggccagtttcccttaaccccattgcagcctgcagaccttttgggcttgcaggaccaacatccctgattggtttgggaggggcgtgtgtgtgtggatctgcctcacaatggcctgtctgagcccttatctgaggtcrcacgttatcatttgtttggccaataagactgtagcacacacaccagcttcagtccccacttggccttacctttgatgtcacaatctgacctgtgggtattaatctggtcacagctgctcacagactagatggcaaggtccaggggactagcacaggaagatgtggaagagaagtgaccatcaacccaagatcaaagcagaggatggacctctggtgggccagttcgaggttctgggttcagttccagaacctgccatgccacatcctctagagctgtcagaatttgagagcttcccagtgtttcaggacattaggcttcacatcagggaagtgggagctcaattggtcaagaaagtcaatgccgtctttcagctggacatcaccaaaaatgggaagaccattttgcggtggacyattgatctgaagaatggttctggggacatgtatccgggayctgccaggctcccagcagacactgtctttacaatcccggagtctgtctttatggagctggttttgggcaaaatgaacccgcagaaggctttccttgccggaaagttcaaagtgagtggcaaggttctgcttagctggaagctggaaagggttttcaaagactgggctaaattttaagcatgcaaaaataccaaggaagaacttctcttcgatgataatgtcgagtggaaatcatgcttaatctgaagattaaagtaaaaagtatccartatttttactcaaattcttcctattcaagtttaattgattttcctgttgatgggtaaattttcagggagggttctgaagcagtaaaaagcrttgtagtgcatcaattagaatctttgtctttttctctttttttagctccatttatgccctttatgctccatttatgccagggtgagagccacgtgtaaagaaatgggtgattatgatcattggaattaaatactccaatgattgtgttcttgagacatttttccttttctaaaaaagtttgatgttttggggaaagaagtgataactatcattgtgcaggtgtgcattctgcatggtaacttgattccatgaggaaactttactatgagactgtggggtgctaagggaatggggcaccacaggtctgtgggtggaacccaggcaatagaggggatggtgctgttggtgtattataatttctgatggtttcaattccaagaaacttgaagggcttgggaggtgttctaggccagtggttcttaactggagcatgcatcagaatcaccggaaaggttggttaaagtctggattgctgggctccatctcagagcttctactcaggaaatctgggctggagagaatgcacatttctaacaagttcccaggggatgctgatggcaccacccttagagaattccagctctgcttcacttcatgccaaagctctcagtattgactgtaactattctattctaggccaatgagatggtgccattaattaaaggatctcccagagacagaccccacagccctctgtgagccatttataaagtatccatgctgtcaggagcttgtgcattgaacattttacaaaatcagagggcagcctgggagatttcccttccggaagctcccttcacatgttgtctgggaggataggatgaagtctgttgcagctgatgcaaactccttgtgggtgagtgtgtgtgtgttcttggttcacatgtggtttgtgtgtacctttgacttgtgggctaaatatacacagtgtggatactctgaaacctagaggaaagtttcatcacaactgccatgctcaaacacctacacagtgtggacactctgaaacctgggtggaagtttcatcacaactgccatgctcaaatacacgcctaccaaataatcccaccattctgttcttgggtattttgttaagagaaaagaaagcatatgtacaagcataaaataaacactcgcatgcatgtgaatgttcatggcagctgtgttgggagtagtcctaaactggaaacaagccacatgttcatcaacaggtgaatgggtggacaaattgtgcggtgtcataccatggaatattacttagccatgaaaaggaagaaatgattggcatacacacaaatgacaatgtggataaatggcaaaataattatgctgagtgaaagaagacagagaagactgagcacatactacatgattcgatttatattaaatactaaaaaatgtaaacgtagtgacagaaaaaaaaaggcagtggttgccaagagacaggagcatggggaaatgaggaaggatggggggattatgacaaatgtcatgaggacacttgggggtagtgggtatattcattatcttaattgtggtgatgttttcccaagtcaaagcatygccttgtgcaatgcatataaacccatgcagtttattatgtgtcatataagctaatcaggttgtttttaagaacctgccaccctcccttagaaataaggcttttgtgtggctgtgttcctgaagaggaaggatcagcaactctccccttctctcagcaagatgagccctctcacctcatcttggtctagtgttcagctcctgactatttggatggctctgcagaggccttcctccatttcatattagagaaaggcagagtgagaacttgttgcttacaaaatgtcatcctctctgtgggaaacgaagagatcatttgtcctgagagtgctctactccacagttagacattgctaaggggatgggcatggacttagtgcacatcctggcttcttctctcatgtgcgtcattatagaggtgatctgcatcttgtccctgtcagtgcccccagcctgtgaatgtctcagaggcttccaatggattctgagctctgttgtgagcactcagctccactggcccaggccactcccattcaaccatgtttgagtgtcaggcatggggccggcaggtgtttggggtgccattgtgccacattccttttttcttttttcttttttttttttgcgacgaagtctcactcttgtcccccaggctggagtgcaatggaacgatatccgctcactgtaacctccgcctcccgggttcaagcgattctcctgcctcagcctcccgagtagctggatcacaggcccctgccaccatgcccagctaatttttgtatttttagtagagacggggtttcaccatgttggccaggctggtcttggactcctgacctcagctgatctgcccacctcagcctcccaaagtgctgggattacaggtgtgagccattgtgcccagctgtgccacattcctttttaagggaaatggctcacctaagcccctgctacctgggagtcctgctcataccatgtgttaatcatttggccctgagatgggggttgcttagagatgggagagtgggcagaggggttatgcaggctcatgcctgggctggcatctgacctatgacccattctgacttgggacaaaaaaagtgacctgagctaactcgattcctttctcaagaatttggaactgggaaagtgagagcctgagctacaatcaagcagcgagaatggaatcggagaggctgggatgcagggggtgaggaaggggctgtgaggaagggcagccatggggcaggggctggagagatggaggggcaggagcctggagtagggagagaaaggtggtcaacaagcgaggagtgggaagcccaggcctcggaaacatgaccgcaaacccctttcaatctcaagaaaacgttcaatgctggatgccacgtgaagctgctggaaggactcagattctggaatcagaagcggaattttgagcccagcatcaccattttacacctgcctgaccacaggtgggtactgaaccgcctcttgcccaagcttcctcatctgtaaacgggaccaggagccctcgtgatggtggattgctggggagccctcattcgggcggcccaacagatcccctagctggaagtgggcttcctgtgcatgtgagtccctttctccgctgggtaagaggaagggcaggcacttaggctggctccccactgcctctagggactttcctgctttttctcctatactcggctggtgccctagaagatcacatgtggctcaaaacacacatctgtgttttgtttggtctatacaaggtgggccaacacagtgttagtaaagtttgaattaggacattgtatataaaaaattggatttctgtattctctttaaaaattcggtcatttggatacactgagcctgtattcctgccaggcaacggctgcgggtgtggagcgggtgggctatccagacagaccgaggcccactcctcccagcttggcctccctggctctgaaggtgagtgttggtggctgcagtttccttgggctgggccagccttgcagggcccctgtgggtatttgtgctgatgaccgtggctccctaccatacatggtcttactcttcgcctgtcagtgttctatggctgtgtaacagattaccacacattaagtggcttaaaacaacacccattcattaactcacagcttctggaagccagaagtccaggcaggctgagctgccgtctcagctcccatggctgatcttaaggtgttggccactctgggctcttctctgggggcttgargggagaatcttttccaagctcattcaggttgtggcagaattcaccttcttgtggtgataggactgtttcctatcagctgggaatgctctcagcaacttgaggctggccagatggctcctccatctgcaaagccagcaatggtgtgtcgagcccttctcaggctttgaatctctctgaattcttctgtcttcatcttctgcctcttcatgaaaggactcacgtgattataccgggccactcagataattcatagtaagctctctatcttaatgtgaatttattagtaatcttaattatgtctgcaaaattccttctgccatgtgaggtaatgctgtggagtgaatgtgtcaccccagattcatatgtcaaaaccttgaaccccaatgtgatggtatttggaggtggcgcctttgggaagtaatttgggttagatgaggtcacaagagtggttccctcatgataagattagtgtctgtattagtctgttatcacattgctatatgaaaaatctgaggctaggtaatttataaagaaagaggtttaattggctcatggttcttcaggctgtataggaagcatgatgctggcatctgcttggcttctgacgaggtctcaggaaacttacaatcatggcagaaggtaaagggggagtagcacttcacatggccaaagaaggagcaaggattgggcaggggaggttctacacactttaaaacaaccagatcttgtgaaagctccatcaaaagaacagcaccaagctgatggtgctaagccattcgtgaaggagccactcccatgatccaatcacctcccacctggccccacctccaacactggggattccagtttgacatgagatttggtgagaacacagaaccaaaccatatcagtgtttttataagaggaagagaccagagcgctcgttcgttctctctctttctctctttctttctttctttctttctttcttttctttccttctttctctttctttctttctttctgtctttctttctttctttcttttctttctttctctctctctatctctctctccctctctctctctctccattcccccctctctctttcttattctttctgccaatgaggatgtagcaagtaggtgaccatctgtacaccaggaagagggccttcaccagactggcaccctgatcttggacttaccagcttccaatgataagaaataaaagtctgttgtttaagccgcctgtctatgatactttgtgatagagcccacacaaagacaaataatgtattcatgggtgtgatatctcatcctagccacagtcctgaagactgaggtgtaggatcttcttggaggccataatcctaccaactcccccgcctccaccatctacattccatgcatgttctcaaggtcatcctccaggaaactgccctgattgagctgttgtctttctctcctacaatttgtatacctctcctttttccagctctgtgttctgcctttgcatgggtgtggtcctatgtgggccacacaaatgccctggcttatctgggacattcccagtttgcccccagagatcccacctcttttgtctctgaacagggttagatgtgcactgtgccctaggaaggatggagcaaatggctcacggcccctgtgggagtctcagtgaggtgcacctggctgcatggagaccagactgagattctggatcctagggcaactcttagggacctcacgattttgcaggtgattttttccattctccaaacaagaaacagggaagtaggactgtctcagctcccatgggtggatctgttcacatgtgttttggcacaagttccaggacagcaccaccaaagagggcaaggtttttattctggaggttttaagttagcgaagatcttggatttttagctgtaaattgccagtttcttctgttcactgactgactgagcaattaatctatttgcctaaaaaatatttttgagcactcatgatgtcttaggagttaattacttttggcagggctgatagtaagctgggatatatgaggccagaattggttccaattggtcaaacaccattctggttttcagtgacccgttctgatgggtttttttccctttgccatatggttatgaaacattctggaaatcactcttggtttgaggagctggtggcaagcaagctga

SEQ ID NO: 93421 - DNA, 13563 bp, Homo sapiens
tgtactccaaacttcagcatcatacaatattcctatgtaacaaatctgtacatgtaccctgtatttaaaataaaagttgaaattaaaaaaaaagaaaagaaaatgaagctttccaaattactctcatctatggatgcctactgatatgcagaagcttctaaagtatttcagtattttaaattaaagactccttataaaaggcaaataaaaatcttaaatgactaataagaaaaattaaatccgcttatctttttgcttagttacaatactgccccaaagacaaaaaagaaagctatcctggataaaaagtttatataaggtaggccctacagctgggtagaaaaccaagtaggctctcacggtacctgatttcaggacttggtttttagatggcatttctggacttgccttaggccagaagggacctcactgctctaaagggtgagtcccaggccaggcagcattcaacacaagctgactgaagagcccttgagcctaaagggaacatggtggtagtctggcagtactccctgtgggcctgaggtggccgtggccatggggtgaggctcgctgcatttggaaaggggagggaagcatgggaagcgctgcgtcttgtggtttgagtgccagcttagccacagtacaatagaacaccaggtagacttctaagatttttgactctagtttctggctcctgaatggcacctctggaccctcctggagcttgggcttggagaaactcatcaccctcaagggaagaacataggcctggctggctctgtcaccagctaattgcagatcttcagggccttgaatgaacatagctggtagccaaagagtggttacagcagggcttgggcaagacccagtgctctgctggtttcaggtctgacccagcacagttctaggggtgatggctacaggggtgcttgtgtcattccacctctagctccaggtggctcagcacagagagagactgggacaaagtaaaggaagagaaccagagtctccggtaatccagataattcttctggatcttgtccaagactatcaaggcagtacctctatgagtctgcaagaatcatagtgttactggtcttgggggtcctctctaaagcagatatagcttagatcataacacccaagtccttttgaatatctggaaagccttcccaggaagaatgggtataaagagcccagactgcaaagactacaataaatacctaactcttcaatggccagacacaaatgaacacctacaagtatccagacaatccaggaaaacatgacttcaatgaataaactaaataaggcaccagaaaccaagcctggagaaacagggatatgtgacctttcagacagagaactcaaaatagctgtttgaggaaacccaaagaaattcaagataacacagagaagaaattcaggattctatcagatgaatttgacaaagagattaaaataattaaaaaggatcatgcagaaattctggagttgaaaaatgcagctggcatgctgaagaaatcatcagactcgttcaatagcagagttgatcaagcagaaaaaagaatcagcaagcttgaaaacaggctatttgaaaatacagtcagaggagacaaaagcaaaaagaataaaaaaccatgaagcatgcctacaggatctagaaaatagcctcaaaagggcaaatctaagagttattggctttaaagagtatgtagagaaagagatatgcatagaaactttattcaaagggataataacagagagcttcctaaacctagagaaagatatcagtatccaagtacaagaaggttacagaacaccaagcagatttcatgcaaagaagactaactcaaggcatctggtaattcaacttgcaaaggtcaaggataaaaaaaggttccaaaaagcagcaagagaaaagaaacaaataatggagctccaacacatctagtggcagccttttcagtggaaaccttacaggccaagagagagtggaatgaaatatttaaagtgctgaagggaagagaacttttatgctagaatagtatatctggtgaaaatatccttcaagaatgaagaaaaaataaagactttcctagacaaaaaaaaagttgagggatttcatcaacatcagacttttttttttacaagaaatgctaaagggagtactttaataagaaagaaaaggacattaatgagcaataaataatcacctgaaggtacaaaatccactagtaatagtctgcagaaaaacagaatattatagcactgtaaatgtggtgtgtaaactactgttatttaaggagaaagattaaatgacttaccaatcaaacatagtaactacaacaacttttcaagacatattacaataagatataaatagtaacaaaaacttaaagcaggggcacaaagttaatgcaggaagtctttgtaaattttctttttgttagtttgtttatgcaaacagtgttattatcagcttaaaataatgggttataacgtagtatttgcaagcttcatgataccctcaaatcaaaaaacatacaatggagacacaaaaaataaaaagcaactaactaaatcatatcaccaatgaaaattaccttcgcaaaaagaaagacatgaaggaaagaaagaaggaagagaagaccacaaaacagccagaaaacaaatcacaaaatggcaggggtaagtccttacttatctataaattgaatgtaaatggacacagttcttcaaaggacacagagtagctgaaggaataaaaaaacaatgaggccaggtgtggtggctcacgcctgtaatcccagcacttcgggaggctgaggtgggcatatcacttggtcaagagatcaagaccatcctggccaacatggtgaaaccctgtctctactaaaaatacaaaaattagctgggcgtggtggtgtgtgtctgtagtctcagctactcaggaggctgaggcaggagaattgcttgaatccaggaggcggaggttgcagcaagccgagatcgtgccaccgtactccagcctggtgacagagtgagactccatctcaaaaaaaaaaaaaaagccaaaagccaaaaaataaacaaaaaacaaaacaaaacacaccaaaaaaccccccaaaaactgagacccaatgatctgttgcccacaagaaacagacttcacctataaaacacacatggaaaataaagggatggaaaagatattccaagtccatggaaaccaaaaaagagcagaagcagctatattcatatcagacaaaatagatttcaagacaaaaactgtaagaatagacaaagaaggtcactatataatgataaggggttcaattcagcaagaggatataacgattttaaatatatatgcactgaatgctggagcacctagatgtataaagaaaatattattagagctaaagagagaagtagaccccaatataataatagctggagatttcaacatcccactttcaacactgcatcaatcttctagacagaaaatcaacaaagaaacatctaatagatagttacagaacatttccttcaaagactgcagaatacacattcttttccccagcatatagattattctgaaggacagatcatatgttaggtcacaaaacaagtcttaaaacattcaaaaaaatgttaatcatatcaagcacattctctgaccacaatggaataaaactagaaatcaataacaagaggaattttgaaaactatacaaacacatggaaagtaaacaatatgcccctgaacaaccagtgggtaaatgaagaaattaagatggaaattgaaaaatttcttggaaaaaatgataatggaaacacaacataccattttgttgtatggaatacagcaaaagcagtactaatagggaagcttatagctataagtgcctacattaaaaaaaaaaaaaacttcaaataaacaacctaatgatgcacctcaaagaagtagaaaagcaagagcaaaccaaatccaaaattagtagaagaaaaggaataataaagatcagagcagaaataaatcaaattgaaatgaagaagacaatacaaaagatcaatgaatcgaaaagtttttttaaagataaagaaaattgagaaacttttagcttgcctaagaaaaaaaaagaagatccaaatatgtaaaatcagagatgaaaaaggagatattataactgataatgcagaaattcatatgataatttctggctactgtgagcaactgtatgccaaaaaattggaaaatctagaagaaatgggcaaattcctagatgcatacaacctaccaagattgaaccatgaagaaatccaaaacttgaacagaccaataacaagtaacatgattgaagttgtaattaaaaatctccctgtaaataaaagcccaggacccaatgacttcaatactgaattatgctaaacatttaaaaaataactaatagcaatcctactgaaacaattctgaaaaaatagaggaggagggaatacttcccagcacatactatgaagccagtattactctgataccaaaaccagacatagacacatcaaaaaaagaaaactacaggccagtatctctgatgaatcttgatgcaaaaggcctcaacaaggtattagcaaaccaaattcactaatatggtaaaaaaggtcattcatcatgaccaagtgggatttatctctggcttgcaaggatgttccaacatacacaaatcaatcaatgtgatacatcatatcagtagaatgatggacaaatccgtgtgatcatgtcagtagatgttaaaaaagcatttgatacaattcaacatcccttcatgaaaaaccctcaaaaaactgcgtatagaaggagcataccttaacataattaaaaccatatgtgacagacccatagctaaaaccatactgaatggggaaaacctgaaaaccttccctctcccatctggatcatgacaaggatgcccactttcaccactgttattcaacatagtactagaagtcctagctacagcaatcagacaagaggaagaaataaagggcatccaactggaaaggaagaagtcacgttatccttgtttgcagatggtatcttatatttgggaaaacccaaagacgccaccaaaaaactattagaactgataaattttgtaaagttgcaggatacaaaaccaacatacaaaaatcagtagcatttgtatatgctaatagtgaacagtgtgaaaaagaaatcaagaaagtaatcctaattataatagccacaaataaaattagatatgtagcatattagtctgttctcatgcagctaataaagtcataccccagactgggtaaattataaaggaaaaaggtttaatggacatacagttccacaaggctgggaaggcctcacaatcatggcagaaggcaaagaagaagcaaaggcatgtcttacatggtggcaggcaagagagcttgtacaggggaactcccatttataaaactattagatcccatgagacttattcactaccatgagaacagtatgggggaactgcccccattatacaattatctccacctggccccacccttgacaagtggagactattacaattcaaggtgagatttgggtagggacacagccaaaccatatcacctaggatttaaccaaagaaatgatctctacaatgaaaactataaaacactgataaaagagattgaagaggacaccaaaaaagagaaatacattccatgttcatggatgggaagaatcaattttgttaaaatgtcaatatcacccaaagcaatctacatattcattgcagtccctttcaaaataccaatgacattcttcacagaaatattaataataaaaaactatcctaaaatttacatggtacaacaaaagatccagaatagtcaaagctatcctgagcaaaaagaacaaaactggagagaatcacattacctgacttcaaatcatactacagactggcagaggtgctccagcctccatgtggtccgcagtcagcaccacagcacctggcctcctgcacaccctgaaggtagcacccctgcctttggctcagagtatgctggtgccggtgccagctcccagaaagggtgcgctgcrtggagatgacagttgaggagatgaaggagacygagaatgggacacagttggcgcctctkcccatggagggagtggacattcgcccaaacaggaggaaggcatgctgaaggtcatcgagagagggcacaggtacagagatgcccatgattggggactgaatctttgtccactacactggctggctgttagatggcacaaactttgaccccagtctggatcacaaggacaaattctcctttgacctgggaaaaggggaggtcaacaaggcttgggacattgccatagcagccatgaaggcaggggaggtgtgccatatcacctgcaaaccagaatatgccttcggtgcagcaggcagtcctccaaagatctccccaatgccacactcgtgtttgaggtggagttgtttgagtttaagggagaagatctgacggaagaagaagatggcggaatcatctacagaattacagacttgcggtgaaggctatcccaggcccaatgagggtgctatcatggagattgcactggaagggtgctacaaggactagctctttgaacatcaggagaatctggatctgccttatggtctggagagggccattcagtgcatgtagaaaggagaacattccattgtgtacctcaaacccagctatgcttttggcagtgttaggaaggaaaagttccaaatcccaccaaatgcctagctgaaatatgaattacacctcaagagttttgaaaagaccaaggagtcttgggagatgaattcagaagagaagctggagcagagcaccrcagtgaaagagtgggacactgtgtacttcaaggaaggcaaatacaagcaagctttactataatataagaggattgtgtcctgggtrgaatatgagtctagtttttccaatgaggaaacacagaaggcacaggcccttcaactggcctcttacctcaacctggycatgtgtcatctgaaactacaggccttctctgctgccactgaaagctgtaacaaggccctggaactgggcagcaacaacgagaagggcctcttccattggggagaggcccacctggctgtgaatgactttgaactggcacaggctgacttccagaaggtcttgcagctctaccccaacaacgaagccgccaaggcccagctggctgtgtgccagcagcagatctgcaggcagcttgcctgggagaagacgctctacgccaacacgtttgagaggctggctgaggaagagaacaaggccaaggcagaggcttcctcaggagacaatctcactgacacagagatggaggagcagaagagcaacaccacagagagccagtctcaagtggagacagaagcatagcccctctccaccagccctactcctgtggctgcctgccccccgtctccctactctgccctgttagttttgtaaaaactgaagaattttgagtgaattagacctttatttttctatctggttggatggtggctttagagggaagggggaaaggagtaggctgggagattgaggtggggaatcattttaggtggtgtcaccccctcttcccttcccccattgcacatgaacatatgtccatccatacatgctcattagagtgttaatttattttgctccttctgtttgttaggtccattttccaggggtagaagaggcaagtggtagggatggggtctgatatgaacccagggtggagaaggagactcctgggcagctgttttcctcatcctttccctctcccagtccatttccaaatgtggcctccatgtgggtgttagggacatgggaagaaacaccatttcttctctgttcccttcctcaccccagatggcatggctgatgctgtctcctggtgtcatggtgaccaccccctgtcccccgttctggtatttcccctgtcagttttccctctcagccaggttgtgtccccaaaccccctcagcctcttctttgcatgttgatgaaggtccaggcttgcctgaagttccatgctagagcaataaagtggaaacaataaaaacaaaaaaaaaaacccacaaaaaacaaattatactacagatctgtagtaaccaaaacagcatgttgttggcattaaaacagacaaatacatcaatgaaacagaatagagaacccagaaacaaattcatacacctacagtaaactcatttttgacaaaggtgtcaagaacatacactggggaaaagacaatctcttcaataaatagtgctggaaaaactggatatccatatgcagaagaatgaaactagatgcctatctctcgccacataaaaaaatcaaatcaaaatggattaaagacttaaacctgagacctcaaactgtgaaactactacaagaaaacattggggaactctctaagacattgatctgggcaaaatttcttgagtaataccccacaagcacaggcaaccaaccaaaaatagacaaatgggatcacattaagctaaaaagcttctgcacagtgaaggaaacaatcaacaaagtgaagagactacccacagaatgggagaaaatatttgtaaactccccatctgacaagggattaataagcggaatgtataagtagctcaaacagcactgtaggaaaaaatataataatttgataaaaaatgtgcaaaggatttgaaaagacatttctcaaaggaaggtatagaaacagcaaataggcatatgaaaaagtgctcaacatcattgatcatcagagaagtgcaaatcaaaactacagtgagatattatctgaccctagttaaaatggcttatatccaaaagacagtcaataataaatgctggtgaggaattggagaaaagagaaccctcatacattattggtgggaatgtaaattagtacaactactgtggagaacagtttggagattcctcagaaaacttaaaataggcttaccgtatgattcagcaatcctactatcaaactagtatttgatagtacagcaaggtgacaatagtcaataatattttaattgtatgtttttaaattactaaaagagcataattgaattgttttttacacaaatgcttgaggggatgcaattcccattttccattatgtaattattacacattgcattcctgtttcaatacatctcatgtaccccatatacacctactatatacccacaaaaattaagtaggcccttgggaaaagtagccttgctttttcagacccatccatgctgagtccaggcctagagaatgctttctttgctctattccttaatggactccatcctgaactcagtaattttagctaagaaacaatagctaagtttaaaagatcaccacctatcaaactggaatacacctttctggaatttaactggctttcctgaaacccttttgtaaaagaaattcacacctataaaggaaatctccatttgtaagatgtctgcctatgtacattagaaactcttcccattgttttaatttgcacaagtcatatatctgtttaaggtgcttttctggccgtcttatctaacttaacttttacttacaccactttccccttggtttgagcaaatggtactgtatttaggcctaaagtgttagctctgtgcttttgaaatagaaattttcttgcttcacctaagagttttccctttagaaatgcaaatttgttgcctagttaacaatggcttagggtgacaaaataggtaattggaagattgataggctgaatggggaaaagaaaaactctttaaaaactggcaaatgagaatcctttaagaaaggtataaaatctgcttctgtctgtgtgtttgtaggtctatatgtattatgcgtatgtgataatatttgataaataaaacttgttttaaaattcttggtaaaataggaatgacttcaaaatacaattgaatataatttgatacttgcttgatttgactgtggagcttatgttttggttcagagcctctgggtttgggggtctgcataggtggccatggtgaggtctggagacatgttttcagtgcctagaccagcaactatgcagcaaagtcaaacccaatatggccctttcttccctgccccagctttgcctcctggttacttcgggagtggttagattctccaggtatagtcttcacagctctgtcttctgtcctgacctctatacctggtatgcaaattcaggactcagacaggccctacccttcatagtcctcctggatgccacatggctacttgggacccaagatgactggggaagacattagggaaggtacctgtgtcatagtttcaaaatttatttcagtcatttcaaatcttacatactatgctaaattaattaacacatagacataaaatatctgaatcatttgtaagttaaaaactgaaatattacttattaaacatgagtttaattctatataccttgactttttttatattgtacagaaaagctaaatatatttaggtctgttaaaaaacaataacttgaaccatcttttgaaaaaaattataaaatggtttttatttgtaaatactgatataaaacagttcaaaattactttcagagttttcactataaattagggttctaatagttaaattagagtttatatataattatattactactactagatatgaaacaattctgtatacagaatgtataaacaaaagcaagatatgcttttgatgaggaaactaataaagacataaaatgtgtatttaaaattttttttatctagtttgaagttatttaaacatttcaaattgaaggactaaaaaataggcaaaattacataaacctaggaagttggggaaaaatgtaaaacataaaagacctatggaaatcttgtgtggtcgaaagatgacaaatttcatagatttagttataagttttattacaattagctttagcattgataatacagtaatctaaaaataaaatttggttttctcttttgaggaaaatttcaatggagtattaataaatgacagtaaaatatctttgttcgcctttgagtaaactataaaaaatagaagagaggagagacattctgtctcatgctatctttcttaggtcgtttggttggaaaactgagtctcctctatcaaagagtaaaggttttggttttaaaaaatcttttaattattacattggctaaaaaaatgactattattttatggttacttataatcatatttgtgttaagtattttaaacctttgacatatttgacaggcttccccaaatcaaatttcagcttcagtattgtgttttttgaccttcaattttgggatgctacagagggctcctgaaacatccaaaaaagacataaataggattatttgacatgttgaattacatgggaagcagtgacaaataagaaatgtttaactttcttcaagttattggctggatgctgtggctcatgcctgtaatcccagcactttgagaggctgagacaggcagagcacctgagctcaggagttcaagaccagcctgggcaacatgggcaaaccccatctctactaaaaatacaaaaacttagccaggcatgctggcgtgtacctgtggtcccagctacttgggaagctggggtgggagggtcacttgagcctgggatgcagaggttgcagtgagccaagattgtggcactgcactctagtctgggtaacagagtgagacttatctcaaaaaaaagttatattttaatgaatatattattaatatatgttctaaaattatatcagatttctaaaattctaatatatctcagtatatgctacacagttatggttattatgtgaagttattttataggtcaaagaaataaccaaatttccttgtcaattgtctttaactatgaccatttaaagtcatttctacagttaattgcttaattctgatgcagtttttgaaaacttcacaagcacatagaatcttagggtactgtgtttttaaggaggttcatgaaaggattcaaagcaccctggtaagcactcttggatataggtttgtgataacttttggatcatattatgaagcctggataagaattcccagaaatctaatgagaaactgactggtttttaaaactgctaacccaagcaagacaaaaattaattgaatatcaagaaaatactttctcagattttcatgctaaatcagccactactgtttagatatgcaatttgaataaaccccatggtgcaagtcaaattatctgcgatagcctattagttatcagtgctctgcacctaaatcggagaaacaactggatttaagaggacataagtccaatgttaaatgtggactcagggagaacttagatggctgctttgtcttttctgagtctttaaagttttcattattaaaagctgtacaatccatgattcatcatggaaatgataaaggaatccaaattaatatataaattattaatatattatatattaataatatataataaatatatcatatattaatgatatttataggtggtgtaactgtcctaaattgctaaaatagtttatgatcaatgtttggtttgttaaacccatattcctaggaagataatctaaacttcaggtacatttctgttacctgatgggccatttaaacatttatagagggatttcattcaattttcattttcaatgtatgttttctggttgtataaaagctttcctaggcaagagggctgatgttgtaacagtagctcattaggccaaagtgtattttcaccagttaaagaaagctttttatggtccactgactgaggacaatcaaccccttaataatctagaatatgaagactgggtcttctgggagcaacatcagagaaagattgctcttgccatccacactgcagcaaaactttgggaacttgagtcttggcttcataatctcacaactgagaagggtcattccacagtcttggaaatgtatgcccattggaactcttaaggtaaagctaaccagggaggtttctccccaagaagatggcatcattgatgtggatggctttttcccaagatcatggatcaagaattgtctgctgttatgaaactcttaatctctcattttttcttgcttatgtctctaacaacaatagagctaaaaagggggtctcttatgtgccctcttggggtatacttttatttgtggaagatttcgcagccaaacttccacatggacaaccttatgccttgagagatgaaagatgaaggaccaatacgaacaacaaatgttagccttgttccttcatagtcaatcaaaaacagaacattggtccactcctcttaaggtacatcatggattaaagaaaacctttacaggagatcttctctcttttggatggatatcatttgttagatcgctctttctgtggttgggagtagatgaggcaatgattagaaatttatccctcatgataggctctgtagca

SEQ ID NO: 93422 - DNA, 12774 bp, Homo sapiens
cttaggaggtcctgagaacatatgcccaaggtggttggggtgcagcttggttttataaattttagggaggcttgagacatcaatcaaataaatttaagaaatacattggtttggtccagaaaggcaggacaagtcaaagagggggcttccagactgtaggtaaatttaaacattttctcgttgaccatcagctgagtttgtccatacacctgtggtcatagaaaggaaatgttcaggttaagataaaggattgtgaagaccaaggtttttttgaagtcttatagtgcttcccttagtgacaatagatggtaaatgtttcctcccttagtgacaatagatgacaaatgtttcctactcagattcttagaagttactaggcttttatttcatctctttaagattaggagggcccgaagaaaaatatctagctatgttaatagggattattttcaaatgaaaattcrcccccccccaacaaaggacaactttgcatggccatttcaagatatggcaaaggaacatgttttagggtaaaatattttgactttcttatttgtcacataatgttatgccagagtcagattagaaattaagtcataatatgcagggttaaataaaacccatctgatgagaattaatggtttttagggcatgacaccccggacctcttacataggaatttgggaaagaaaaaaatatcagagcttagtgctcaggtgttagaatcatctgacaaagattttaaagcagtaacaaaaaatgatttaaatagtgtatcagtccattttcatactgctatgaaaaattacccgagacttggtaatttataaaggaaagaggtttaatggactcacagtttcacattgctggggaggcctcataatcatggtggaaggtgaaggaggagcaaagtcatgtcttacatggcaccaggcaagagaaaattgcagggaaactgccctgtataaaaccatcagatctcctgagacttattcactataattagatcagcatgggaaaaacttacccccatgattcagattcaattatctcccaccaggtccttcccatgaaaaggggggattatgggagctacaattaaagatgagatctgggtggggacacagcgaaaccatatcaaagagcaattatatacataattaaaacaaatgaaaacatacaaagtctcagcaaagaaatagaagatataatagggctgggcatggtggcttatgcctgtaatcccaccactttgggaggccaaggcaggaggattacacatggtcaagagtttgagaccagcctggccaatatggtaaaaccctgtcactactaaaattacaaaaattatccaggtgtggttgtgggcacctgtaatcccagctacttgggaagctgaggcaggagaatcacttgaacctgggaggcagagggtgcagtgagccaagattgtgccattgcactccagcctggatgacagagcaagactccatctcaaaaaaaaaataaataaataaaaataaaaaatagaagatataatagaagaaaccatacatatgaagccaaaattgattcaactaaaaagtaaaatagacatatccacaactacagttggagatttcaatatccctttctcaacatttgagtaaatgagacaaaaaattggaaggctgtagaaaaactcaatagtatcattaagaaacaggatctgatagatatttatcaaaccttcaacacaaaacaacagaatacatattctttctaaatgcctgtaaatatgtaccaacatagaccatattctgagcaactaaaccattctatgctcaaacaaaaagatccaacaaaattgttaaaccatttaaaagaattatagagtgttatagagtaaaagtatagagtgttatatgaccactggaatcaaaatagaaaccaatcacagaaagaaaacaggaaaatatctaaacccttggagattaaaaaaatatatacttctaaataatccatgggtcagagaggaatgcctcaagggaaatttttaaaaaattgaactgaattaaaaaataaaagtacaacataggaaatttacatgatgcagctaaagcagtactaatatgtacatgtatagcactaaatgttatgttagaaatgtcatcagcccacatcaggagtgcttttcaggatacctagccagcttcctggaaacaaagtcttcactattagcttttttataagttcactttgttgttatactttttcttcttcacagtatgaaattactttcttttcttatatttccattcacattattttttaaatttattttttggttaactgaaactttaaaaaacttatctggtacaaattccaatttaaactttttgtggatagatatttaggatagtaaaaatagagcctggtggtgaatagaaatccctccagagcagcctaatgcaggatagctggcacacttacaccttcctgtgactatgttgatggcctctactgatccatggcactgtttgtgttctaagtggctacacactaaagatawkcccaactgggaagtctgccctgattaatgtccttcacacataaggtacagatggcatggcacttcttgccttaattaatttattagggacgccatatgggaaaaacagctttcctttcaactggaattacttggggaaataaaacgacaacccattgccgtgggactacattaaattatcaaactagctgaagataaaagaaatcaatgaattgcttggacagaagctgtgtgcactggcatctttccattactcctatttttgaaaaccagatagaatgcagtttttcaggtgatgcaacattttaagtgcagaactgtttattagagttgacatcaagtaaaaatattcaagactgagttaataagactgttcagctgaccattaggatgccattgtttaaaattttgtgtaataacaatgtgttggaatgacactggggcaaaagcgtgggtacacaattaagttttaaatctgtgcatttattaatgttttgctctaaatgttacattcgtgcactaggagaaatatacaatctgtgcaattgcttagggagcaaataatcaacatttcttatgtaggtgtaagtaactatgggtattagacttttcctcaaacctgtgtttttcaatctcgagtaattatacaaggaagatgctcaataagtatttgaagagttaaataatcttccaattagtttcaaatttggtggcaaattttcattgccatttcatagttcactaaaggatcatggggttccttttaatgcactctacaagatattatctgactactgctctaagagagttagcagcttaacttgcatgttaatattcatagcaacaagtcctttacactatttttgttttacagtgaattaaaacatcagaaaatctaggccatttcctgaataagttatacaggcacaaagatatatatttgctggaaagcatttatatttatttttcttttctcttatacaaactatcaggtacaagagcattatatttagaggtgcagaatacacagtaaaatatcttaatttttaaaattgcattatctaactttctacactaatattaaaacgctaaaatctgttgtttgggtatctttttaggaagataaatctatgaggatgtctatgcaatgcmaacaaatcatatttcactgcataactgaacatatggagattaggaacctcataaattgaattttaaatgaactgaccttattggatccttgacaaaagggaaaaagaatgtaccaacaagaatggaaatatattaatggattagatttatcacgagtatcaaataaaataaaatatactctcagataaaaaatatgataatatacagtaattcatattctactggttagtttaccattgacctcttccctctcatacttcccattataaaaatagtgtgcagttattcaagaggtgttgttcagtgtcaggcactgtgctaggtactggatatcgtaagtatgatgaagaaaaaagacaaaggtgctgttctaaaggcacttgctgtaaaatggaactgccagcaaataagacattaaaatcaggtgcaaccatcatagtgatagccaatatatagaaactatgggaacaaaggaataacatttaacttctgctgccgaagagaaattgtattaggcagagacttgatggaagcgtaatcacatgaagaaaaggcagtgttcaaggcagaagaaacagcataaacaaaagcctaaagggraaatagagctgtggatacttctggaactgcaaatagatttacatgatagggaaatccccaggctaaggatgataagatgagatagaaataatctgcaggtggatgagacgataaaaggctatttgaaccatatataattgtattgtgtatgcgtgtgtgtgtgtgtgtgtgtgtgtgtgtgatttactttagatctgcactcaatgcatttagtattttgccccgtggtgatattcattattacttactaaaagatgaattaaaactgaataatattgccaacacattaggcaagtattgtaaaattggactacttttgccaaccatgtatgaaataggccacaagcattcacaatacaaagttgcagattttctaaatgttttataataaatcaccaaagaggcactcggggtggccatttacaaatattaagaacaaaatggttttataggcaaacatgaacaatgaagaatgaattcaaaattagaaaccagaaatttcaccatctgctagtctggaactactggtcagttctggaactgcttagtctgaaactgaccttggcaaatatttaagctttcttccactgactccatttctaatgtagagaagcagataattggaggcataaagttatcatgcacagaaagacttgtaactatcttctgctatttcaaggaccactacataagaccctatagtgattttaaattgtttcctttataaataagaatgaagatctgagggtctcagaatagataatttcattgcatgaacttttttctgcatctaaagaatctcttagaaaagtattgggaagaaaggatttgaagagaatactgttcatttttttttcccataacaaattaatctccattagatggtgaggttagttaggaagttattcaatagtccaggcaagacgtgatgcatgagggtggtgactgtgaggattgagatagacataattaacaggcggaatcaatcaggtgtagcagccaaatggatttaaggataagaaaaaagaaacacttcaggttgacgctgggatattaactctggtaacgggtgatgctttgattggagttagggaacgtgagagaaggattaatgaattttgcagcaaagttacttcatttattcaatccagtacagctggcttttaggtgtctgcagaatagatcactgaatatgtccaataggaagctggaaaactgactatagagaaataagatggaggagagaaagtgaaggaaataattgtacattttttttcaagtattttgaagatacaattgggcaaaaaatgatacggccatggctgtaagatgtatatccaaggtaggttatatttgtaagtatgtgagaaccataaacatatttcagtatagatggaaagaaaacagtatgaagcggacaattcaggaaaagtaatcgaattgtattatgagatcttttgcaaaggtaaaaggcaatgctgcccaggaggcacctgtggaacttggcttctgacagaaggagagaattcttctcattgttacaagaaataaaaaagcagtatcagaagggtgtatattaggtccagttaagatctgcataaaaaaacaaggtatttttatttgatggcagtaattttctctgtgactagaaggcaagactgaaggtgtgctggtaggatggcgtcttaagaagcaattacttggctttgcagacgccgccgccgaggaaaaccgtgtrctattagccatggtyaaccccaccgtgttcttcgacattgccgtcgacggcgagcccttgggccgcgtctcctttgagctrtttgcagacaaggtcccaaagacagcagaaaattttcgtgctctgagcactggagagaaaggatttggttataagggttcctrctttcacagaattattccagggtttatgtgtcagggtggtgamttcacacgccataatggcactggtggcaagtccatctatggggagaaatttgaagatgagaacttcatcctaaagcayacaggtcctggcatcttgtccatggcaaatgctggacccaacacaaatggatcccagtttttcatctgcactgccaagactgagtggttggatggcaagcatgtggtgtttggcaaagtgaaagaaggcatgaatattgtggaggccatggagcgctttgggtccaggaatggcaagaccagcaagaagatcaccattgctgactgtggacaactcgaataagtttgacttgtgttttatcttaaccaccaggtcattccttctgtagctcaggagagcacccctccaccccatttgctcgcagtatcctagaatctttgtgctctcgctgcagttccctttgggttccatgttttccttgttccctcccatgcctagctggattgcagagttaagtttatgattatgaaataaaaactaaataacaaacaaaaaaaaagaagcaattacttagaaaatgttgctgaaaagagagcatacaaagtagactaagagaaggacttgttgggcaattttaagaccccataattagtgagatttgagtctccaatacgttttgttagattttcttcatcagaaggctgtagcccacataaagatttttttttaaaaaggaatataattcaccaataaggttttgatttaacctcagaattctctgtgatttccccccataaattactattgtgaattctgttttaaagtaatatttaattatcacatacaaagctgaccttaacattatttgctaaaatataatttctagaattaccttcatatcacatatgtgatggttaattttacatgtcaacttggctggatcacagtgtgtagatatgcgatcagatattattctggatattttgcgcggatgtttttgatgagattagcatctaagttggtagactttgagtaaagaagattgccctccataatgcatgtggggcctcacccaatcaattgaaggtctgcatagaaaacaaggctaacccacgttgaacaagaagtagttctgccaggagacagctttcagatgtgaatggtaacatgggctcttcccagaaactccagcctgtcagcctatcctgcagattttagacttgccaacttccacaactgcatgaaccatttccttaagatacgtttctatatatatatatatatatatatatgtatatatatatatatatatatatatattattatatatacacatatcccattgattctgtttctctggagaactccaggtaacataaaatatttacaatttgcttacacatctgtttcttcatttttggatttatttcacttgcttcattttgctaatttttcttttgtgtgtggaagaatataaatttccttgagaggctgaggtggaagaattgtttgagcccaggagtttgagattatattgagctgtgatcatgctactgcactccagcccgggcaagagagccacagcctgtctcttaaacaaaagtgaatttccatttagaaacattttactaattagtgaaagaaatgttaattgtctattattctccttaatattatccttaagcagaagatctccaccaaattgctgtaacatttttaaagtgttgttttcattcaagacagaaaatctttccagatttctctctgtgttttctttacgttatttaaaaatgctcaattttataatttatttcaaattatattcgacaaaatttagctcctacttttaaagaccaaataggtcaacagtgttgattttgcagtattctttgaatgaattactaaaatatttagcatatgccaaagacatctggcaaagagattgtataaaaataaatgttcagagacggaaaccaatgttataaaactgggccattcactgggcatgtataagcataagcacattttcatatattttctgtttccataattttatgaaagtaattaataatttctccagtaacaactaataatgagcaatggtacagagaccaatgaattattgataagaaaaataatttatgagaatgcatttcctattttgtctacttaattttgctttgaaaattctcaatcttatagaagcatacaaaattcagcagaataatttatttcagtcacaaaatttctcaaaattaatttaaaaaataaatgtgtctgagttaaattaattttcatcagcattaaacctgataaacaacatggcatgtttaatttatgctttgattttttatatagcatcaagtttttagaccaaataatctgttaattattgtaaattatatagcactttgcatattactcttttgtgtaaaatcattcacaagctatttttttgaagtattcaacttttttccattagacaccttccaaaaacagccatttttatatggcctcttaagttttcccattattcattatttaattagcttcttctttttactttgaatctattcattaatttatgattcataagtttgaaggcagaaatattgctccacttatcttttgtcctggtttctaacgattaaaaatttgtccttattcatagtagtcatagccttacaacaacttaaggcctaagttattattaccttaatttaaagatacaactttattgtttaaatcataaaacattcttataaatgcatgtggggtatattttccccaggttttctcaagaagtagataatactttgttagcaacattggtatacgaatattgacatccactaacttaccaagagaacttgaacctctacttagaaaagattatttccaaacaatttgatagtatttctctaatctggtttactttatctttcttctacttctgccatcttcatgaggacattagcattattgttccctcagctattaaaaaaagtaaaattttaaattaacaatcaaaagaaatatgccatttgtgggaaaaactatttatttctattcttgtcacataacactttaaaaaacacaatggtttcaaatcatgaaaccacctggtatctcttgcacgtagctcaatcactcacatctaataagaaccaaatggcatggtggcaggtgcctgtagtcccagctacttgggaggctgaggcaggagaattgcttgaacccgggaggtagaggttgcagtgagccgagatggtgccactgcactccagcccgggcgacacagggagattccgtctcaaaaaataaaaagaaccaaatgaatactttttgtataaactaagtttatagaattttagagaaaatatgtgtaaacatctttgtttttttccacagaggtagtcaatagtataaaaagtgcattaaagatattcgttattatattagagagtaaaaatgtaaaacattgaaatccattttaaagaaatattaagggcttttatctacaaaataacttgtattattttctttgaaataaattaaaattagcaggactttttattagcttttatttacttaaaagttagtgggcactttttaattcaaaccacaatttaaaaccagcatctaaaacagatgaggagtttggggaaagtatattaatgtacccttcattccaatgaaaagtatgtttccacaatttattttacctattcttttcttttgttagtaggctcaaatatgtcaatagatataattaaagtttatatcacagtaatagcactgctatagagtctttgtataggagagtcaaaagagacactttgatgaggatatgaaagggttgaaaaagctctaaatagctttgtttacaaaggaacagactaaataaaaaggagacattagcttgtgaagaacatggttggaaccatttgaagtacattatttatttaagagaaaagaatagtcttttaaaatttatttttaacccaggttaagtgtcttaaaaaagaaaacaaaataacttcatctgctaaataggtgaaaatttcctataatattatttttggcattctagaatttttttccactttctactgtatcacaacttattttactttacagtgatcaattccaatagcatgcaatgtaaggacgattatttttctgtcttaaaaaagtcttttctcttaccttgcttttctcaccatgcatttcttgtttgctccccttagcagcaaaacttcttgtaaaatatgcattctcttcaattatttcattctctcttgaatctgttcaacttgctctcacctccacccgtacatggtaactgctacaccttcattttactaaattagctcttcctttcccttctcagttccacatcaatatacattcagcagcactcactccaccctgcttgaatgaatttccttcgcttggcttgcaagactccaacatgctctctcagcttccctgctgccttgctgttactctagctctctcttactggttcaccctcttcctccaatctctaaacattcagtagttagcggtagggctagcattaaggttagggttaggattctgcctttgtgctttctctcttctaggtagcctcatacacttaatgatcccatccagttttacagctttacatacaatctctgccaacaattcccaaatatatacatccagtatgtctcccttctgaattccagccccacgtgtgccagttcaatatccatgctttgacgattagcaggcatctcagagagaaccaattaacccatgaaaaattaaaccatgatcttccattcccctaaatctgctttcccccttggtgatttcattgctcaaggcagaagttcagtcttcttttcctgccatatgccacatcacattccccaggaattaaaccttggctcttccttcagaatacattccaaactggaccaactcttactctattcaagtagcatttcttacctggaagacttcaataaccttcaaaaaagtcttcatttgtttcccttcacctctttcagtctattcttaacaatatggaaaaatgatccttaaaaaataaagataaataagataaactgacttgaaaccatagtgtcaagataaaattccaatacaacagaatagatatgatctcacccagatcctatgactttgagaagatgtctggataagatctccacacactgaaagccataaccatttattggattctgtagtcagatatcaaaagtgttagcatcagcttatatttttcaaaaagcagaaacataaaaattagagagttaatttacattagctgcaaaggtaaacaatgcaaattaaactgtcttcattataaatttattatttttattttaattggtcactgagaaaactgacctgatggagctaaaagcatgtctttggccagtttctcattaagttcaagtctgtatgacattmtgaccttcctttttcttgacaaagttagaattcaaggaaaatactagaaattctgctttctgattcatccatgaaaaaatgtgtctcaattattgtgccaaacatcagcacataaacttaaacaaatctttgacatatagaatgtaacctacactatgacatcagtattgtgttaagaaatgaacccagttttaagaaaatattgtatcattattatagtgctaactaaactttaatagacaaaagttgatataaatttaaaaacaagattcaatgtcttgttgacattacatgagagaagcagtaagctctagagcgaggataagtttgtagtcagaagatctggaattgtatactagttttctactctaggagaaagaaaatataatatgatataacttttcttatctgttttacataactcataggattgagaggagcaatttaccattaattttggaaaaataatacagttgtaacagtttattatgtaagtgaatattatatctaagctttctttaacttttgttttaggcttagggtacatgtgcagttttgtaatataggtagatttatattatgggggtttgttgtacagattatttagttacctaggtacgaagcctaatacccaatagtaattttttatgatcctttccctcttcccaccctacaccctcaagtaggccccagtccctgtttttcccctctttgtgtctatgtgttctcatcatttagctcccacttataagggagaacatgcaatatttgattttctgttcctgtgttggtttgctaaggataatggcctccagctttatccttgttactataaaggacatgatctcattcttttttatgtctgcatagtattccatggatgtatatgtaccccattttctttatgtaatctgccattgatggatatttcatttgattccacatctttgctactataaatagtgctgcaatgaacatatgtgtgcatatatcttcataatagaacaatttatattcctgtgagtgtatacccaataatgagattcctgagtcaaatggtaattctgtttttagctctttg

SEQ ID NO: 93423 - DNA, 45217 bp, Homo sapiens
gctggctgtggacaggtggaccgagaggcagagggagccctgcctgggggctctccctccagcccatagtgtcggtggcagggtgagggtggccgacagccctgatgggactcctttccatctgggagcatgactacttccagccttgctgagtctgtgtaggaactggcagaagcttcctcttgcttagaggatggaagaagatcagggtgggtgttttgcgcccactgtgtcaggaggagagaagtgagcgggggtgtttcactaccttgcctgggctttaaatggggaggggcggggagaagctggcaatggaccctcacttgacgggcccttctgtgagctgggggctttggctttcatggcatggtcccccgcacttggtataaagcgcaaggctcctgtgggtcctaggactcagtgctgctaatcagatgttcttaattagaatctgattttgtgtaattttcagtaagaattttagacatttcagtttatcttctagactcagtttttctctcagttaacattttagctttgaatctgcttttgtgagttttgttaggggaagcttgctgaaccgtaagggctgtagtgagcatacagcaatgcctcttccatgcgtgctgagctgcagtgaggggacggacaagagccaaggtgtgaccaggtgatgtcgctagtgtcagggaacactcatgccagtgaggatcttcccactctctgatgaaaactaacaggctcccctctctctcgctgtgcctgttgtgacaaccatgacagctggagatggaggacgaggacaccatcgacgtgttccagcagcagacgggaggtgtgccggagagcagcctggcagggcacagtttctagagggcccgtccccagcccgggccgtccatcctcgcattgctgttgaatggtgagcacgtgaccatgccgaccacaaaggtgtctgcggaaactcgaggacattcaccacgatgattttcctctctttgatgtacttcaagtgcaactcaaaactatatctgcagggatgaatctgtaacttaaattgggccaatcagaattgttatctttgttcaggtaaaatgagttgcaagatattgtgggtacttttgtgtgctcatttgtgttttccccccctcctacaacatttttttaaccccaaaattatagcctgaatgttcgcttttagtctggccagggatctgactcctgagttggttgcctctcccctgctcactccagtcacatagagaattggtgtttcccgcagtggggatgcagctgttggacaggtattgggggcaaggttggtagggaggacagactgtcacttgctgttacaggcacaggtgattaaaatgctaaatattgcaaatttaagctttgtcagtatatggaaaagttgaagggaaaatactggaatgcttcttcaaaggttaaaaaataaccgagtcttttggtaatttgaccccacgtgctctctggccctcaagcatgtaacctcggggtctgaggcccaggacccacccccctgccacccctcccaccccactccctgctcagtacctggcgttggtacacaggcaaggattggcacaaccaaaattggcctttttctccctcttaatattgaagaaattcccacatttctcatttggtaatggtgttgtggcctcagatttcttctagtatttgcttctgatgaatgattatggtctatacataaaaaagtaagactaagtattgctgaatttgcagttatgttgtcgtgtataagagctacttccaagtgtggttacaaatgaacccatggaatgatgacttcatgttcttctcgtgggtttgtgccgtgctgctttccaaataggtattgaatttatgcattagtctggtgatttcagttctgtgaaatattttgggatctataccaattaaacattttcatagttctgcctattgtccttccctgaggctccattgctgcttggtggccattctctgcctttttacagtcacctgaacaatgacccatcatctcttgcttgcttgaaatcttgctgamatgttctcatttcctgtttgctgtatgggctcgggtgggatgtttgttggctctgttgtgtttattcaccaatttgtacattatttgttgtcctttactactgtaaacagtaaatatagtttggtattctgtctcttggcttctactaaacactgcatttgaaggttggggcatactggtacaattcagtgtttgaattgaccattccaggcagccactgcactgagaaactttgattgaaaagctagccgctggaaggttagtattcgcctggcagctcatttcccctcccctggcacatcaccaatgctagtccagccttcttcctgctgagggatgcatcctctcctcagagacctcctggctgacagctgtctgagctggcatcactgtgacatgttaccctccctctcctgggtttcgtatgtaaagaaagggtggattttagaggcaggtgagcttgggtgttagtctaggacatctctcgttttctggtgtttgaatgtaagtcagctttccttctgccatggacaacttacctatctgctttgaaactgaactgacattgatttggctttaagaatttcccagtgtgcagtggtgtaacaaaacccaggttgaaaatgagctgttttagcccatcagttgaatgaacccaaggtgaagaaagatgggcagctgtggagatggaacacgtgattcacttgcaccaggaagagtgcacggattaaggcacaatacaggatggggacatctgccagattccctaggcagcctggggcgaagcggctgccaaaatcaatgaggaaagggatgtgtcccaggcaccgtaggttagataagaataatggccaggagcatatgtggatgtattagggcagcgctgcttgaacttccacccacaacacctcacagcagaaccagcaggatgtcctgtctttctaaaaaagatttgtagagatggagctctcactatattgctgtattagtgcatcctcacattactataaagaactacctgagactgggtaatttataaagaaaagaggtttaattgactcatagttctgtaggctgtacaggaagcatggctagggaggcctcaggaaacttataatcatggcagaagaggaagggcatggacacaaatccaaaccataaatcagttgcccaagctgatctcagactcctggcctcaagtgatcctcgtgcctcagcctgccaagtagttgggattacaggcatgagccatggtgcccagcaaaggtatgttcttgaagttgtcttttttctgagatttatgcaratggtgcatttggaaaaatagatctgttgggattactattttcaacaagattacttatgtgaaactgactccaagaatctttgggttaaattgatgctcctggaggagagaggccctatttatcctagtatctatgcctggggtcccaactggaacttctccagtttttgcaccgaaaggttcacatcccaggaacccccactcccagggaacttgagttgtcatcttagccatgctgcaggagtgcccagctggaaacgcgtgatgttcatgggaaaaccccaccgtataacatgggttaagctgtgaggtcctttttatatttcagaactttagttgctaaagatagaaagcattaattttattctgtacagttggcctccccagggtgtgctgccctgcagtatcacacactggctgctcagagtccctgggactccactaccacttgatccaagttgagagttccacgagttagccagttaaaacataggatgcccagctaagcttgaattccacataaggtactgaacgacgtccctgaaatgttgcagagagcctggttctctgaagataaggtgttgtaacagtcctgttgaggggagagactgccatcttgtttcagcaactcatatttcaagtgacttttgtcacttgaagctgaagctaatcctgatagaagctgtaaaccacatttctgaaaaataataattggaaaacatacagtgttctgcagtaagatgtctgaaaaagatggataaaattatgaaaacatcaagcatatgttgcagtgaacatcacggcattgacagtaatgctttattgcccacatctcccataactggaaaaggggagctgctctcctttaggagcactggacagactgccttggggtgtggggtgctgtctgattagagagagagcagctcttgaatgggggaggaaacacctccactgtgactttttgcacattgcatttgcacaaattactctctgaaacagtctcaaaggaccatgtcattttataaagcactgtggtcatttgaaaagatggaggtagactgaaattttgaattttggggaattttcctacactatgcatacttgtgaagtttgtrttgttaaatttcatttgatttgacaaatccgtgttaagagtatacgatgtccaggtacagaggctgccccagaaacaagacagaagtaggcagggacccatggctctcatggaacacgcttttggttagaggcaacagataagggtaatacatttatagcatgccagtaagttctatagtacggtgtgttgagtaggtgttgcagagaaaaaggtatgcggtgaaggccgggtggtgacggcctaggccacactgaagaggcaacatttgagcaaagactgaaagagcaggtgggaagagtcggggacaagagccgccagaaagtgtttccggggagggaagagtcagggactctgaaccaggccagggcagctggagtggagtgagagggagggagggtctgggagtatggcggggtgaccggaggcagagcaaagcactgcaggacttcagctttactgagtgaaatgggcggagcagagtgtgaatgtgatcagacttcttttcaagggatcatctgcaatgctggaaaggaaaagacaaatgatagattattgcaacaaacagccaggcaagagatgcaaactttttttgcaaaggtgtgtgtgtatatacatccttgcaccggacagccacgaagcacctactgtgctgtgaagtcagtaaggatgtgggttaaaatcgctcacctcacagcgggtcaatcgggaaagcacacccactcactacagccattatgggaaaaagggctcgcyccttacaggatcctcaactgtggagaggccgggagcccacgcggggcgctggggagtctctcagcaccccaggggttcgggcagggacctgagccgcgccctctctcccgggggtgccctggggtcgaggctgctcggcagagccggcggtcagttcgagccgcgggcccgaacagggctctccccgcggctctctccctcggagtagaaggtgctggacccgaactccagcggagccgcacaacacgtggaggaaaagcgccaggacagctaaccttcccaccttttcaaacctgaaacccggccggctggggacggttggaatgttcagtgcgtacccgcacctcaggccccttgtctccagccccagaccgccccgcgaccatcctccccaccccccgacctcttatctcgtccccgccctgtctccccaacctccatcctcccctccacaacccccgtcctcccgcccttcggccacgcgcggctggcacagaacaggcagttagcgcacacacactggaacaggcgccaccgttcaggaagtctctacaagaccaggaccctgaggcctctggaagtgccgggaccgaaccaaccccgcagagcgactaaggcgagggcaggagccaagagaaccgtagccgcggtcgcgggttgagctcccaccacccggacagcgcgcctcggcgatcgcgcacgcgccacgccccggaagagttcctgggcccgcgacggtggcccggaagcagtccccggtgtcggggcaggaggcacgcgcgcggctgaggcgaggtcgctcggcgcagctgttgcggggccatggcggggaccgcgctcaagaggctgatggccgwgtacaaacgtgagtctggggacccgggccgtcagcagcgtcccgcgttcctgctcccgggcccgcgtcgtccggcggggctggggcagggagcctggcgggggagccgggcccggggcctccaccgtgagcccccctgtgggtcccgcggagtgccgcgccctgcgcccgctgcccactctcacgcgtgaagtcgtgaagagaagccttcccagcatcagtaaaggcagcgccggcgccgtgttagttgagagcacacacagttgagtctttgcgggcttgtttttttctcttctattttttcttttcttggcagccttgagaacgtgcagtgagagcttgaggaagaaggcctgacttgctgctgcggaattaggagggaaaagtgtatgcgttaaaaggggaaaggctcgttggtggagctttgaaaggtcagattttggctttccctctaatgaaggaraagggtttttgaacagtgccacctgtcactcctcctaggtagtgttgaggaaacctcttgagtgctttcctacccggtaaattagatatttctaatgtctgaggagagcgaagggagaaatgagaacctaggaacactcggcattccatcgttttacaccgaatgcccgcttggaagaactgctgcgagaagtcttggaataccattgtgttgaaagcgccaggagcctgagtcgccgatggagacgagatagtagccggctaagagcagggcctgagttcagacccggcctctctgcttgttagctctttgaccttgttcctctctctgtctctgcagtttccttgtcttaaaaggttaaacttgatactgcaggtgaagtgcttagcaaaatacctgatgtgtaacccttaataaagttagctgctgcttttgtaattagattgaggataattttggaagaaagttaagctaaaagaatgaawgtgagaaaaaaaataagtggtgaatatacatgtagcttgatttcgtaaaactattggtgacaccgcccagtragagttgatgtttggcttaagcagaccaaaacgttgcaaatacaggctcactcacgtatggtcattcttcccttggtatctggaggggattggttccaggccccgctgcagataccagaatcctcggatgctcaagtccctactataaggtggcgtggtatttgcatttaatgtatgcatagcctctcataacttttaaatcatctcaaggttacttatagtacctaatgcaatgtaagtgctgcacaaatagttacactgattttttttacttgtatttttaaatcgtcattttttattgttatttttttcaaatattttgtattcctggttggtcgaatccatggatatgcagccgcagatacacagggcctcctgtaaacgttcaaataacgctcgccacctagtgtctgctaaagcagaacataaaggcacacctcagtttcccrcgcgctttgctttattgagcttcacttcgcagatcttgcattttttacaagtttacaagttttttacaagcaaccctgcatggaagcaagtctgttggcaccatttttgctcgcttcgtgtctctctcttacattttaatctattactgtgatctatgatcagtaatctttgatgttactattgtaattattttggggcatcacaaactatgcccataaaagatggtagtcctaataaatgttgtgtgtgcttcactgactggctgtttccccatctctctcccggcctctctcttccctgagacaaaacaacattgaaattaggccaatagtaactgtacagtgggctcaagtgttgaagtgaagagttgcactctacccacttcaaatcaaaagctagaaatgattaagtttagtgaggaaggaatgttgaaagtcaagataggctgaaagctgggtctcttgttagccaagttgtgaatgcaaaggaaaagttcttaaaggaaattagaagtgctgctctgttgaacacaatgaatgataaagtgaaaaagccttactgctgatatggagaaagttttagtggtttggatagaagatcaaaccagccataacattcctttaagccaaagcctaatccagagcaaggtcctaactcttcagttttatgaaggctgagagcagtgaggaagctgcagaagaaaaattgggagctaacagaggttggttcatgagattgaagtaaataacctgtctccataacagaaaagcacaaggtgaagcagcaaggtctccagaagatctagctaagatcaagatgaaagtggctcctaaattaagcaatagatttacaaggtacgtaaaatagccttatacggtattgggaggagatgatgccatatacaacgtaaacagctagagagaagtcaatgactggcttcaaaggacagggcgactcttgttaggggctaatgtcrgtcactttaagttgactgagttgaagccagttctcatttatcattcagaaaatcttagggcccttaaaaattatgctaaatctactctgagctctagagatggaaaaacaacctggatgacagcacatctgtgtacagcatggtttactgaatataagcccactgttgagacctactgctcagaaaaaaagattatcttcaaaatactattcctgacagtgcacctggtcactcaagagctctgatggagaggtataaggagataaatgtttttgtgcctgctaacacaacaccaattctgcagcccatggatccgggagcacttttgacttatttaagaaatacatttcataaggccatagctgccatgaaaagtgatttctttgatggatctgggcaaagaaaatcaaaagtcttctggaaaggatttatcattctagatggcattaagaacatctgtgattcatgggaggtcmccatatcaacaacaggcgtttgaaaaagttgatttcaatgctcatggatgactttaaggggaggaagcaactgcaggtgtggtagaaatggcaagggaactggaattagaggtggagcctgaagatgtcactcagttgctacaatctcatgatcaaacttgaacagatggggagttgagtcttacagatgagcaaagaagtgattcttgagatggaatctactcctggtgaaaatgctgtgaacattgttgaaatgacaaaagattgagactattccataaatttagttgataaagcagccgcagggtttgagggtattgactccagttttgactgaagttccactgtgggtaaagtgctgtcaaacaacatcacagactacagagcaatcttttgtgaaagtaagagtcagtccctgtggcaaacttaattgttgtcttattttcagaaactaccacagccactcctgccttcagcaactaccaccctgatcagtcagcagtcatcaatatccgggcaagactgcaccggcaaaaagattatgacctgctgaaggctcatatgattgttagcattttttagcaataaaaattaagcatattttggcaaataataattatttatttatttattttttgagacagggtcttgctctgtcacccaggttggagtgcagtggcacaaccacagctcattgcaagccttgacctgggctcaagctatcctttcacttaatccacctgagtagctgagactacaggcatgtgcccctacacctggctgatttttctgtcttcatcttgacctccctctatgttgtcagggtttggcgaaagtgactccattttgattctgacaatgttcatactcgaacagagggttggatgtgggggactattacttctgtgtcctcatgggaaacctggctggtgggtcagatgtgtgaacacctaccatttcttggtatcctggtttgtgtttgtgtctctgttttagttttattttagccctatttctagggttaggctagactgtgagcaggtattttctctttttttttttttttttttttttttttgagacggagttttgctctgtcgcccaggctggagtgcagtggcgcaatcttgactcactgcaggctccgcctcccgggttcatgccattctcctgcctcagcctcccgtgtagctgggactacaggcgcgcgccaccatgcccggctaatttttgtattgttagtagagacggggtttcaccgtgttagccaggatggtctcgatctcctgacctcgtgatccgccagcctcggcctcccaaagtgctgggattacaggcgtgagccaccacgcccggccttctcatttttattgagaagaaaatcattaaacccctgcataggaaattaagttcaggctgctgcttcaggccagtctttgcattgttgaacttgcattttctaaggatatttgcattagcaaagatatgttctcccttttattgtcctgacagaagcttcatctgttatttcaattatattgtcaattagtttgcagtaataagacctaaataatggttgatttccgaaggtttgtcacggaagtgtgttgtgtgtttttacatgttaacatgaaattttggactatgtgtagaaggtagaactctaaacatacctcactaagattcccatgcccttgttattcaagcactttctagtacttcggtggagggactttggagatgcaagtcaggttagtaatcagcagacctaaagagtgggagattattctggattaccgtgaaggatccaataataacataaggctcaaaagcagtcagtgaaggcaggatgggggtggtcagagagattcaacatatgacaagatctctaccttctgtggctggctgtgaagatggaagaaggagccatgacctaaggaaggcgggcagcctcaagaagctgagaatgatcccagaccaacagacccgtggaagtgaattctgtcagcaacctcaatgaacttggagtggcagccctggtgagactctgagcagagaactagctggcccatgctgtgtccagacttctgacgcttggaaactctgagatcatcaatgagtattgttttaaatcactaaatttgtggtaatttgttacagcagtgacagaagatgaatacagtgtgttattgaggggactttgtttttcctgtatcttaataatgtgataaaatttagtgggttttttttgtgtatcatttactggttttttttgtgtgtgtatcttaacatctagtttgtcctcataacgtattttaaggtagcacattccagtgtaaaggtggacttgacagaatcaatctctacatagaaggggtttagataaatttggttagatgttcatgcacactttattgtatttgggagtagtcatataactgcagaaattcagaggtggtgggaccttggctatgattctgttcaagccccctaattttacagattttatggaattgagcaacagacaagatgattttgcctaggttcataaacaggaaaaaaggagagccaggaaagaactcaattgttgtaaactgctgtcttgtcttgatgttctgtcttcattcatcatccagcctttcctaggagtgtcagagatagacccaggtagaagtgggctgcccatggggggcttagcacaacagaaatttattcttttactgttctggaggccagacatctaaaataaaggtgttgatggggtcattcttcctcttgagggctcgaggggagaacccttacttgcctcttccagctaatggtgattgttggtcatccttggcgtttattgtcattctcttgcttgaggtagtgtaattctaatctctgcctccatcttcgcatggccatcttccccctgtgtgcatgtcctaaatgtacatgtctttctgtggatatatgcttttatttctcctgtgtaaataaccagggttataatgggaagtgtrtgtttaatttttaaagaaacggccmgttttcctctagttcacatttccctagcagtgtattaagtgttcccgttgccccacctccttgctgacacttcgcgtggccagttgttttttgttttcttttttctttctttctttctttttttttttgagacaggttctcactctgtcactcgggctagagtgcagtggtrtagtcatggctcayggcagcctctgcctcctaggctcaagcaatcctgccacctcagcctcccaagaagctgggattacagttgcatgccacctcgcttagctaatttttgtatttttagtagagatagggtttcgccatgttgcccaggcttgtctcgaactcgtgggcccaagcaatctgcccgtcttggccttccaaagtgttggaattacaactgcgagccactgcgcccttccagttttaaaaattttagccattctattgggtgtatagcagtcttactgaggttttgttttatttatttatttttttttattttttatttttgagrtgctctctctgtcatccaggctggagtgcagtggcatgatctcagctcactgcaacatctgcctcctggcttcaagtaattctcctgcctcagcttcccaagtagctggggctataggcgcgtgccaccacacctggctaatttttgtatttttagtagaaacgggatttcactatgttggctaggctggtctctaactcctgacctcaggagtttgcctcgcctcccaaagtgctgggatttacgggcatgagccacagcccccggcccttactgaggttttcatttgcatttccataagactcgtgatgttgagcatcatttcacgtgtttatttgccatccatatgtctttttagataaagtgacttgagtctttgcttctttcaaaattgtgttgattttcttaagttttagttctttggctgggcgcagtggctcacgcctgtaatcccagcacttygtgggctgaggtgggcggatcacgaggtcaggagatggagaccatcckggctaacacggtgaaaccccctctctactaaaaatacaaaaaattagctgggcatggtggcggacccctgtagtcccagctactcaggaggctgaggcaggagaatggcgtgaacttgggaggtggagcttgcagtgagccgagatcacgccactgcactccagcctgggtgacagagcgagactccgtctcaaaaaaaaaaaaaaacaaaaaaagaagggtttttattatttcgatgaaattcaattattgacttttaaaatatttcttgctattgtgttatatttaagaaataactgccaaacatcaggtggcagtaggattttctcctatgatttcttctagatgttttatagtttcagctcttgtatttaggtttgggatccatatcaaagttttccatatggtatgagataaaggccaaggtttatttgtaaattatttgtaaatggcagtgcagttgtttcagcactgtgtttgctagggctgctctaccacacaggctgggcacggcttaaacaacagaaatgtatttcctcatagtcctggaggctggaagtccaagatcaaggatagggcagggctggtttcttctgaggctctgtcctctatgcctgtgtcctcatctcttcttaaaaggatattagtcagattggattaaggtccaccctaatgaccacattaattttaattacctcattaaaggccctagtcacacacttttctccaccttcttttttttcatgtaatatgtcctgaagtttgttctgtactagcatgtagaggtatttatagctgcaaagtaccccactggtatatgtatcataatttgactggtcctctgttgatagacactcaagtyctttttaatttctttttgtttttacaaatagtcctgaaatgaatagcctgtgtatacattttttatcttcaccaatgttatctgtgggatggattcctagaaatggaattgctgggtcaaaggttatatttcactttgtgtggtagctatttgttaagccactattttaagtggcaaggaatggcctctgaaaatttccctgataccaagattcgtctctttttttgaacttgtttcttatcagtaaacatgaaactgtatattattttgtgtrcgygtgtatatgctttggaagcaaaaaacaaaatggaaaaaatcmagtgccctgaaccattccctccagcctctgaactcatttgctgcamttctttattgaccagtagaggccactgttgaataacaaagctggcgggaaggccagcgcacacccgggcaggtctctgtgctgagcctgcattgccaggagcaggtctggagctgcagtttttagaccaccctttcccctccctaagggagggtgtcacgcaggggagtgccaaaggggaactccagatgaagaataaagccagctctctttggtacgagctcttcttcatggtcccacgaaggtgatttgtaaagcttttgtgtgttctgctgccaggcctctacttagttgcccactgacattgtgtttctcccgcaccccacctgcttagcagtttacagtctatctgccktaatctgttatttttttcttataattaggcggtttggcttgagacacaagaatgggactagattttagatgactgggtgtaggaagcctagcaaattaggttctgtggttatttctcctgatctactccacatgaagagacacaaagggagaacatcagggtgtggcttgtgaaatccaaggtcttagtcggcttggtacttgacctcattcacattcagttcccacccacccctgaaatgtttaatgcacttggcccttggggccagcacttgcctttggcctgccttgctggcccctccttgccactctgccttctctcactgctgggtgtcagcacacccttgtgacagcacttaggtctcttcaggacctctgtttcctggatcagggcttctcagcaggtgttagtggtattttgagtgaaataatttttccttgggtaggccttgttctacccaaggttgtgggttcattaaacggttaatcggtacattagtccgttcttatactgccataaagatactacctgagactgggtaattataaaggaaagaggtttagttgactcacagttctgcataactgacgaggcctcaggaaacttatagtcatggcagaaagggaaacagacctcttctcaaggcggtaggagagagaagagcaagccaaggaagaacttgccacacacttatagaaccatcatgtctcctgagaactcgctatcacgagaacagcatgagggaaactgcccccatgatccagtcacctcctaccaggttcctcgctcaacactttggggattacaagtcaaggtgagattcgggtagggacacaaagccaaaccatgtcatttctccccctacccctcccaaatctcatgttcctttcaaaaccattccatttcaaaacaaatcatgccttcccagcaaggcccccaaagtcttaactcatttcgtcattaactcaaaagtccaagtccaaagtctcatctctgacaaggtaagtcccctctgcctagcagcctgtaaaatcaaaagcaagttagttactttcaagatacaatggaaatacaggcattggataaatactcccattaccaatggaagaaattggccaaaacaaagggctacaggcccccatgcaagtccgaaatccggctgggcagtcattaaatcttaaagctcaaaatggtctcctttgtgaccccgtgtctcacatccagggcacactgatacagggagtggctttcatggtcttgggcagctctgcccctgtggctttgtagggtacagccctcccacacccacccccttcagctactttcatggtgggcattgagtgtctttggcttttctaggtgcacagtgcaaagctcttggtggatctaccgttctggggtctggaggatggttgtyctcttctcacagctccactaggcagtgccccagtggggactctgggagctccaaccccacatttcccttctgcaatgccctagcagatgttctccatgagggccctgcccctgcagcagatttctgtctggacatccaggcgtttccctacatcctctgaaatgtaggtgaaggttcccaaacgtcagttattgaattctttgcacccacaggcccaacaccacgtggaagctgccaaggcttggggtttgtactctctgaagcaacagcctgagckgtaccttggccctttttagccatggctggagctggaacagctgggacacagggcwccaagtaccaaggctgcacagagtagcagcggggctgggcctggcccacaaaaccatttttccctcctaggcctccctgcttgtgatgggaggggctgctgccaagatctctgacatgctctggagacatttaccccattgtcttggcgattaatatttggctccttgttacttatttgaatttctctccagaaaatgggtttttcttttttattgcaccgtcatgctgcgaagttttcaaacttttattccctgctttcttttaaacacgagttccaatttcagatcatctctctcaagttcaaagttccacagatctctagggcaggggcaaaatctcaccattctctttgttgaaacatagcaagggtgaccattgctccagttcccaagaagttcctcttctctttttcagaccacctcagcctgggcttcattgtccatgtcactatcagcattttggtcaaaagcattcagcaagtctctaggaagttccagactttcccacatcttccttcttctaagcccttcaaactgttccaacctctgcctrctacccagttctgaagttgcttccacattttcaggttatctttatagcagtacccctggtaccaatttactgtattcatctgttttcacactcctataagaacttccctgagactggataatttataaaggaaagaggtttaattgactcacagttccacatggctagggaggcctcaggaaacttatcatgacagaagccgaaggggaagcaagcaccttcttcacaaggtggcaagaaagaagagtgaaggaggaactttcgaacacttataaaaccaccagatctcatgagaactcactgtcatgagaacagcatggaggaaattgcccccatgatccagtcaccttccactaggttcctccctcaacacctggagattacaattcaagatgaaatttgtgtggggacacaaagccaaaccatatcaatggacatttgggttgtttccagtttggggctattacgaatttagctactatgaacattcacacaaaagtctatggcaacataagacccagtagaattgctgggtcttagagtcaatatatatgtaattttagtggaaatggtcaaacttctttcccaaagggtaaccaaaccattttgcattcccatcagtggtgcatgagagatctacttgctaaacttgccagcactttaagtctttaattttggccattcttttgtgactaaagatactgataatgctgaagctattgagctgtatcttattgtggttttaatttgcattacccttatgattcacaatgttgagcattttctcatgtgcttattwgccatctgttttagtcagttcaggctgctgtaaaaaaataccaaagaccagggagcttaaacaacaaacatttattgctcccaattctggaggctgggaagtctggtgagggctgtcttcctggtttgcagatgactgtcttctccttgtgcccttacatggccagaggcaaatctctcgtttcttcttataaaggcactaactccattcatgagagttctgccctcctgacctaatctcctcccaaaggtcccacctcccaataccacatacattaggattcaacataggaattttggggggacgcaagcgtttggaccacagcatcattcgtgttgactctgacagtggctcttttcaactctgcctccatttttcttcttacctattttgatttttatatgtggtgtgagatggggaaagtttgatttttttttgtcttagagatgagcatcattcatggaaaagactgccctttgcctctgggccatagctctgtgttccctcgagtcagggtctctgttggtacaggtatgcttctgggctttctcttstgccccattgttcaatttaactttgagccagtgctacgttgccttaatttccatagctctgtaaggaaggcttggtaactcatagatgaagctttctgtttattctttttttttttttttttttttgagacagagtcttgctctgtcacccaggctggagtgcagtggcgcgatctcggctcactgcaacctccgcctcctgggttcaagtgatcctcctgcctcagcctcccaagtagctgggactacaggtgcatgccaccatgcccggctaatttttctatttttggtagagatgggatttcgccatgttggccaggctggtctcgaactcctgacctgaggtgatccacccgcctcggcctcccaaagtgctgggattacaggcgtgagccaccgcgcctggccctctgtttattctttttaaagatagtgtcytggctattctggattgtttgcatttttatatatcttttagaaagatatatatatgcctcatattcagcaactgtgccaaactcacttttactaattatctttagattcttttgggctttcctgtatatatggacatagcatctgtgaataatgagttttatttctttttcagtccttataccttatatttatttggcaaggatttattaattttctgtctcttcaaagaaccaccttttggtttcattgatttttttttttctgtatgtttgcttactgttttattaatttccccagtctcactctggttgcccactggactccagcctgggcaaccagagtgagaccctgtctcaaaactaagcaacaaagtaaccagcaggaacagtttggaaagacagtgtaccccttatgtttgcttttgcatttgtaaaaagaaaaagaaaaagaaaagtctatgttttgttggtataaagaactatttgggccggcgcggtggctcatgcctgtaatcccagcactttgggaggccgaggctggcggatcacgaggtcaggagatctagaccatcctggctaacacggtgaaaccccgtctctactaaaaatacaaaaaattagctgggcgtggtggtgggcgcctgtmgtcccagctacttgggaggctgaggcaggtgaatggcatgaacctgggaggtggagcttgcagtgagctgagatcacaccactgcacttcagcctgggtgatagagtgagactccgtctcaaaaaaaaacaaaaaaaaaacaaaaaaactttgtgtagttgttatcagaaccgttattgtactaggtattcactttgggcaaacagaattttcacttgttaatatgcatattctatggtttataggcttatatattttgtaaaggtgttttgttaaaatgacaatgtaacatttattctgtttggtaatggttttacttattaattttatagaattaacactgaatcctccggaaggaattgtagcaggtaaggtaccaaagttaacttccttataatttacttttaattgccaaagttccttcaaagttaaaatgttgtgaaattttttctcaccytacaggccccatgaatgaagagaacttttttgaatgggaggcattgatcatgtaagttaattttaggtgtactagtttttagggytttgctggaagtcagatgtaagaatcacatcagcagtgtgactgtgtccaaaagcatcagctggaaaaaagactgagttctccagtaatgcccagctctcgtctaggctgctggtctgaaagcagagaacctgagcattgatccaaaagaaatgagtgtttccttagagccagtcaaaggtttagttataattatgtaatatatgtattatatatttgagagttttaaggtggtaattttggaatgttgtatgatcgtggttaaaataacctcaaatggcgtaggtggctttggcttccagaagtagccccttcaggtstgaaattttgacgagaaaagggtcctcaaagatgtgtctgaccacaccaggcatgttagcgcagccttgcctgccctgcctttgggccaggacttctttttcttctcctttcctcccagttcgtatcttcgtgtgctgcatctcctttttctgttgccttgtctggacttgttggccttgtgttctttccgacccaagacatggcttagtaagtgagcagtgtggttctgggattcgtggcatttaacttagggtgacgttgcttggaaagagaaacacatggacccctgattttagagtgttctatggccttgactcactttgctttttcttctttctaccttagatgtgcaatttttggccattcttagtgtattttcagcaaagtgaggttaaataaaatttaggaagttgaaatttgtaatcagtctctgttttctttcttttctttttctttctttcttttttttttttgagatggagtttygcccttgttgcccaggctggagtgcggtggcacaaccttggctcactgcaactcctgccccttgggttcaagcgattctcctgcctcagcctccctagtagctgggattacaggtacccaccaccgtgcctggctaatttttgtatttttagtagagacagggtttccccatgttggccaggctggtctcgaacttctgacctcaggtgttccgcctgccttggcctcccagagtgctgggataacaggtgtgagccaccgcgccaagcccagtctttgttatctcattagtgaggtcttttaatttgcagcaaggtcttgggttggattttgttgcattgagaagtgctctagagggcaaggaccggaaaagtgagggctgtgaaacaagtgtgggctctggcttgaagtgatcttaagcttcatgatgcttttggaattcgccagttgcttggatcacattaattcttaatgctctatgggttggtctgagaaacagattgcagctaagtgttgtctgtggaggttaaattgatatgaaaattagtattttgrataaacaaaatgtttttaaaaaatcatcaaacgctattcagatggtacagcacgcctgccatttcctgatcatttgtaatatcctaattgcttgggcctatggcacatgttttttcggtgtctgaaggtttctggaatctgtgtttgtgtgtaatgtggcccccaaggcagttatgagatggatggcgagtcccacagtctgggctgtcctcattagtggactgtgcggctgtatacttgtatcggggcagctctttttatttctgtagaagcaggagatcatatacatgaactgatgtgtaacctgcttgtttcatgtgttaatgcaggcgcacctgcactcatgccagcggggcagcacgcctgctgcagrggcccagagtggcgggaggcctgtctgtgtgtagaggttgaaggcgcctgtcgtgtctgcagttatttgtggggtgttggctcctccgtaggcctatttggaagctcattaaaggaacagttgagccgtccagtgtggttttaaaaaaatgttcattgttaaaaatcgattagggtaactattaccaattttaaataaacagtgtaaaattaaaccaatattttgaaaacctgtcttaaaaagtaattagaactatttttaggtagagcacttctgtgtttgaacaaggctttttgcattagtttggaattcccctgcttgaagatcctagtgagtttgtgggttttggtcctgttccagacccttcacaaacaagaggccgtttacaagtgcacttaaaatgcctattagggaattaactgtcctcccatcgatttgtctcaccctgctattttggcagacatctggccaagtctttgctccttggtgataagtttcttctttttctctttattctttgatggcttccagggccgcctctctaccctagtatttctaaaacccgtgcttgcctcacagaagtcgaacggctgttggtttttgctgttgtgcttgccttaagggccagtgaagaaaatgtcattttagatatctaagcaacaaacactaagtgcctttgatatgttagggcccttgtctgaagatacagacatgtcaaagatgcactgaaatctttaccttggaagaccagggttgagggattaggatggagaatagaacagattagtgaatgagaggactaaataatgagagtccgcaggctgtgtctttaaacaccgggaataactctgctgaccctgccacgctcatggtggagtctgagcctgcaatcaaatcgagcgtggctgggatggcggcacaccaggggatgtggccacygtggctgtgggtgctagcatggcctgctgctcttggcccagtcactttgcctctctttgacttatttggatcaaaacagagaggtttatcagcatcttctagacagatggttacagktcttgcccagctctagggtccatggcccgtgaccccattgccactaagccacggtgacgggggtgtagctgcagagagggtgggtgccctctttcattgatgcacttatgtgggacagaaggagtcctagacagctgttcatccccagtggccggacaaggcgtggagtcccttggcgcttgctgtcctctgtgtcctgccccagcattcccaaatcagctggcttggtgaccttcttgtctggttcatgcctgactgctgtcacctccccagaccagtggttctagaggctgtggtgaaataagaaggaccttcctttactgaatggtgtgtttggggcccagttggtggatggatgctcccaggttctccagctggctcatggcagccagcttgagggctcccaggctgccgcggcttctaccaggagcccttctcacactgggggccagtgtcyggggcacagcagcctccctttatgtccaggtttyttgttgacygaagactgtcacagggcatctcttggcagtattatgccttgctgaaataaacccgagataataaaataggtgtttataatttgtattgtatgtaatctcaccatagcattttcttcaacaaaagtgtcacaaagatccctatatgaagaagttattgccacattcattgcagtaataataataaaaaaggaaacatcactgttccacataatttatggagcatctatatagagtaatgccatgtagctgtaaaacagttcaggtggaattttcatmctggcatggaaagatgtacacaatataaatggaaaaggcggattctagaataataggtctggaaccgtctgtccgtccttccttcctctcctctcctccctcctctctctcttcctttctcccctcctttcttccctcccctcccctccyctccctttcttatggagacatggtctagctctgtcacccaggctgaagttcagtggcctggtcacagctcactgcagcctcaaactcccaggctcaaacaatcctcccacctcagccccacaagtagctgggaccacaggtgcacaccaccacgcccagctagtttttaaaatgctttgtagagatggggtcttgctctgtttcccaggctggtctcgaactcytggcctcaagcaatccttctgcctcagcctcccaaagtgctgggattacaggcaggatccaaggcacccagcctaaacagctttattgagataatttacatactgtaagttttacttgcattaagtataaaagttagtggttttagtaaatttctagagttttgtagtcatcaccacagtccagttttagaacatttccaaaaagattcttatgtctatktgcagacagttcccattcyaacccccaggcaatccctgctctttcctctgactatagatttgccttttctgacttttcctatgtgtggaatcatacactgtctaatcatctgtgcctggcttcttgtacttggcagaatgtatttgcagttcatccatgttataccatgtatcagcagctccttccttttccattccccagttgatggacatttgggcttcctactttttggctcttttgagcaatgctgctgtaaacacttgtcttgtcacactgtctgtgtggacatggagttcatttctctagaccagatatagrggtgtggaattgctggggtgtggagtaaatttgcrtttaatgttttaagaaactatcagactatcttcctagagtagctcaccattttgcattcccagcagcagtgtatgagcattccagtttctccacttccacaccaacactgctgttgtctgataacagctgttcttgtgggtgtaaagtggggtctccttacagatttgacttggatttccttgacgactaatgatgttgagcatctcttaatgggcttattggccgttcatgtatcttctttggtgaacttcagaacttttccccatttttatattcggttgttttcttgttgatggaacgttaagagtttttaaaatatattttgatacaagtccttcattagacataggatttttaaatattttcttccaatctgcaactctccattttgttttcttaatagagtcttttgaaactaaaaagttgttaattttgatgaagtgtgattttgcattttttttcttatatagagcatgcttttggtgttgtatataacccaaggttgcaaagattttctcttatgtttgcttgtagaagttttgtgttttttcacttttacatttaggcctttgatctattttgattgacttagtgtcatgtatggagttaggtgggagtctgtttcattcttttgtatgtggttatccagttgtctcagcaccatttgttgaaaagacagttctttccccattgcataattttggcacctttgtcaaaaatcagttgactataaatgcaaggatttatttttggactctgaattgcattccattgatctatgcctatccttaggccattactacactgtcttgattactggagcttcatggtaagttttaaaattgggaaatttaagtccgccaactttgttctttttcaagattgtttactaggccattgcatttccattacattttagggtcagcttgtcaatttctacaaaatgcctggtgggattttgattgagactacattgartctttagataagtttgagggatattgccatcatatcagtactgagtgctctaatccatgaacatggactgtctctccatttatttaggtgttttaaaattctcagcaatgccatgatacatttgaatttttagaaatccagttttgtagattagagtatgtgaatttatacacacatagagaaaagctggaacaataaccaaacttaactctggttacctcaaggaggtgattttgggagggggagtgagggaggtatttgctttttattttatatacttctgtatttgaatattttccaacattcttttattttcctagttaaataaggtcaaagtttatgttgtaraagtgattgtctatgttagaatatactataaagttcttataattgatgaacttatttagtacactttatagttcaaatatattagatttaaaaattttaagaaacatctatattgcaaaaaataattagggtatggctgtagatgccttttggacaggtttaactatgaaaataattatatggagcaaaagctatatttgcccctactatgatttcataaaatggaaatgttcccccttttcttccgagcagttcttagcattggttatctacctgagtatcgcctggggtgcttagaacaccacaaaacagaaaggaaacacaggggatctctgggtttaaaccagagccagggccctgctctgggggtgagggtcaaatatgtcatcctggtggagaccaagtgctggaggaaagtgcaggaaggcacttccccaaatcacggcttcttacagcctcgtcctcttgctacgagggtattgggatcagtttctatttaactcctcactgcctggcacagccacaagcacaacctggcatagcagagccagtgtcctagggcttttaaagtgcccagtgtgggggctgtgtgtgcagcccaccttggtcctgctgtcctgggcattagtggggtgggaacatcggcaagaagcttttgctgaactgcagagcagggactgaaggaaggagacgcacccaagctcagatgccgggagccctcatgcccttcctgctgggtgccctctgtcgattctgtagcgtaagggaggtgcttatccttcccccagagtggagggtgcccatgaagcagtttgcccttcccgtctccagctcagctggctccagcttttggagggccatcgtcccttagtcatccacttcaggttttaaatactgatggatgagtttgcattctctgtgattttaattctttatcacatgtgcgttggagacttcttgtctatgtgctgtgacaaacttgataaagagaacagcagcaaaagcagtcggctttcccaacacctgcgtgcagctgaagtggcgagcgcaccagttcctggaacaccgcttgccggcgaagctcagggcacccacttgccctgggtgctccataaggcactctgacctgcctgctgcttctcttatctagaaagtaaaaagtgttagaaaggcaatgcaaagaagaacaatctctcccttgagttgagtgtggaaagacagaagaggctgatcttcgcttttcactggcatataagtgacccacactgttgctgaggaatggtcacaactctggaggaggacagtgacaaggcagttgtcctttgtgaggagrgagaattgctagtcaggagtaggccatgggtgttttcaatatttgcytttgtatctaattcacccacaagacagcaaaacagtctgagctgttgcaagcgtgcctcctgtgtagagtgcagggtcattatgatgcttaatctaatgcttgtccttagctcagctccgaaagagtttaggtcatgatttcaatcaataaggcagcataatttgcaggctttgaaaaatttacatttgctttggatatatttgtgtcctccttgttgttgtttcttttgaagattcccaggtgaggccatcttcggtgaaagagaagtgaggttgtctgggagtatggcaataaaacttgtccaaaaacrgcactgtggcgtctcccactcctggctcgggagttgcctggaaggcatgttccatggggtcaggcatgctgctgcacaccactgcccatctgccctcctgtctgggcgccaggcgttctagaaaagagaaagaaatcccagtttcaaaccagtagtaaaccggagcatttgcaaataactttgatatttaagatgtgggcgcacttcaggaaatgtttggtcatgcttctgaggctaggaacgacctggtggattaaaaaaaattttttttaaagaaagccctattatgagaaacaaagaactgttatcaaagtattgagcaaataccatttggctcattccaaaaacactacccagacattttttcttattctggactcagaggtgccagaaatattgagtgctggcaagcattcctgacatatgaacagtgttacttttaaagatagtatctttatgtgcctgacttctgatttcgcagtttgaactgtgttctcttaactctaatactaaattgatctaggaccttgactaagtcatttcatccttggattttccagccttgcttgacagtaaaatgaaaaccacaatccttggtgccctttcatcagagggcgtgtggagaatgaatgggtggtggttatcgtttgctctgagctcttgtactggacaggaggctcggggtggccacgcctcactctgatacatggtgtgtgcccaccctgtgttgagaaggcggggcttcaggaatgtgtttgttcaggccattgcagggggagcagagtaacccaggcttgaggcgtccccaggctgccgggcgctgggtgccagtgtgggccggggggggtactcatccgggcactgtcctctccagcgcggctgttgtaccagtagcaagagctcatgctcgtgcctccctcggtggcgttccctgtgctggtcatgctgaggctctggggactgtcacacagtaccccccccccaccccagctccccaaaacaaagtggccatattcgctatcttcttctgaaaaggtagcaaagacagttttcagaatcaaaatttgtcttttagattgaaaaatcttgtctccatgaagcaatcactgctttgttctcttctgactgttgcccgcagatcagccctgctagggccatgagccgtgctggcatctgctgttgctgccgacagccctgagtgccgcctccaggtgaaagctaaagctcttcgttcagtttctttttgatttttgtctttttcctttaattatagagataaatatttccaagtctgttgttattaatttcactgaaccaagataattttaagatttttaaaacaaatttttacttttaagaaatctattttttaaytgaagatttaaaacgtatatttttttaaattatttttttcctgtgccatatcctggattctttctgaaggcagtaggtctgstgtggactgtcctctgctcatccaggcctcggcccctgcacgactgttctttctgccttagcctttgttgttagaggagcagagctgtttaggaagggacttgttctttcagttcgtagacggagaacgggtttactgacctatttattgatctgatgagtcacacccagtgcaacttccactgtttcgttgtctgccgctgtcattcagcagtcctgcttccttatcaaagaaagatggtgcaagatcttttagaactcctccaatgtgtgttttattaatgtgatttgtaggagaagaggagttcgtccctggtgtgaaggtacaggcatagtggctgacactcttcctctcctgtggccatcatgccttgaactgttggtcaagatagtgttaatttatacttgttgggttttaaaccttaagcaggatttctgaartggtttcatctrtttcttccatttacacgtgaggaaagtataggtccagggagactcagtgcctgtgtctgtgcccatgacggggagttgctccaatgttgcatcagtgggatgaggcacagcacatgggcctgcaggtgcagcctggagtggtggtgcctgtgtgcctagcctttcaccgagcatgcagcagtgatcacatgtgctcttcatctgcttcttgaaggttgcaaagatgccttcttgggcacgtttaaaaattaaaaatcacctttgaaatacaactcttagccccacatctgttgaaatacaatgtaatcttgctataccctgtgccgtaattcatacccttatcctaaaatgtgattgtaccacatctgcagaaaaaactcccagatcttagagcattgacattagttcttttctctgatcyccttcttatcaagaggttctgctgcttgactcttaaccttcataaatgtgaaaactgcctggaattcagtctttgtacttgtacctaagatttagaccagattgaaactggagaatgggacattgctttccactgaaaagaaagtaccaattcattgttacttagataatctttttgtgtgcatttttattatttatttttatttttgtttattttttgagacggagtcaygctctgtcgcccaggcttgagtgcggtggcgagatcttggctcactgcaacctccacctcccaggctcagacgattctcctgcctcagcctcccaagtagctgggattacagtcatgcgccaccacacccagccaatttttgtatttttagtagagacagggtttcaccatgttgcccaggctggtcttgaactcctgacctcagatgatctgcctgtctcggccttccaaagtgctgggattacaggcgtgagccaccrcacccggcctcacgtgcatttttaaagtggtaaaaatgttcttaacccatttgtcaattgtggtcgacgttgaaaaaygtactttgaagttcagtctacgtattttatatcttctaggggcccagaagacacctgctttgagtttggtgtttttcctgccatcctgagtttcccacttgattacccgttaagtcccccaaagatgagatttacctgtgagatgtttcatcccaacagtaagtgcttttggaagtagtttttgtggtaccaggataggtacggagataatattatcagccacctgaaatgtggtatattctatatgtctatgatgtagatctttagaaaacacttcttatgttttgaaattcagccaagtaagcatggtggtattaagcacatgatttcaattttgaaggtcagtttaatatagataaaagacaacaggcacctaaaaccggatgccatttgacccagccaccctacttcactggggaggaagttttacacatgggtgtgtgctcagaaggggttatgctaatctttgtcatagtgttatttgtaatggtgaaaattttgacttaacctgggtttttaacacaagaataaattaagttatatattgtattagtctgttgtcacgctgctaatraagacatattcaagtctgggtaatttataaaggaaagagatttaatggactcacagttccacatggctggggagacctcacaatcatggcagaaggcaaaggagaagcaaaggcacatcttagtggcggcaggcaagagagtgtgtgcaggggaactgccctttacrgaaccatcagatctcgtgagacttgtacactatcacgagaacagcacgggaaagatgtgcctccatgattcagtacttcccactgggtccctcccatgacatgtgggaattatgggagctacaattcaagatgagatttgggtggggacacacccaaactatatcatatatgttagaatgtgatgtagattttttaaatgatctaaaagaagaatcaatgatacaaagtagtatttgtgttatattgactgggaaaagcagtagcactgttataatttcctcttgaaaaagaaattcacatgtaaatgtatatataactggaraagtaagcacaaaaatgttaaaagtgattcttttttcrgattgaaattttttttcctttttgtaaatctttttttgccctaaaattaatatatattaattttaaaaggaggaaaaaaataaggtcatttaagtgaattgtactgtagcttatttgaaaatgtgtccagtagtaggaattggaatttctgaacagctgtagtttttattttttccttttacattcttccttttacatctttgccataggggttttcaggactacccccccacccccggccacttcactggtggaaatgccgtctgccaatagacttgctgtcctaaccctcgtttaggacttctcatttactgcagatattggtacacataggtagtgggcggctgcctgagagagaccatttggtacttcttttcttatctcaaagctgcttcagtcttgtgtgcacaggggatgctcagaagcgtgccttctttcagggagactggccatgcgcctgagttagatgataacatggaggttcatcacacgctgtctacttgagtgtgtttttggaattctccataataaaaagttaaaaaatacaattgataggtaagagtaattgaagtagtttcaaattggttagctataaaatgcaactatgaagaggattgtaggtaattaaaatactaagattgtattgaggagaaatatattattcagaacaatacctgtgacatggcattagtgacaaatatgaccaataaactgattaccttatgtgactatgtactacaggtggtctgattattatttttaatgttctggtaattatttttaatgctcagataatataaatttttgccttactgtaattggattattttgattttttaaaaattatctttgagaactataggtctaccaatatcataaaaactagtcaataaatactttaaaaacaattcaacacacgtactgaaagttgctggtatacagtggtgagcaaataatagcagaccttcaggagcttatattccaaggacagggatggacattgataggagaatcacacaaacaaaaygcaaagtcacatcaggaagttctgggcagcaccttgcagaggtggtggttggatggaccatctgtagggagtgaagcaggagttacctgagtgattcggggaggaggggcccttcacatgtgcaaaggcccagcgcaggaagtgacgggagaggaaggccggggccaaactacctcaggccttttggtcaatactgaaggttttgatgttttctcctgggagtggcggaactccattgaaagactccaagggagtggcatgaccagaatgatctctgacggctcgctctgggtacagtgcaaaggacaggtgggaggaagccaggcaggccctcggctgtagtggtctagggtagagacaccggcaacttgggaactaaatgtgggcactaaagataaaragatgtgtgtggatccacgagaggtttaggacatggcactgctgggacttggtgaaggaggggctgtggcagggacacaggtgcttttgatgcttctgtggatgcagtgtcaccctatgggaccaactcctggagaaggcaacacagaagtgggaaacttcctgattttgtggatgtggatcttaggtggacagcctgatgtccagggcaagtatgcatctagtttcttccactctccttgaatgagaagttgtggttcagttcctggatagtagagcgttcaccactgaacgttcaccactgaaacaatggatgagtggaaacacataggaccaggtatgaaagacaagactgtttgaaggtaagtgatcgccattcacatttgtgaattttcatgaaattcagagcttattaactcaggtgagttaaataaatgtattttaaaattgctatttctattattataactttaatggctttataattttacagttgagtctatctagatggattactgcatatctgagtatatatggagccatctgagaattcctcccaattwtatgtaaaagaggactgattaaatgctgtgaattgaaaatttatttctctttatcagaccttgtgtatctttttaatgatgatatttggtggaaagggatttgatttagacacattgacctacattccaggttgtactgatgataatttacttattattagagtaagctaccaagagaaatcctggtgcctttctttttgtagatatttacataattccagttgcctttatcatagccatgtgaacatatattttacacagaccggttcagggatttaatgatagaattagaaatagctaaggaactagctctgaaaagtattgtaaataatcctaatcacattagatattttgataaaatatttgccagataacctttcatttagtctttttgtatatattgcttgaaaaaaattcatatgaaagtggattagactacgacagctgattagaactggctgggtcagcctggagcctgtcagtgagtgagcaggccccaccgggattcctgcagacatgaagcgtgacactcagggccccaggctatgccccagctgtgcaaacagcttggttgctgtgtctgcagtctttgttctcattatctgtggagcctgcccaagcgcggcgatgcctcgggcaccattcctgggctcacttggctgcctctgacccttgcagtctaccctgatgggagagtctgcatttccatcctccacgcgccaggcgatgaccccatgggctacgagagcagcgcggagcggtggagtcctgtgcagagtgtggagaagatcctgctgtcggtggtgagcatgctggcaggtaaggcccgagcctcctggcaggagctgccgtggacacccaggctgcaggtgttctccagccttgcgtcatcctgtctttagaatgtccttttcctcatttgcagttagtttacacatgctattgccatttaatgttatctgcctacacttttccaattgtaagcataccttctagcatagcctggggttgtatattgtattgtcggccataattaactggtctctggtccttgatcgtctttttccctcagtaggtgtttattgaggacccactacatgccacacactggactgggggtgtaaagcttcgtgtgacaaagaccccaactctttgttcctacgttctagggaactgtccaagcctaccagcagttagaggccagtgggatgcaccctaagatcagacacatgcagggactctcgggccacttcctggtggggctgtctggggtgtgtttaggacatgtaggtgttgatgaggtaggagggagggaatggggttttggggcaaaggaagcagcctgggctgaggcccagaggcaggaggtggctgacttgatgggggcactgccagctcattttggctggagccaaggctgcagggagaggagccccagcagaccctggggattggagttgggggtgtgatgtcctgtgagctgtgccttcgaagggccatccttgcagcagtaaccaatagtgtgatggaagacaaacagagacatcrtggtgttgcagtagcctggagagaaaagagaagggctgagtggtcccagggctaagaggaaggggtgggtttgggagaccttgaaggtacaggctctgggactcctggttctttgtctaccagaggtgctgctctgggttcaggagacagcaggatttggggaatagtttgaggtgtgtgggacaaggggcctccatccacaaaagggggtcagacaygagagtgaagatgtggggtcatttctggatgaggcagtaggtgatggagtaggacggagggtgacagcatagcagggaggggtcttccagggcagtcaggaggaagggtgtgggaaaggaaggcggcaagtccgaaaggaaagagcagacccagcagagggccaggggtcgatgccagagtgaggccactcagctrttctctgcagagcctttgggtgccgtggagtggggtctagagggatgtgaggtcagggcctgtgacgcgagtgtgtatcctgagagggctgaggcgtgaaccctcttcatgtgctgagtggagggagccaggccaggggattggagattgggagggaggcagtggctcaggctgtcctcagatgtcagctgtgggttttatcctcatcaactctgctctgaaccggtccccacgtgcattctgagcagcgccaccgccgcactgcacagctgctgcctcagcacatgtcatccagttctggtggtctctctccgttctgccttccggcaggccctggctactccctccgtgcctcctaactgcagttctgcagtgactgccagtgccgctggctagggggtgggtcaggtatcctggggtcaggtgtctaccttaggctgcacatttgcttgggattgtcttggtaggagctgtgaggggcagttttgctgagagggcgctctgtgagagagaagccacactgcagagtgtcttgagaaaggtgaaataagcagcaggtggtccccgtgtagcttgtccgggtgccagaagtgcagtggcccaggaggctgctgtgggaggccgtgtgggcctgtgcttaggtggttgtcgcatgttccacagcaagacagatgacaacttgtcctggtgtcttcagacactcagaacgcaggagtcatgagagtggctttcgttgagacctgcgtggccagcactctagaggtggggccgaccccatgcagttctcaggttctttgtttctgggacacagctcttgaaagcccccgccagtgttttaaataaatgggagaccttgccaggctgcttacgtrtaagactcccttttacatggagggtgttcccttttctttcagagcccaatgacgaaagtggagctaacgtggatgcgtccaaaatgtggcgcgatgaccgggagcagttctataagattgccaagcagatcgtccagaagtctctgggactgtgagacctggcctcrcacaggcgcrcacacaccgccaakcagctcagcattctcccccggcacacttagtgacagtgatgctctgtgctggtaccaaacaaggcagacttgcaagaaccayggcatcttttttttttttcaaacctttcctacttcaaacaggcttctcttctgaaaygatgacttaatgtcgaatattgacagcttactgcagttttacagtattcctcacaaagggcttcaggtagattatcagagctgtcagcactacctctccccgctgaaaccagcagttcatggcttcctgtggattccctccctccctggagtgttgagggggttgtacctgccagacttccaggggacgatggaatacccagaacgctccttctgaagaaatggggccctgtagctgcagcacaggggaagggcccggcaccctttctgggtccytcctggttccctgtgggccccatgaggagtccattacttcctttcttccttcatattttacaggcagatgcttttcttataatctaattacatcttttcatttgttatatattacaaaccatcacacttagaaatacttccaggaaatgcttttttgaagtgtgaattaataagaaatggggtaaatagaaaagaaatttattgctgattggccaggtgcggtggttcgtgcctgtaatcccagctctttgggaggccaaggcaggtagatcacaaggtcaggaaattgagaccatcctggctaatacagtgaaaccccatgtctgctaaaattacaaaaaattagctgggcgtggtggtgcacgcctgtagtctcagctactcaggaggctgaggcaggagaatcgcttgaacccgggaggcagaggtagyagtgagctgaagtcccgccactgcactccagcctgggcaacagagcgagactcagtctcaaaaagaaaaaagaaatttattgctgatcacaaggacagacagttttttcccgaccatactcatcaaagatttacgtttgtatattagtaactagtgcattactagagcaggtgcaggtgaggtctttaaagtttcaatgaaagtttcttctggatctacagaaaaaawwtttttttttcaatctaaaaactggaaattctagggtttttgtacattttggatgcactgggaatttattagcacaaaatcattctttgcaactcaaaattcagaagggactctaccatatcttagctcagagcacagaggagtgccttatccccacacttgactgggctgtggaggtgggcatgtgggcccctgggcccaggctggggacagagcccttgttttgtgacttaggattttgatgtggttcccatgttctctaacagggccagctgagcagcacaggccaggaggccacagtgtaagcaataacagatctgccacatgcagaagcaaatatcagkcctgtcgcacacgggcggcatttaaataggaatttctatttttgaaataagggatggtctatgaggcatayagtagatttgatgtgatccttttctccctcccttccataatggatcgtggtctgtgtgactgaacccacacagagtgtcatgggtgacagtttctggttgaagtagctccacgcykggcttctgtggacagcagattcttttccttctcacaaggggctcatttaaaatttggaggctgggtgctgtggctcacgcctgcaatcccagcactttgggagactgaggcgggcggatcatgaggtcaggagatcgcgaccatcctggctaacagtgaaaccctgtctccactaaaaatacaaaaaattagccgggcgtggtggcgggcgcctgtagtcccagctactctgaagactgaggcaggagaatggcgtgaacccaggaggcggagcttgcagtgagctgagatcrcgccactgcactccagcctgggcaacagagtgagactctgtctcaaaaaaaaaaaaaaaaaaaatggaacgsagggcaagaactcgtatttggaaggagatgggggaaaggagcggtattatacctawgttgtatttgcaggcaaatgagatggagccctctctgtaaagaagagtcatttgtgcaagtagacggggtctgtgggtgcaggccctggaggggcacacaattgcctggaggcttctgtgagatcgggagagggaggagaggcagtctcttgacaaaataaagtatttttattcatttgtatttattaaatgaaaaaacaatcccatggtgtccctgttgtgtggtggaacctaatgactgttgaaataaagttctgtgttttccctgccctgcagtgtgtgtccctttgtcgtattgtcagaggagcctgtggccactgcccccagggagcacaccagatcatcccagctgggattcctcacggygggggcttttctgcagacttgggttagctctggcaygttttcttctgtttctgatctcccttctgtcattctgtggtcttcctctggaattctcaggttagttggggtctgtgagacggatgtgttcactaacctataaatgacattttgcagctttttcagcagatgccattgtgtgagtggcacatttgaccactagaagccagcaggctgttccgactgcgcttccctcctgcagttgcttagaagcacagctccctgtcatcactcctctgtggtcctctgtggtcacggttggttgcgatgagacctgcctctgcgtcttgttacttagcatgtcaataaagaggcagattcctgtgtcagtgatttgctgtttctgttttggtagttggcggtcagctttcctttgtaatcctgtgaggcagggtccccaggcttccccaggtgctggcgcctcgttccctgggctggttcccaggctgctcctggtggggtgcactgggcgagtgcctcagcacaggcccccaggcatgtctgttctgccctttgcccagtgttctcactaagcattctttttaatgggtaagaactctaatgtgatactgagttggggtccccaagaccacccagggcggcgattctccaggaggacagaggccaygcaggtcacggtagtcacggctgtgatttcccacagggaggacactgagcaaaatcggccaagggaaaggttcctggggccgagtccaggggcaccatgctcagctttggaggcctctcctggggtgggggtcacgcaggatgcgcctcactcccctgcaagcagctgggactctgcgtgtgcgatgttggggatgccytgcctggtgatgtacccgggggctggtcacgtgagcagcttctgcctgggctgcgctacaattccagactctcagcagggatgtgagtgttctgcctaaaccaccttgtacaaatagcacaggcccagtgaggcggggttcagggagcccctcggaaatcccagttcccagacgccagccaagggccagcccggccagcgggcctcaggacggccgtccccactgtatggaccctttctgcgcagataaccttgggggttgacagtgatttttaccatttcatttgctctgtgtttctgggttttgtctgctggcactggtttgccacagttgtttgcctgtctggctgagtgccgtccttgcttttcccatgcaactgtctgcttcctgggatggggagggctgctggggtggccagggaagctctagggtctcatcttctgggtgttggggcttttcacccttcctgggggttagcggccccagttcactgcttgggccacagcaagggtggcgtccacagctctgactctcacttctgggattgctgcacctgctggggcttctccagtccagtctctgtgtagatgaggttgctaatttttcagaggagtgctgttctgtaccagtttcttcataggatatggaactgctccagctgcacagaaaggcaccccagggcagccccagcttccctcccctgggcgtgccttgcaccgtggccccctgagctgacaaggtttctgcaggctggaatttgtgctggaggcgagggccctggggatgctacctggacacaaggaggggacaggaaacaggtacaaaaattcggggctgccaaggggcagtgaacacactaaggacaggtggattctggaaaccctgccctggaggggaccgcggggccgcttggggtgggggcagggtttggagaggggctgtgaacaaagccagcccctctgggtgttggcctggggcctggaccctgggctggggggggcaccctgggaggaggtctcgtcgtgctgatgtggcgtggtggccccatctgggagggaatgctgttgggcccaggtcctggctgagccctgtggaagctggaggtgttcagctcctcagatctgtccaggttgtgacccgttgtcacgagagcctggctttgttgaggggacaaagcaaggtgaacctccctgcagaggcaggaaacaccagcttcctcccccaaaccccggcaccactcagccagccatagcctgtaccccctcaccatcccagacacaccttccaggcctcaacacccaccgaacccacccactgggcagtgccaactgtctggtaccccgaggcaggtctggtgcccccgaggcagctggcccatgcccttcgtcatcccctggygaacatctgtaacccctgcccttggcctcaccccgttgaatgtcccagccctgccctctgctgggtgggcgtactggttcggggatcccataggagcgtcagggagatggggctctccacctttgtgcccctcctgtgcccccgttcccatgcctggactgtgagcgctgctggctgtgtggaacctgacctccagggccygagctctgacaccagaagtgggcaagtcctcacacgtccgggcatcttcccctctgaaggctgtgaacccagccatgagatgtccgagggcgtgctctgaggagttgaggtgggggaggtgaggtcatttgccaaagccccagccaagaaatggtcctcgccgtgccccgatgcatcgctgaatctgcaaggccccccaccctccaggactgtggcccctctgcctccatggggtgcggttggtggcatgaggcccactgcaccctcctatgcagtgtccacctagacccaggggcctgctgggcagcctccactgctccaccttcccccgcttcaggtgctggcctttgcgacacagccacctcatgtctcttctcgcaccctggtctggtcctctcagtccccccaccatcaggcttattagcccacctgctgcacttggcaaagcctcaccttccactcggggccaggagacaccagggcccggccctcagcaccctcccttacatgcctggaagttcctctgtccaccagctcagtggggaagtgctctggacaccccagccactttccttctgctccagactccagattttcctccccctgcagtggccatgcatgttgtctgcctcccacaagtgtggccctgcggccctgcccccagctgggtggtgcactggtcaggtgactcccctacatccttatcagaaccccccgggggctggggtgaagatcggccagcctggtagctggcagtgctgttgctctaagttgcttgtcatagggataacaagaacgcatcctgtggctttcttttttgagtacaatttcatgagaggctaggatggcaaagtgaaaggaactggtttttcaggtgtgtaagtacagagcattcagccccatctctgtggtcgggagatgatgcagggccctatctccggtttaggctttgcagtggcaccctgtcgtgtgactgggtggggctgggtgcctttgtgtggggaccacagacctgaaagctgctcctggcattgccaggagtgttgtctggggcttgccaaataggcatgggcagagttggcgtggggtggcgggggggtcggagggagggcaggatgtgttctgtggtcctgccctgtgggcagaggctgacgtggggcatccccactgctgcctggtcagtggctgtgggtgagctgtgggcctggcagctgaaggtggctctggccagcctgctggggcttggccttcctcagaccccagcagctgtatgacctgggctagcgagggaagctgtctaggtctttgttttctggtctgggaatgggtttgatggcagtcacatcccagccctgagtggtggtgaggattaaagaccatgtgtgcaaagcacagagaacacggagtagctcgggagacagcagccctccctgtggtgggcgtgtccaggaggccacccccgcccacctctcggggcaggatctcctgtctcggtccctcccagcccagcgcatgtctgagctgtggtcaggacatcttgtcctcagctgtgccccttgccccggtcagctcttcaggtggcagtgggcacatgtgtgccaggagggaagggggcatcgtcctcacaagggtgacatggggccacctccagggcacagccacggggccacctgagacttggcagcagtcagcaacatggctcctggatgccttcccacccaggcctgtccgaaggagagctcctccaaygtggggtggatggagccgcaccctgggtggcatccctccaggaggtcacccactgagagtcctgggcctagctgctcaccctcccaccgcagggccaggtccctaccaggcggccaccatctcggatcctcaacattccagtctgagtctgaagagaactttcagatcagagcacgagttccatgggcctggggcggcatgtgctgggtgtgtgggtgccccgagtgcgccaggtgtcccgggtgccccagttgtgccagttgtgctggatgcccgggtatgctgggtgccctgggtgtgtaggtgccccaggtgtgcagggtgtcctgggtgtgctggatgccccgggtgtgtaggtgccccgggtgtgctgggtgcctgggtgtgccgggtgcctgggtgtgccgggtgtcccgggtgtgctggatgcccgggtgtgctgggtgcccgggtgtgctgggtgcctgggtgtgcagggtgttctgagtgtgtagatgccccgggtgtgctggatgcccgggtgtgctgggtgcccgggtgtgctgggtgcctgggtgtgcagggtgttctgagtgtgtagatgccccgggtgtgctggatgcccgggtgtgctgggtgcctgggtgtgcagggtgccccggttgtgtaggtgccccgggtgtgtaggtgccccaggtgtgctgggtgtcctgggtgtgcagggtgcctgggtgtgctgggtgcccggatgtgcagggtgccccagggtgtgtaggtgccccgggtgtgtaggtgccccgggtgtgctgggtgtcctgggtgtgcagggtgcctgagtgtgctgggtgcctgggtgtgcagggtgccccgggtgtgctgggtgtcccgggtgtgcagggtgtcccgggtgtgcagggtgcctgggtgtgctgggtgcccgggtgtgctgggtgtcccaggtgtgctcggtgcctgggtgtgctgggtgcttgggtgtgtaggtgccccaggcgtgtaggtgccccaggtgtgtaggtgccccgggtgtgctgggtgcctgggtgtgcagggtgcctgggtgtgctgggtgtcctgggtgtgctgggtgtccgggtgtggtgggtaccccaggtgtgctgggtgcctgtcccttggacgtcccatgacaggcacatccctgctgggcagggagcatgttggacacctgccatggccccagcctctgtgcggggcactcctgtttgctcagggctggtggaggagcagcgggaaaccagaagagttctcaggttgtgtgcgtgtgtggggctttctggcagaggactgtctcgttggaaccaattcagatggaaacaaacgtggaaggttgtcctttgctaatggatctttgaaatcctggataatatactaaatgagttggaaccacatgaaacatctgcagcttaagggcagaagagactttgggattctcacgggtttctcctgctggactggttcccacctgaaggagctcctaaagcagaggacggggctgcagcacgatcccaaatgtcccgggggggccgatcccacccagacctcgggttccacgtcaccaagcatgtgtgtttgtgcacacctgtgtgcagatatgtgcacacatgtaggagagtgtgtgtgcctgtgggggcgtctttggagcagttccagcaaagcatttggcctgctcttttgtgaagttctctatctctcggtctctgtctctccatctgtctctgtctcttccctcgcgcctgggctgctccgcaggtgtcctgtcgtgtcagccctgacttgctatggagggtggagcccagggcagtgaggccagcggctcgtgggctccaggggcgtacatggtagagatagggcccgagcagcccagagtgggcacctgggaaggctactcatcccagccccagagcagccctgcaggcagccagcgttggagcacacccctctctcctcccacaggggctgctgagaggtggatgtggcaagaacctgatccctggaactgatggggacgtgggcaagacaaacacgtgcccttagctggccactcctgggcctgcctacaaagaccccagggctgggtggagctgggtcgccatctgggcctgggagctgcg

SEQ ID NO: 93424 - DNA, 18595 bp, Homo sapiens
tccctctgatcatagcccaattctccaaagcaaggatctcatgtgtggcttctattttttatgaaaacatttactgttttcatcttctgaactactttttaaaaactatctttattttcattttgttatgaaaaacggaaacatacagaaaagttgtaaaaattaaacagtgggcatccacrcgcccggccctggatctgcacctggcacgtcactcactgtgcttgatcggatactcacccccgagccggcctctgtcagtgcatcatatttcacaggcactgcaggggaaggtgcagcaaccgcacacttcactcacacactgcagcaacctgccattaactcgagttcagcatttgttttgcatgtgaaatgattcaaatctcaagggtatcatttgacgaagtttgccaatctgtcaacacagctcacccaggccccctcaaggcccaggggagagggtggtcctggcttccctcctggctgggagaggacccccatcaggaccctggactttaccatcctctccagaactcttctgccttccccagtcaatttcacccaatcccccagagatggccactgctgagaattttttaaagcatgaattggttctccttgttttagaactcattcagatggagtcatacagcaagtcctctggtgccggcctctcccaccccgcgcggtgtttctgcgatgcgttcctgttgccgtgtgcgtaagcaatgccgccctcagtgctggtgtggattccgctgtaccgctctgtcacgctgtgtttatccatccaccagctaatgggcacatgggccgttccggttttttctgttatgatacagtgggacaagtgtgcctgccgttcagagccctcagcacccagaagctgagtaatcaccaggcgcccagtgtgtcactgggagccctggctttcaggggacccttcctcctgctgagctgaaatctacctccctgtcacaccgcctcagtggccccaatccagcctctggggaaacgcgtgctgggggaaagcccttctgacacccgaaggcagccaccaggttccccaggctcagcctccttcttcccgcagcccttcgtcctgtggcttggtttccaggctccagaagagtcctggctgagagatcctcgtctgaaactactgggaaggagacaccccctttggactcagcagcttcagccacagcttttcccagagcgtcttcccgacatcccagggtcaagctccacctctgagcagtgaccaaggacagaaccccatgctgacattgtcttggtcaggaaggcaaaggacaacgagaaacagcttcagggaaatttttaaaaagacccactattaaggagcagagagacttatttttgatagagaactaagccttcctgcacaagaacgttcaggggaaattccagccacggtgggaggtggatctgtcaccagggactgagaagtgcagggggattctgataataggacaaagggaaaggcttttgctaaacaatagcagagagttgattatcaggataatccatcagcagcaggccggtgtggcaggtcacacgtctgcaggccagggaaggggcagaagggcgggcagcacctggaggaccggcaggaggcggccacacacaggcccgacctgagcatgcggcaggccagctggcaggaggtggaygcctcacacaggggccggcacagcagagctgcacggtgcggggggcagggcgggggtggccaggtggcagcaggaggtcccacagccctgggtgggcagcaggtggtggagatgcagcatagaaccagggcaggtcaygggcatyygggcagcaaggcccctggcatcttcctccttgggtgggttttcctcctctgccctctcctgttgatctttctgggttttcttgttgaggttactcagttcaggaacctctgagctgggggttcccatgactcagcagaccatgtgtttcctggaaacagagccgaggggagctggtgaagggctgtcagtgaggccaggggtccacctcatggatgttcaaggtccccctgttgtaaatgccatctggagctcacacaagcacagtcacactcactgcaccaggggccccgttttgactgagaagctcagtcatcatcagggtcttcccaagtaatgagagccaagctactgggctccatattgtggaataataatgatgattattgaggtaacagtaatgcacagaggtctaacactgtgccaggttgtgattatctcattgatctttgccagcattcggggtggctgataccccattttacagatgtgcaatttgtaagtcatagagggtttgcacaatgggtgcgtgtctgcaccactgcagaggtgcagggatctggactgcttagtttcactctgggatccatggtcattaccactgtgccaaattataccgggggtagagggttcaataagtgactcatcctgaagtcctgaaccagctgggacagagaagatggatgaaaacatcagccacgttggcgtctgcagagcatggctcaggcgtgtgaccacagtgggcttcctgacaccacacctcagaagtgcccacttcccacgagtagcactaatggccacaggacacctcctctgcagacggagcccaggaggacccatcacagaggagggcctgagctactcatgtctggttcctctccctcgctgtgggtctggtcagtctcacccctgcagaggcagcttgggggaaagtgaggagctggtgtgaaattccaggatgcccctgaacttgggaagcagcgggcaggagtgtggatgrcacgctcctcctcacactccagctctgttctctcgatggattggccacagcgctttattctacggtggtgtcacacagtaggggtatgagccatctctcacggcagagctactccctccatcccaggcagctcccaggggcaccctctgctcctgtgtgggtcctcctgtgcctgctggtggtggatatgggtgattcctgccaagaagccttcagacaagtcagacaccacgttaatgaaatcccctccaaggctgaagaccaagtggggtctcagagctgtggacagaacttagaagtctatggacccagagccgatctgtggccatgtgrgagtgaccttaaggcctagggacaagccgggtgaggccacaagttcagccctgtcacaggcaactcctttcactgctatagttcagaatcacacttaaaaaccaggagaattggggcagccacagtgatcacatgttcctatgtgacctagtcaccaagtaatccattttaaaggttagctgtcttacaagttgactacagaagaatgaggatgcatctttgatatttacctgctcctttaccttcccccatctccttcctgctccttcctgcaggtcagggcccacctggcctcgtcctagtcaacctaaagcacatctgtccacgttgcctgcagcgcacatctgcaggggaggatttctcccagcttttgttcctctgaacagattttcacttcaatctcagtttctggggttttttgagacccttcttgcttggtcacccaggctgaagtgtgatggtgcagtcatagctcactgcagcttcgaactcctgggctcaagctatcctcctgcctcatcctcctgaatagttgggactacaggtgcacaccgccacccctagctaatttttaaattttctgtagagatgtgctcttgcttgttgcctaggctggtctacaactcttgggctcaagtgatcctcttgcctcagccttcaaagtgctgggattagaggtgtgaaccacagtgcccggcccggcctcagtctcagtctttaagcacgttcttcatagatgtagacttccggattgccagttattgttgctcagcattttaaagatgtgtctccactgtttctcatgagaagccagggcgtttttcttatccttgttcctttgtatgtaaagtgtcttcctgtcactgcttttgagattttgtcttcatttttggttttcatcacttcatgatgtgcctggatgtggttttcttcctatttatcctactgggggctttctgagattcctggatttggacgttgttgatttttgaagtcaaatttggtgtatttaaaatttctaactactgtacttttcagttctaggattcccattttaaaaaatagcttcaattactctactgagattccctatttatccattcatgaagacaatgttttcctttaattatttgaacagttttcttggattttttggaagatgtctataatagctgcttacagtcatcatttgccatgtccaatatctagaccatmtcaggtttattttttttaacagtgaattaaatttacctatatcttttaatatctgatgatttgttttttgagacggggtcttgctctgttgccctggctggaatgcagtggtgtgatcataactcatggcatcctcaacctcccaggctcaatagaccctcctgcctcaacctaccgtgtagccgggaccacaagcatgcaccaccatgtctggctaatttttaaccattttttttgtagagacagagtctcactatgttgcccaggctggtctcaaactcctagcctcaagcaatcttcccatcttggtctcccaaagtgctgggattacaggcataaacaaccgtgcctggtcaatatctgatgattttgattgtgtatgaggtatcataataatgcatttacagactctgagctgtatcatgtttctgatttttgctagccgtcagttactggagaatgaccttaatcttgtgcagtttttgttcaacactttgctagggtggatctctgggaagcatctacaacttggaacactctgtatcttggtgggactcacattccaaactgtcttccctaaaaatcctattctgaattggtttaggctttgttcgggctggcctaggcgggtctcactgtagtctgtggtccttactcatttggtgccgggctgtagggggtctcggctggatgtcgacgtggggactggaggggggcttcactctcaatcctctggcagcttctctctggtgagcctgtggttgccttgccctgggaatgcacagccctgccccgttccacagattcacagtcagcttccacagtgcggggcctgctctccacacggatccttctttccgcttctctgctcctcggactccagggcttcagctgcttgagcgctggccccttcctcctcggcagagttgggtcactgtattctgctctgactccggctggtgacactgcattttggaaggtgacactgcattttggaagcctgccccagcagasagctgggaaatgggagtttatctcctaagtttcttctctctcaggaagcacagtctgcactgctggttgacggctgcctgaaaacgagcatctcctaaatctcaactgtatagttgatagagtagccagctttgcatcactcactccagcaggttccccagtatgatttcattgtctatattcagttctggtctcttccccaaagtttctggttgatgcaacagaagttgcggttcgaggagctcttttgggtaccactcatgtctgcttcagcgtagaactaacgaagggaggcagatatcaggcaggtggagctaaaactgcctgtgcatcactgataaatttgggcaggtttccaaatgtaacaagagcttgaagagggtgcaattagtcacgaaacaaagggccagataaaaaacatcatctacgacagaaaactgagttccaggaaacagccttgaggaagaaaaacaaggaagacaacaggtgtgtgcttctgtgctgtggggatgcctgggtccaggtataaaggctacccagggaggccrtccccagacatcactgccctctgcctcgaccttatccagccacacgccaccatgtgccacaccagctgctcctcgggctgccagccagcctgctgcgcgcccagcccctgccaggcatcctgttacatccccgtgggctgccagtcctccgtgtgcgtgcccgtgagcttcaagccagccgtgtgtgtgcccgtgagatgccagtcctctgtgtgcgtgcccgtgagctgcaggcccgtcgtgtatgcggctccctcctgccagtcctctgggtgctgccagccttcctgcaccagcgtcctctgcagacccatctcctgcagcaccccttcctgctgctgagcatgaatctccagacccgctgctcccagtgcagatgaggccacacctgtacactccctrgatgagtcctcagttggtcttctgcacatggtgcaggtgaaaagcatgctcagtgaaccctctgaattctggatcgagaatataatagaatgatctggagccctggctgaacttgcctatccccccagggaagtctggggtcccagagtcattctctgaccccatgagagtcaaataaaccagctttccccatgcaactctgcgtttcttgtctctcttttttatttctatactccccgctatctattctgctgattacatagaatttgctgctaaaccctcttcagtgatcccttcacccagtgctcatcagaaggtggtgtcccgggtggagggcgcrgctgcagatgcccatgtggtctctcccagggctcctggggcccagctgcagtggccacagcggtgacttacccgcctgtggtggagtggcctygcttccccactggctgtccactcctgctccaggccagcaagccctgcattgatggccaaagcctcagagcactgaggatcgggctttcccatgtggttggtggatgtcctgcttcccrggtcgcggaggatctcaggtttacagaactggattagttctgcagcacacactcccatcactgatctacatatggcactttttaaaaattgatacataatatgtttacatatttrtggggcatatgaaatactttacacacagaggatacgtaatgatgaaatcaggatattcatcaccttgtctatcatttctctgtgttgaggacattttacactctctcttctagctgatttgagacatacaatacattgttaactgtagtcaccctatgctgctatcaaatattagaacttattctttctgtgtaactgtatgttygtacccattaaccaaactcacttctcctctaacacacaccgttcttcacctctggtaatatcattctactctctacttccatgagatcaactttgtgaactcccacatgtgagtgagaacatgtaatatttgtctttaatgaccttcggttccatccatgttgctgcaaatggcaggacttcattcttttttatggccgaataagattccattgtaaatatataccacagtttcttgattcatttatttattgatagacatttaggttgaatctgtatcttggctattgtgaatagtgctgcaataaacatgggggtgcaggtatctttttgatacaccaattccctatcctttgaataaatagtagcaggattgctggatagtatggtagttttattttagttttctgagaaatctgtataccatttttgataatggctgtactaatttacacttccacaaatgatgtataagagttcccttttctccacatctttaccagcatctgttattttttgtctttttgataatagccattctaattggggtaagatgatgctatctcattgtagttttgatctgaagttccctgatgattagtgatgttgagttttttttaatatacctgttggccatttgtatgtcttcttttgagagatgcctattcaggtgctttgcccatttattaatggaattatttgttttgttgttgttgttgagttgtttgagttccttacatattctggatattagtcacttgtcagatgcatagtttacaaatattttctcccattacacaggttgtctcttcactctgttgattgttccgtttgctgtgcagagcttttcagtttaatataatctcatttgtctattttggtttttgttgcctgtgtttttgtagtcttagccataaactgtttgcctagaccaatgtcctggagcatttcatttatgttttcttctagtagctttatggttttcggtcttatgtttaaggctttgatacatcttgagttgatttctgtatatgatgagaggtagggatccagtttcattcttctgcatgtggctatccagttttcccagcaccatttattgaaggggtgtcctttctctattgtatgttcttggcacctttgttgaaaatcaattggctgtaaatatatggatttatttctgggttctctattctgttccattgatctatgtgtctggttttataccaatactatgctgtttagccttgtaatatattttgaagtcaagcggtgtgatacctacaggtttgttctttttgttcaggataactttggctattcagggtcctttttggttccatatgaattttaggactgttttttctacttctgtgaaacatgtcattggcattttgatagagattgcattgagtctgttgattgctttggatagtatgatctttctaacaatatcatttcttctgatccatgaacatggaatgtctttccatttgtttgtgtcttcttcaatttattttatcagtgttttgtagttttcttwgcagaggtctttcacatccttggttatatttattgccaggtattttatttttaaaatagctattgtgaatgagattgtgttccatgggcaggtctatgcaaacctacccccaaagttcaaggaagctgagaggccacagaaagaggctgacaaatccagtttctcagaaagaaacatttaataaggacttaaaacagaagccatgtctgtgtcttgggtggtggtaagataagctggtggatccctgtgccattacccctccagacccaaggcttatataccataaggaaagggtatatgtgatttagaagggctctgtagaccaattgaagtaggataacgtcaaggttgttttgaagcaggatttatagtatgtgctcttatacaaggaacagtagataaactggaaattttagaggccttcccagaacaggttaactagaagtccatatggcagattagcatccaagatggagttgttttagccttcatggattgcctttttgcttactttttcagctagtttgttattggtgtatcgaaacactactgatttttatatgttgattttgtatcctgcaactttactaaatttgtttatcagttctaatagttttttggtggagtctttagatttttctaaatataaaatcatgtcatgtgcaaagagggacaatttgacttcctctcttccaattgggacagcttttatttctatctcttacctgattacactggattggacttccagtactatgttgaataggtgtattagtccattcttacattgctataaagatacctgagactgggtaatttataaagaaaagaggtttaattggcttatggttctgcaggctatacaggaaccatagaggcttctgcttctagggaggcctcaggaagcttacagtcatggcagaaggcaaaaggggcaccagtgcttcacattctggagcagtgtgggtggggtgaggatgccacacacttttaaacaaccagatctcacaagaactgattatcatgacaataccaccaagagggatggtgttaaaccattcatgagaaatggccctcatgatcaaatcacctcctaccaggctccacctccagcgctggggattacatttcaagtttgggtggggacacagatccaaaccatatcaataggagtgataaaaataggcatccttgacatatgtacacatgcctccacttactcgtgccgccatggcagctcccgcatccaccagcagcaccgtccgctcgacagatactgcgggcctgtcagttatcgagtgtgaccgctgtggcccagagttgtctctatgggaagttagtcctccgtccactgygaccatgccgccgatactctacttcaggcagctctgtggttgactactggcaacattgctggagctggccttttgttttttggtggaggtattggtggcactatcctatatgccaaatgggcttcccatttccgagaaagagtagagaaaaccataccttactcagacaaactcttcgaggtggttcttggttctgcaccttataatgttccattgccaaagaaatcaactcagtctggtccactaaaaatctctagtgtatcagaagtaacaaaagaatktaaacagcctgcctcacaactccaaaaacaaaagggagatactccagcttcagcaaccgcaggtgatacagtgttggtccctggggttcagcatgaggaatctttaaaaactgatcaccctgmaattgatgaaggaaaacccacacctgcactttcagaagaagcatcctcatcttctataagggaacgaccatgtgaagaaattgcagcttgccttgcacaasaggaaaaacaagaacaagttaaaactgagtctctagccaagagctttgaagatgctctgaggcaaactgcaaatgtcactctgcaggcgattgcagctcagaacactgtggtccaggctgtcaatgcacactccaacatattgaaagccgccatggacaattctgagattgasggcaagaagaagtctgctaagtgscacacagtgcaaggtgcgttgaaggarcacagaaaggcagtagatgaagctgccaatgcccttctcaaagccaaagaagaggtagagaagatgaaaagtgtgactgaaaatgcaaagaaagaagaggttgctggggccaagcctcatataaacttcacaacatgatagttgatctggataatgtggtcaaaaaggtccaagcagctcaatttgagkctaagcttgtatctcagtatcatgagctggtgggccaagctcaggatgactttaaacgacagctggacagtattactccagaagtccttcctggrtggaaaggaatgagcgtttcggacccagctgacaagctctctactgatgatctgaactccctgattgcccgtgcacatcgtcacatcgatcagctgaacagagagctagcagaacagaaggccacagaaaagcagcacatcacattagccttggagaaacaaacgctggaagaaaagygggcatttgactctgtagtagcaaaagcattagaacatcatggaagtaaaatgcaggctgaataggacagaaasgtagaggaagtcagagatgccatggagaatgaaatgagaacctagcttcactgacaggcagctgcccacactgatcacttgtgagatgtccttagggttcaagaacaggaattgaagtatgaatttgagcagaacctgtctgagaaactctcggaacaagaattacagtttcatcatctaagtcaagagcaagttcacaactttactctggatataaataccgcctatgccagactcagaggaatcgaacacgctgttcagagtcatgcagttgctgaagaggaagccagaaaagcctaccaactctggctttcagtggaggcattaaagtacagcatgaagacctcatctgcagaaatgcctgctgtcccactgggtagtgcagttgaggccatcaaagccaactgttctgataatgaatttacyaaagctttagccacagctatccctccagagtccctgacccatggggtgtacagtgaagagacccttagagtccgcttttatgctgttcaaaaactggcccgaagggtagcaatgattgattaaaccagaaatagcttgtaccagtacttcttctcctacctgcagtccctgcttctattcccgcctcagcaactgaagctgcagagctctgatctgaagatataaacacgtttaaattactgtcatatgcctcctattgcattgagcatggtgatctggagctagtagcaaaatttgtcaatcagctgaagggagaatccagataagtggcacaagactggctgaaggaagcccgaataaccctagaaacgaaacagataatggaaatcctgacagcatatgccagcgccgtaggcacaagaaccactcaagtacagccagagtaaggtctaggaagattttcgtaaagtcrtatttcatgtcaaggaaatcagcagtgatacatgaagggtttgccgcaagggtcccagaattgtctagacatgagcaggcttacaagtactgttctaaatgttaacacctgttgcatttatattctttccacttgctatcatgtcagtgaactccaggagtgctttctttgcaactcgtgtaacattttctgtttttcggattttactgatcagacttgtgaggccaatcaaaataatgtttgtgatctctactactgttgattttgccctcggagcaaactgaataaacaagatgaaaactgaaaaaaaaaatgcatccttgtctcattcagttcttacaagaaaggctttcagcttttttccatttaatatgatgttagctgtgggtctgtcatacatggcctttattattttgaggtatgtttcttctgtacatggtttgttgagagtttttatcatgaaggatattgaattttgtcaaatgctttttctgcatctattgagatgctcatatactttctgtccttcattctgttaatgtgatatatcatgtttattgatttgtgtatgttgaatcacccttgcatctgtatgataatttccacttgatcatggtatattatcttttcgatgggctgctggattcagtttgctagtattttgttgaggagttttgcatctatgttcattggggatattggtctgtacttttctttttttactgtatttttgtctgctttcggtatcaaggtaattctggcctcatagagtgagttaagaagagttccctcctcttcaattttttggaacaatttgaggagaattagtgttggttcttcatgtgtttggtataatttggcagtgaagccattcaggcctgggctcttctttgctgggagactttttattactgattcaatctggttattcattattggtctattcaggttttctttttttttttaattcaatcttggtaggttgtgtatgtccaggaaattatcatttcctctaggtttaccagtttttagagcatagtctctggtaatgttatacacacacacacacacacacacacacacacacacacacacacacacacacacactttaaagacagagtctccctttgtcacccaggctggagtgcaatgacccagtcgtggtgtggtcatggctcaccacagcctccacctcctgggctcaggtgatcttcccacctcagccttctcagcatctgggactacaggcatgtgccaccataactagctaatttttgtattttttatagagttgggtgtttgccatgttgcccgggctggtctcaaactcttgggctcaagtgatccacctgccttggcctcccaaagtgctaggattacagacatgagtcaccgtgcccagccagatgatcttttgtatttccatggtatcagttgtaatgtctcctttttcatttctgattttgtgtattggggtcttctttcttttttgcttggttagcctagctagctgtttattgatttttttttatctttttaaaagaccaactttttgttttgttacttctttgtatttttttaaagtctattttgtttagctatatactttattgtctctttccttctactaattttggatttggtttgttcttgcctttctagttccttgaggtgcatcattggattgtttatttgaaatctttctacttttttttttttttgagatggagtcttactgtgttgctcagactggccttaaactcctgggctcaagtgatcatctcacctcaacctccctagcagctgggactataggcaccaccacatctacctttttgatgtaggcatttattactactaacgtccctcttagcactgttatttttgtagcctataggttttgatatgtcgtgtttccctttttatttttttttgagaaattttttgatttccttattaatgtcttcattaacccagtagccatttaggaacatgttgttcaatttccacatatttgtacagtttccaaagctcttcttgttattaatatctagttttagttattgtggtctgagaagatacttgatattattttgattttttaaagttagttgagacttgttttgtggccaaacatagggtctgtcctgaataatgttccatgtgcttatgagaagaatgtgtattctgcagctgttagatgaaatgttctttaaatgcctattaggtccatttgctttaaagttcagtataaatccaatttttttgttgttgttgattttctgtctggatgatatgtctaatggtgagagtggggtgttgaagtcctcaactattattgtattggagtctgtctcttcctttagatctaataatatttgcttgtatatcagactcttttggtattgggtgcatatagatttagaattgtaatattctcttaagaatttcctgtatggctggtccagtggtgatgaataccctcagcttttgattgtccatgaaagattttatttctgtttatttatggaggataattttgctgagtatagtatccttgtctgtcagtttctttctttcagcactttgaatatatcatcccattctgtcctgacctgtaaggtttctgctgagaaatccactgttagtctgatgggggtttccttatatatgactagttgctttcttcttgctatttttagaattctctccttgtctttgacttttgacagtttgactataatgtgccatggaaaagatctttttgaattgtatctatttggggatctgtattagtacgttcttgcattgctataaagaactacctgagactgggtaatttataaagaaaagaggattaattggctcatggttctgcaggctgtacagggagcgtgggttgggaagcctcaggaaacttataattaatgcaaaaggcaaatgggaagctggaatgtcctacatggctggagcaggaggaagagagaaaagggggaggtgctacacatatttaaacaaccagatctcgtgagaactcactatcaggagaactgcaagggggaaatctgaccccatgatccaatcccctccccctcagccccttctccagcattgaggataacaattcaacacgagatttgggcagagatagaaatccaaaccatatcaggatctctgagcttcctgcatctgaatgtttaaatctcttgctagactagggaaattttcacctatcattttgctaaataggttttctttttttttgttttgagacggagttttgctctatcgcccagcctgcagtgcagtggcgccatctctgctcactgcaagctccgcctcccaggttcacgccattttcctgtctcagcctcccgagtagctgggactacaggcacctgccaccacgcccggctaattttttgtatatttagtagagacggggtttcaccgtgttagccaggatggtctcgatctcctgaccttgtgatccgcccgccttagcctcccaaagtgctgggattacaggcgtgagccactgtgcctggcctattttgctaaataggctttctatgcctttgggcttctctttgttttctggaacatccaatattagaatatttgctcactttatagtgttccatatgtcacataggctttgtttattcttctttttttctttttgtctgactgagttgtttcaaaagaccagtcttcaacttctgaaattttttcttctgcttgatctggtatattgttgaagctctcaaatggattttttatttcatgtattgaattattcatttccaggatttctgttggattctttggttatgatatctgtctctttggtgattttctcattcatatcctgaactgtttttctggtttatttgtatagtttatccatgttatcttatatctcacagaatatccttaatatcattattttgaattatttttctggtaattcatacatttctttttcatttgaatctgttgcacaattcttgtgtccctttggaggtgtgacatttccttgttttttcatgtttcttgagtccttatattgatatctgcacatctgacataacaatcaattcttccaattttggggactggcttttttatgagaagactttttcctgcagatgtgtctatggcggtggctggttggaatactttagctatgattctgggtgcatgcagtagtttagtctctgtatgatttctttggctgtgaacagcatcactagtgtttgtgatttcctcagcagcttggctgtggttgtcagtggaggctgtggtgaggcttttctggggtcagaaacaccaggttggccaaatctcaggccccagtggtggcagcagtgggccaaatgtgcctgtccttaggcccctgagtagcatatgctggcactggtgttaccatgtccaggcaggctgattcttgggcctccagacagcttgcttatgtgctagcagtggcagcagtgggttggatgcatggatgggtccttgggccgctgggcagtgtgcctgacatggatgatggtagtagcaatggtgggacagcctttgggctctcagacagcacttcctaatataagtggtggttgtgacaggctgggcaagccagtccccaagctcccaggtggcacatgcaagtgagcgctggtggtagtggcatgctgggtgggcacatcctcaggtccctgggaggagtgcatagatggctggcattggtagaatgggttgggggggaccaccaggcccccagatggtatgcttgggcactgagggtgcagtgccaggccacacagtgtgcatggacacaggctatggtgaatagtgtggggtaatttatgatggtgggtggggaaagcctgtactcagggtacatgcaagttcatgaacccctgccttattgatgcatccagctggtattgcactcctgcagccctcttgggttggtgggggttgtgggattcggcagagctgaagggatgtggagatacaagatctgttgggccccagggcaggatgcagacttttaggggctgggctctcaaaatggcaccatgctacagctgctcaggacctggtgggtgtgtgagacccagtgtgggctctttctctggagcaatgccattatgtggcatcctggcaaatccctatgtaagtctcagggcatgtgaagaataagaggctctcccatggctagggtttcaggtccatgctgaatccatggtggaaatgtagacagctgggaatctctcatttaccatttccctggactggggagtctctgtgggctcccgactgattctagctgggccagctgcctcccttcccttgccttctgtgcctcagatatttcctgtcgcttctttgctgaattccagtygcttctttgctgaattccagtgtctctctcagatgtcccattcaaaatgttgttacctctcactcttttgggttctttgtggaagaggcaagtgtcaggtgcctctagtcagccctcttgagcctgcccactttttactgattgatcaattattaatgattataacaacccccccacctatgaaccatgaacccactacctgacacagaaactagaacatcatcaataatttaccatgaacttcttggggcagccactgttgggattatgtgccctttattctgttactttctagaaaaaatagagttgagtcatatctctttgtattcctgaaatgtgtgttttctaatttagtggttttgaatgatattaaaagggaattattctgagtaatcttctgagacttatgtctcccactctgtacagagttgctaagggtcctctgcatttcttgtgggtgtattctgtattcagcgtgcctccttcctggggttctgctgtttctacttcaggttaaatgccccccagtagatgggcaggcctgttgttcccaagagtctgctattacagatggtgctgatataaacatttgcaaacctattccacaatttgtttgttagtgttctgggggtaggacctctgggggtgggactgctggggcaaagggcatccggatgttcatcccaacaaggcacgccacctcctgcgggtgatccgtaagccgaggaggagaatggtgggaatactgggatggctgttgccagtagcaatggagtgtgctggaacctgatgtcatggtctcggttttcagcctggcagcctcagtccaggctccaggctccttagtccatactgcaggcacacagctagcctctctttaactgaaagtacagccctccaacccc

SEQ ID NO: 93425 - DNA, 13122 bp, Homo sapiens
atgaaatcatgtcctttgcagcaacatgggtgcagctggaggccattatcctaagcaaattcatgcaggaacagaaaaccaaatactggatgttctcacttataaatgggagaatgggagctaaacattgggtacccatagacataaagatggcaacaccagaaacaggactactggaagtgggaggagagaagggaggcaagggctgaaaaatgcactattgagtactatgattagtacacgggtgatgggatcaatcataccccaaacctcagcatcacacagtgtatccaggtaacaaacctgcacatgtaccccttgaatctaaaataaaagttaaaattgtaaaaaaaaaaaaaaaaccagcaatcacaatataaatccacaccaaatgaaatcaatgtttctataggatcttctatggaatctatattctatgatttgaaaaccctctaacaaagatttttaaataaagagattaatacatgactcatattgacaacaaggaatataaaagtataaaacaaaacaaaggcagatatgaaacaggaacagatggatatgaaaaaaatcaattaaaatcctagaaatgaaaactacagtcattgagatttttttaaaaaaattcaacatccaaggtaaaaaccagactagaacagctgaagatagatttggtaattggagaacagtactttatttatttatttatttatttatttatttatttatttatttttgagacagtctcaatgtctcaacctgccacctaggctggagtgtagtggcacaatctcagctcactgcaaactccgcctcctgggttcaagcaattctcatgcctcagcctcccgagtggctgggattacaggcagacaccaccaggcctggctaatttttgtatgtttaatatctttgccatgtcggccaggctggtcttcaactcctggcctcaagtgatccacctgccttgacctcccaaagtgatgggattacaggtatgagccaccgtgtccagccaacaggagaacagtactaaggaattctcccaaaatacagcacagagaggcaacaagattaaaaagattaattaaaagtcataaagaacagattataggccctaatattcgtctagaggaagtttcaaaagaaaattaaggtaatagaaaaaaagcaatattcagagacaagagttgagaattttacagaaaagacataaattttcatgtcaaaaatgatctccaaagacgaagtaagataaataaaaataaatctataccagaaacacttcagaaaaatagaagaatatttaggataaagagaaaatattaaacctacaaattccttctttgggtttataatagcatacttgccattcagtcggcccatcagccattgtcagcaaatgctgatttcccacttccaccacagaaagagaagaaactgagatacaaataaagtatcctcagccctccaaacctagtaagggaggccaatgtgtgaatcaataattatggcagtgtgacagggctacaatgtatacgtggacaaggtgctagggacaagtagagggtgaccactttacagaacagtagaaaagacctccttttctactggctcatatctgtaattctaacattttgggaggccgaggtgggaggatcacttgaggccaggagtttgagaccagcctgggcaacatacagagatcccttctctacattaaaaagaaagaaagaaagaaaattagctagtcatggtggcaaacacttgtagtccccactactcaggagacaacttgagcccaggagttggaagctgcagtgagctgtgatcacaccattacactccaaccggggcaatggagtgagagcccatcttctaaaataaataaataaataaataaataaataaataaataaataaataaatacggaccttcctagtgagtatctgaatggagctttatttgaacatgaatatctgttctaggaaatgaaaataataaaagttaaaatctatcaagagctgatagtagtaactaatatcgacaggtaacttactatgtgactaactctcagacatatctctaatcctcacaaccatcctcagagttaagtccattttaccaaagagaaaagtaaggtttagggtgatgaagtaactttcctgaagtcataaagctaataaactagaaagtggaggttggctttaatttctttgactgaccttagcatatacttaccagtgatttcatttgatgagaaccttaagagagaatagttctgttgacacagcactgaaagggctaaactggttgctttcccttttttgtttactgtgctttgtcgtccatctgagtacaataaataaagagctccgtgggaagactagccagctgggtaaaagtcacatttaagcttaaaagaattcatgctttgcttcttgctatcatgattaccaacaggattacatttgttgaaaaggaacacaaggctaaatattcaactattttaaataaaagtttttggtttaaattcacaatgatacaacttctaacaacaaggcttatgatgacctaaagcctgtaacatatgtttgttaaaggaaactatttgttcatcaaaaatatttgttacaggaaattacatttgctcacttaagctataaatgaactcagaagcctgtgttaattaacccaccaaccatgagtgcattgaaattgcactaatttattaatctaatccaccatcatatattaggtgggttcaccgattagagaattctgactctcgatgtctgacactagtctgaaaattaaatctgatccacttttaagctagaatgtttcctataatgcttggcccctgtatcatactactaggaactgcctcatataccccaaatccatcccttctgtgagtgtattaatgcccccaaattttagttatttggctttatagccttgacatggctaatcaacatctagagcaatttaaaaaatatttcctattttatttttcttgaatgtattttttccagatatcttggctttattcaattcattataattgccttgaaaaggaagacctcagacattgctttttccttctattcctagggttcccgctttgtctaaacctttttcaagggccaaatacttgatgttttctctctttctatgagaatctaaactcaaaaaacaacctccccccactgcccaacaaaacctagtgtaaatataaataaatgtattatgtcttccacagtatttgcctttcatattttaatttatatctcatctatagcttaaaggcttagttcttagtctaagatattcaaaatctggtgagcaaataggtaggcaactggtatgagcacatccctgagtgttggaggatacaatgggagaggatacaatggggagtattatactaatacagaaatcggtcattagtataaatgtgaagcacctcattcctaaattaggtgactgaaaatgaaaatgaaaagctacaatggcaagaatatcaccaatgaatgctacttctagtaaaatcacttttttttttttttttagagacagggtagagtgcagtggcacaatcatagctcactgcaacctcaaactcttgggctcaagctatctttccacctcagccccccatcagccatgcctagctaattttcttttctttctttttctttttttttaatgtagagacagggtctcactatgttgcccaggctggtcttgaactcctgacctcaggaaatcctcccacagtgctgggattacaggagtgagccaccacactcagcctaacataacttttaataacaacattgaaatctgtctctttaaaatgtggccctgtttttaaaattatacctttaattgaaatgtatgtgtgtatgtgtatatgaaatagtttatttaaataaaattaattgcagtttcatgacttagctaattgagaattaaaaaaacacacaaatctataatccatacaattcctagaatctgaattggttttaaaagaatactgtaatttgtgtaaataatttgatgatattttaaaactttcatatttgattagatatttttcagataattttaattaagttcacactagtatttcagtgaaaccccatttggatatttttaagactcaactaggagaggctgtttagtatactaatagcatatgactaaatatcaggatatattatttagatgagttctaattgtgttcagccataaattggatatgtaaccttacctaaataacttaatatctctgagctttgcctccaagtctctgtaagagagaaaatacctgctcttcatttttcataagatgctttaaggagatcaaacaagatcatgcatatggaaatactctattattaaaatctaatacttctcaagcaattggataccatacagataagaatgaactctatctcacaatatacacaaaagctaattctagatggatcacagacctagttaaaactataaatatctggaagaaaacatagaacatattccttgggataggcaagtttctctgacaaggtaaaaaaggcattaaccatatgtattagtccactttcacactgctgataaagacatatcaaagactcggcaatttacaaaagaaagaggtttaatggacttacagttccacatggctagggaggcctcacaatcatggcagaaggcaaggaagagcaagtcacatcttatgtggatggtggcaggcaaagaaagagagcttgtgcagggaaactcccccttataaaaccaccagatcttatgagacttattcactatcatgagaacagcacacaaaagacctgcccccatgattcaattcctcccacagagtccctcccacaagacatggaattcacgatgagatatgggtggggacacagctaaactatatcaccataaaagaaaaacagattgaacttcatgaaaattaccaacttaaaactatttttaccccatgttctcctacaaatagatcttgagagcttgtttggaggtcctaaaaagggagtgcagctactcctatacccttgaccaaagaaaaatcctcttctatcagcaaaggtcatcctctttgaccaagaatccaactttaggagagacacacatacagcggtgaggaaggaaaaggactcctgcctagccagccagattgccctcacatccaaaatgacaaacttctactcatcataagacaacattagaaatggaaaagacaagctacagaatttttgtagcttgtaggatggcagaaaatatctataatatgtctatctgacaaagaactcatatccaaaatatgtaaaaattcctagaaatcaataataaaaagataaaatgttaaaaataggcaaaatatttgagcaggcaatacttgaacaggcaaaagatgtccttgtgggcaaaaatcatatgaaaaggcacttaacaacttttcagggaaatgcaaattaaaaccaaattgaaacaacattatactcccaacaaaatggctaaattgaaaataataacattcctaagtgttgataaggatgtgaacaacaaattctcatatattggtagtgaaatcacttaagaaaactttagtttctagtcatatttaatggtttctacaacccagaaatttcactcttcaggatataccaaagagaaccgaatgcatatcgcacaggaatgttcataagagttttattcacaataactcaaagctataagcatcccaaatattatccatcagcaaaagatggataaactgtggtatgcacatacaattgaatacaactcagcaataaaaacaaatgatattctgatatacataacaatatggatgactctcagaaacattatgttgagagaagccagaaactgaagaacacatacggtatgcttccatttatataaattttaagaacaaatgcaacaaatctatacagttaaagaaattcggtcggtcgcagcccgctcgggcccgttcgcgcccgtcctgtcggccacgtcccgcggggtggcgggcgcgctgcggcccttggtgcaggccacggtgcccgccaccccggagcagcctgtgttggacctgaagcggcccttcctcagccgggagtcgctgagcggccaggccgtgcgccggcctttggtcgcctccgtgggcctcaatgtmcctgcttctgtttgttattcccacacagacgtcaaggtgcctgacttctctgaataccgccgccttgaagttttagatagtacgaagtcttcaagagaaagcascgaggctaggaaaggtttctcctatttggtaactggagtaactactgtgggtgtcgcatatgctgccaagaatgccgtcacccagttcgtttccagcatgagtgcttctgctgatgtgttggccctggcgaaaatcgaaatcaagttatccgatattccagaaggcaagaacatggctttcaaatggagaggcaaacccctgtttgtacgtcatagaacccagaaggaaattaagcaggaagctgcagttgaattatcacagttgagggacccacagcatgatctagatcgagtaaagaaacctgaatgggttatcctgataggtgtttgcactcatcttggttgtgtacccattgcaaatgcaggagattttggtggttattactgcccttgccatgggtcacactatgatgcatctggcaggatcagattgggtcctgctactctcaaccttgaagtccccacgtatgagttcaccagtgacgatatggtgattgttggttagagacttggactcaagtcataggcttctttcagtctttatgtcacctcaggagacttatttgagaggaagccttctgtacttgaagttgatttgaaatatgtaagaattgatgatgtatttgcaaacattaatgtgaaataaattgaatttaatgttgaatactttcaggcattcacttaataaagccactgttaagcactgttatgctcagtcatacacgcgaaaggtacaacgtcttttagctaattctaattaaaaattacagactggtgtacaagatacttgtgaaatctgtaactgactttattttcttgcccaaatatttgcttcctgctttgcgtcagggacgcagattctgcaaggtcattgttgggatgaagtaaaattaacgggtcatctaaaaaaaaaaaaaaaaaaaagaaattcaaaaagtagttgcctctggagaggagggaaagcaagcagggatgaaggaactggatgaggtgattaaaatgttctttattgtgctatgggtgatggttccactcatccaaattcatccaactgtatacttaagatttaagtatgtcataatatgtaaattatatttcaataaagtggttagcataaaactattttaaaaagtaatttgtagtgaagaaagggaaatttttgtattagtcaactctgacatttctattttttatctttctaaaaaaagtcaattgctttaaatttgctaaaggtataaaaatatcaaggtattaatcattcattcatcaaatatatattgagtgatcctaccccaaggcaaggtactaagtgctaggaacactgttcttgcccttgaaaaattcagagttttgcaagggataaagatgtgtacataaatggactgtgacagaggcatacagacattgtaggcataaaagagagaatgtcagactacctgcgaatgttaacgagattcaggacgatcacttgggaaccttgaatcacctgtggtaactatggtgcccactcctgtgaggttgagcctaaattgtaatgggtcttaacctaagataaaagagactgacccagccttgccaactgtttctagctgtccacccaagaccttcaaattagtgaaggatttttaaagcctcaagagccacaataaagagcacatggtgcatgcttcttgccatccttgacctaaacaacttagaaacggataaaaaaaaggataaacctgacttctgatccaaaatgtaaaaagttggagtcgccactccatcctaacaagtaaaaagctgaacatacagaaaaatcaactcttcttggatccgtcagagaggtgtagtcacagggcaaaccacttagccccacactgagactgacaggcaaatacagtacagagaatcatggcttgctggagcagaaacctccaaggaaacaagtgctgaggtcgggaagcctgaactataactgagagataaaaactccaggggaagtcttcagggcctccctcacttttgttttacctcaaggatctcgaccaagttctcgcagtaaatactggagaaaaatcccctggtgcttctagcaggggaaggaaaaaaaggaaccattcagaattttccagagcactctgttcttaacaagttctgcccttaggagaagctagttaaccaaagcctaacctgatggggtcttaacagagcctaactgatctggaagatcagtaagcctaacttactgccacatcactaaaggcttatttacctgagatcctcttactgtatctcatgcccagctatcaagaaaaaatcataagacatactaaaaggaaaaaatcacagtttgaggagacagaacaagtaacaaaacccggtgcagatagggccgagatattagaattattagactaggaatttaaaataactatgattaatatgtaagggctctaacagataatgtggacagcatgcagcatagatgggtgatgtaagcatgagacagaaattctaagaaggaatcaaaaagaaatgctagcgatcaaaaatattgtaacagaaatgaagaatgcctttggcaggctttctgggagactggacacagctgaggaaagaatctttgagctggaggacatctcaatagaaaccactaaaactgaaaagcaaagagaaaaaccgaatgacaacaacaataacaagaacagaatatccaagaactatgggacaactataaaaggtgtaacatatgtgtaatggaaattaacaaagaagagagacacagtaacaggagaaatatgtgaaacagtcactgataatttccccaaattagtgttatacactaaccacacatcaaggaagctcagagaacattaagcaggataaatggaaatttttttttcaaaaaaaaaaaaatactcctgaaagaaaccagaggcaaaaaacaccttacgtatagaggaacaaagataagaattacattcaacttctcagaaaccaaaactaagaaagtgaaggagaaataaagactttttagccaaacaaaaattgagggaatttgtggccagtaacctaccttgcaaaaaatattcaaagaaattctttagagaaacagaaaatgataaagttcagaaactcagatctgcataaagaaatgaactgcatcagaaaaggaataagtgaaaataaaaactttcttattatttattaataaaataatagcaacaatgtatttgattatacatgcttacacatatgcttatgtataagcaaaataagtaacagcaatgatacaagggacaggaagaagaaatcagaattattttattattataaggtactagcactacccatgaggcaatatagtgttattcattaaaattaaaatttctgatctgcaaaagacacggtcaagaaaatgaaaatatgagccacagactgggagaaaatatttgcaaaaaaaaatgagacgaaggagtgttatctgaaatatacacagaattcttaaaactcaacagtaaaaacaaacaacctgacttaagaaagggcctaaaaccttaacagacacctcattaaagaagatatacaggccgggcacggtggctcactcctgtaatcccagcactttgggaggctgaggcgggcggatcacgaggtcaggagatcgagaccatcctggctaacatggtgaaaccccatctctactaaaaaataaaaaaaattagctcggtgtggtggtgggtacctgtagtcccagctacttgggaggctgaggcaggagaatggtgggaacccaggaggcagagcttgcggtgagccaagattgcaccactgcactccagcctgggtgacagagtgagactctgtctcaaaaaaaaaaaaaaaaaaaaaaaaaaagatatacagatggcaagtaagcatatgaaagatcctccacatcatacatcatcagagacatgcacactaaaataacaataagagatgctacatacatacctattaggatgaccaaaatccagaacactgacaacaccaaatgctggtaaagatgcagagcatcaggaactctcattattgctggtgggaatgcaaaatggggctgccactttaaaagacagtttggcagtttcttataaaactaaacactcttgccatacaattgagtacatcatgctccttggtatttactccaaggagttgaaaattattgtccacataaaaaacttcatacagttgtttatttgtaattgtcaaaacttggaagcaatcaaggtaacgttcagtaggtgaatggataaatttactgtgattcatcccaacaatgggctactattaagtgctaaaaggaaatgaggctgggcgcaatggctcatgcctataattccaacaatttgggaagccaagacaggaggattgcttgaggccacaaattcaagaccagcctgggcaatgtagtgagactctgtctccacaaaaaattttaaaatgagctgggcatggtggtgtgcacctacagtcccagctactctggaagctgattctcctctgagaggattgcttaagccaaggagttcaaggcttcagtgacttctgataatgccactgcactccagcccagtgacagaaacctacttaaaaagggtacatgttaaatgattccaactaaatgacattttggaaaaggaaaaattatggagacagtgaaaagatcaatgcttgcaggggctgaaggagggaggaaaaaataagcacagcacagaaaaattttagggcagtgaaaccactctgtgtgatattataatgatgaatacatgtcattgtacatttgtccaaacctataaaatgtacaacaccaagagtgcaccttaaagtaagctatggactttgggtaaaaatgatacataactgtacgttcatcgattgtaacaaatgtaccactttggttggggatgtttataatgggggaggctacgcatgtacaggggaagagggtatttgggaacactcagtattttcctctcagttttgctgtgaatctgaaactgctctaaaaaacgaagtttatttttaaaaaactttttaataaaaaggatacatttctgaattcttgtcccaggatagtgatcagtattagttcagtctcagtcccttccatcctgctatatgtaactggttaaatgtttggtcaaagctggaaacatgacacatgctgacaggatggagtaaaggagtgaacagaatgatcaggatgaggatcacatccttaattccttcattcaacaatatactgtagttgttgagaacatgtattctggagccaaaatgcttagattgcaatcttgactctgctaactagctgtgtggagagttattcaacctctgtgcaccttggtttccccatcagcaaaaaggagccaacaacatttcccatctcaaagggttgttgtgaagattaaatgaattcatacatgccaagtgttgagaatgccacttgttacaaagtgcagtaaacatgcttgctaataaaagagcccaaaagttagcaaatatagaacaaatttatttttaaacgctacgttagttacattttcaaacaatatgctcaatatgtccttctatagcctagacactgtttcctgtgaagtacctctaactttaaagcaatgtatccaactggtgactcttttaaaactacaataagtacaatatagaatatcaccaaagtctggaaacacagggaaaatcatgaatttattttttcagattaacaattagactcactgcttaaattcagagatatatcacctgaaaagctgtctagagattaaggaaaaatgcgttgagaaattatttgaaaaagtaacttattattctccgatgtttcccaatttttctgatttgttttcccaatgtttttcctactagtataactattattaattactgagcatgtgccatgtgacaggcactgctgaggatactggagatggggcatagacaaagcggatataaaaggcaaaatgtccctgctgtcgtgaaatttacactttagtagggatagacaataaacacatcctaaaatagaatatacactatgtcagatgagaagcgctatggggaaaaacgaaacagaaggtggccagggcatatcagtacaacaaggaggccaggctgcttttttataactagggtagacctagaaggcctctaataagactttctgagaagagatccaaaggaggtggaagagccatgcaggtttctggaaaacagcattccaggcaaaggcaacgcaagtgtaaagaccaaataagagagccaagaaagcctttttttctatagtatcttcttttgtcttcatctctcttgataacctgtaactagggcagactccagatatagattactcggaccaaataatttctctttcattcatttctcagtacagacttgacactgccttctttcttctctgagacaacaaaatcatttttatctagcagtttttctttcttgtttttttctatgacttccatttgataaaaatttactgtctactctgtgcaggcctgatggtgaaaggatgattaacatatggtacatgccctcacaatctagttaaaatgagacatataaaatcaataaaatataccataaaaagcactgctttgatattatgaataaagtactacagcaattaattctgcccattgagggaaagagtagttggggatagagggaaaaaggattctgagctaggatttggagactaagtaggagttcaaaacatggacagcgataaaaaaatattccaaggggaa

SEQ ID NO: 93426 - DNA, 19566 bp, Homo sapiens
gtttcagtgtttgttctgaagggaaaaaggaagtaattctggctcagacgaacaagtttccaccaccttcaaaaccccaaggaacagatgatcagcatgaacatcagggtgcagtggccccaggcagtggggtaaggtgaaaaatggaacacccattcttccctggccgctgcacaaaatacaagagtcagcatccgtccagctcttgtaaggcatgcacacagtccatatattgatgacaaacagcataggaaggataggagggtggtggaatctggggcaagagcccttcccccttgtgtgtcagcctagtgaaacttcacacctataaaaccaccagggcaattttcacaaggaaggtaggaaaaggacatatctccaacaggcagcaaggggtgtttgaagaaagagacgagggaatcggatgggccagcagtctcaactgaagaagcaaaaaggccttggagtgttgtagccaacaaaatgtgccatcccttcatatacctgagggtgccaggtaggcagagctcctgcaccaagctctgctgcacctcatgygatgcaccacatggagacatcaaaggctcagagggaagaacaaggaaacctgacctggtggggacttttgggtcccttttctccacctaggtggctctgcggtttacctggcaaggaatgaatgaacacacaggaaagtgctcagccactggcctaaagactagatgtatataagtacagagaatggagctaagctgaagtcactgggaaaagccacaggagcccatggggcttgaatgaggacttagattcctgggtccaggtagggaacgcagcctgggcaatggtgcagaggaggatgaggggtatgaggagctccttgcccccaccttctgggaagcgtgtacagagggcagatgagggagctcaggtgcaagagtcagccacagacctgacaggcagggtccagtggttggggtggggtgcggagcccatgatgtcctggtgagaactgacaggaaagtggccagaggccaactcttgtgtgaaatctcttgatttctaaatattaatgactaactctaaatttgaaaaagcagcgtgaagacctgctgcaggagggggatgcatggggtagtgttcaaattgtatgtgtaatattttataccttaaaaagtgggtggacaggtgtcagcagcaaatctgttcattcttggtgatatgccacaaatatatgttattataccattttctcaaattttctgtatgtttatcataggttataattttttaaataaattaaactttgtggggggaaaagcatgcaaactaacaaaacaagtctgcaggctggacccaggactaatacttccaattttccatttctgctcccagtttagtggtccagtgggggagatgaaatatgagacatgttaggtgctgtgcacagtaaatgtgcagagtgccataagaaaggaaagtgcttccagaggatttattccattggggatttatagggtccttgcatttgggcaaggatgacctcacccacagccttggcagcaccagtagatgcggggatgatattctggagagacctgtgatcgtcatgccacagcttcccagaggggctatccaaagtcttctggctggcagtgatggtgtgcaccatgatcacgagtccttccacgataccaaaattgtcatggatgaccttggacaggggtgctaaacagttggtggtacaggagtcattgctgatgatcttgaacctgttgtcatacttctcatggctcacatccatcagaaacctggggacgttagcagctggggcagagatgatggcccttttggctcccctctgaaagcaagccccaaccttctccatggtagtgaagacactgatggactccacaatgtactcagtgccagtatcgccctatttgattttggtaggatctagctttccattaatgacaagcttcccattctcagccttgacagtgccatggaattcgccatgggtggaatcatactggaacatgtaggccttgtagttgagctaaatgaaggggtcatcgatggcgataatatccactttaccagagttaaaagtagccctggtgaccagacacccaatacagccaaatccgttgactcaggccctcaacttcaccctggtgtctcagggatatggctggagcaaaacaggacattgtggccgcctgtggaaaaggaagagaggagaactagctacagcatattatttaacacatggttatcatatcgagaaagtcttcacaaactctgatgccaatagtgtatgactcagattggcatcactttacacagcatgctgaaattccctgagcatgtagatgattcagttgtctcagtatcacttctttaaaagactatccttttccttcattgaatttacttttgtcaaaatcaagtggccataagaatttaggccattaactcacacataagcaaaaattccctcaaaattgattataggcctaaatgtaagggttaaattatgcacatcttagaagaaagcatagattaatatattcatgaccttgaattaggcaaaaccccaccttttcctggtcaaagggaaaaagtttaaaaatgagacatgatcaaaactaaaaatgtttgcattttgaaagacatcaataaaaaaatgaaaagataagccacagactaagaaaaaaatttcaaatcatgtatttgataaagaattgtatctataatataaaatatacttacaattaaacaacaaaaagataaataacccaattttaaaatggggaagatatttgaatagccatttcaccaaaaagtgtaggaatggccaataaagcacatgaaaagatggtcagcatcatcagtcagcagggaagtgcaaatcaaaactacaatgtgataccacttcttacccactagaatgctataataaaaaggaaagacagtaacaattggaggaactgaaaacacaatgatgtgaaaaattgaaatactcatgcattattgatgggacaggcagccacattggaaaacaatttggtagtttcttaaaacattaaagatacatttaccatatgacctagcagtttcactcctacctgtctactgcaaagaagtaaaaatgtatgtcagcacgacaagtgaatgtgaatatttacatcagatttatccataatagtccaaaaagtggaaacacattgaatgtctatcaactgataagtgaataaactaatgggagccatccatacaatttaataggatttgacacctaaaaggaacgaaatattgatacatgctacaacatagatgaaccacaaacgtatattaagctaagtgaaagaagacggatacaaaggaccacatattgtatgattctatttatatggtgtccagaaaatcaaatctgtggagtcagaaaatcaattaggggcttcctagagctggggggtttggaataaggggtggcaactgatgagcatgaggaattccttaggaatgatagaaatgttccaaaacaggattgtgatgatggtcacacaactctaaaatgttactaaaagtaattgaactgtgccttaaaacaggtgaatgttatgatatgtcaattatgcctcagtaaagctgtttaaaaataaaagaaagttggtagtttggctcgcatcagtcttgccctttgttttatttctcattttcctaaagaaagtgagatatttattggtttaaagaaagcttatatttattggttccactcagagactccaagagagacactggttggtctattagcctccagaactctcaacagctgagggaatgagcaatactgtcctgaaggagatgagggctatctaaggtgcactccagcacctgctacagcaggcaaaggcctgcgatgcacctgggtggcctcagacagtgctccacaagtctcagcaagacccagggcctgtagctagttctgatagcttcagagaacaagctgctacatcttgcagcacaaggccaacctttcctaggcaagtgggtttgaagcactggtagtcaggttccaagtattaggtgaatgtctgcaatgtgggaagagggcaagacccagattggggtttcaaaccaaatcattggtagagtatgacttccaacaacttcagaaagcattcttttcaagtgcttattgcattttcaccaacatagaccatatgctgcatcataaaacaagtctcaatatatatccaaggatcaaaatcatacagagtatatgctctggccacaatagtatttaattagaaatccataacaataagatatctagaaaactcccaatcctggaaaacaagcaacatacgttgaataacactttggtcatagacgaactcacaagaaaaaattcaaaacatcattaactgagtgatgataacccagtgcctcaaaatgttggatacagctgacacagtgcttagagagaaatttacaactttaaatgcctatagtggaagtgagcaaaggactaaagtcaattatcaatgctttcatcataagaatactgaaaaataagagtataataaacccaaagttaataaatgtaatccaattatgaaaatcatgaaatataaaaaagaacaaacaatagagaaaatgaatagttaatttttctgtacaccatgcacaaaactaaattttaaaatgattttatatttaaacatatatccagaaccacagagatcttagaagaataaattatgacaatataggaaattgaaagagaaaatgggaattctgtgggaataaaaatcagaaagtagttgcctatgagactgattgggtgaagggcagggaaataacagggaacagttggaaaacaactttatggagtgaaggaaatggtctatatcttctttgagtggtacttacatgggcatatataactctcaaagttcattggcactgaacacttaagatctgggcattttaatgcatacacattacatcttgatttttttaaaatagaggaaagtgttttggggagcttatggtagtgatattgggcagttgtcaggcataggctacagaagcattcacagcatattcagttcaggaatttgctgagaatggttttgcagccaaaaatatgggaaaagttcaaacatctatgataagagtcactgggtcatacaaccagaaatccccactcttgtggtacaggccatattattaagcagttatcactagatagcttcccttcagtgatgttctttgtctaggaatccagagctctccaggggaaaattgcaattgaggttttggatatattgggtaggagagaaagtcacctcacataaaacttagtgattagagctgtcaacatcgcaaatttctagaccttgcaagacaggagcaacatctcaaatgatagtctgagagaggagataatgggctaatgtggatttccttccgaatgtattcactgcacraggtcagaattcacattgcacttgaagatttctcccagtctactttaagttcacagattgcagatcccagagaactggtatcaactgaccagtgtcctgttaagtctaaacccaagactctttgtcacattgcagccttgaatttctctttctgttcctgggagataaaacttaaaggtcactattcttctgagaaaagggatcctggaggagcagagagcaatgagtttgtggcaggagttcatggtgataatggctgagccagaagccacagtgcacaaagctccaggcttgcctcaaaggatgaggtgaccagcaccctgactactctgtccagctattaataatctaactaatggttagagctatttcgttttctttcagctacttctggcaatggtgaggatatggaatttttgcaaaaaaaaaatgggtggaagtaaaaaagcatctgtgtgagtgtataaatatctgatctccctttttagccctctccagggacaccctagaataagatcttctccccagcatcttctgtttcctggagagtgtttcctgctmcytcrgattggycatgacaggctggagctgccttgtgacaggagcaggagggtttctgggtcagaggatcatctscctgttagtggaggagacagagctgaaggagatcagggccttggacaggccttcagaccaggattgagggaggaattttctagtaagtaaacttgagtcatagttgtgtggctccagcttaaaccctgcattggtgtggggaggtggaccttgtctagcaagttatggaaagtcgtagcaaaatctaggccaatcccacatccaaagtcatcaaaaaggaaatattaaatagcataaaatttcatagtgtgaaatatacttaaaggagtgtccagagactggattctggccctgactcagaacttgagaggcagccacctcagcctccgggcctctcttcwtctattaagaaaatcctacatctgttatctttcttgcctacaactcttttatgtctgaagctttttgtcttggcgattgctttgcaacattcacaaaggacaccattaccctaaagacctcaccagtggatcctgcctttctagactgtgctggactttgttttgtttggaagcttccttaggatttttagtgaaggcaaaataaaagggagcaaaggtaaagatgagtgtataagtgtttgtgtggtttgtgtgtgtgtgtcagagagagagagaaaatgaggaggagagagaatgagaaagtctgaatgaatgagaaagagagaggataagagagagagagggcatcagtgagagggagagagtgtgcacaagtgcacagcacagagcagaaacagagtaggaggcagtatgaggccagatatgcctcatttagatttcttataaatggcttttttttaaaccatttctctctgtcgctcaataccccaaaggaattgattgcagagtttgctgtagcaactccttgtgcaaataaccccgtgaggaaggtacaaaatgggtcacatccaactggacaatgaacccaccaaggtctagaaacataaagttacttgccaatgccatctgatcaatgtatagcaacgctcaggccagagcttccttccagaggctccatcacttggccattgggttgatgcttggcaaagtgggtcttcagactctctctttgcctctctgtgtgccccaaaccaattccctgtccacctccccaacccaggggtttggggggactgtgtatctacatgtgggctctggctgcccagtgggtactcccctgcccacagaaaagcccccacttgacagcactcaggaccacacccaacaatctgttcttctttcactcttctctgacctcttcaaatgtccaatttcctccaccttctgttttaatggtgtctttgattaacataagaccaatattaaatgtttgtaatctttatatctcaccaatatttgctgtaacacctgataccagaaaaaacaaacaaacaaacaaacaaacaaaaaacaatgctcagcctaagggaaccattctcctatggtgaaaattcagaaggtataataaatgggcaggggcctgcatgaagataaaaacagagaatcttttcagtgttctttctgtgtcaggcactgtgctaaaccttttgcatgtgtcgactcatttgctcttcataacaaccctatgagatcggttttttattatcctcctttcttacagatgaggagacaaccagagagaggttaattaacttgttcaaggttccgcagttagaatatggtaaagctggatttgaactcacgcagtctagtgcagcatctgtgcgcttaagcagtagttagtctagcagcttctagaaggagtaagctatagctccatcaacaaagtcccctttcctggtgcctcttgatccctgcaaactcgttcgcaaagagtccttttatctctgctttggacttcttccgctttgaaatagcaatttctttgagccagtctgtctgaagtcggcagcaaaggagaagcagaggaaggcagcagagaagggagaagagggggaaatacaaccagagaaaattccactctcaggctgttaccacctcctccccagcagcctcttccctgactcctcccactgaaggcccttcttggagttgcctgactatgggaaggggctgggagtagacaaaacatggcacaggcattaggagagtaaatggtcccgcctgtaccccaggaaggaatttctctagccttgatttttttcactctgaatttcacccttacaattctttggactttgttgccaatttcagttaaactggcttattcttactctttctcagaaaagttgattctaaacagccagtcctgcacctggggtgcagaatacctgagcctcagtttcctcaccaataaagtgggactcaaaatacctacctcacaagatagctgtaaaaggaaataagcaagctgtgagccgtatgcagattataaagcacaaatgagtgtaaagtatttatctgagctccatgtagcatggtgttcattttgtgggctaattccgctgacaactttactggcagcaatacttcctgtggatttcagaggagcctgaagatatggatgttgtatctgctgcccttggctagacactagacagctgggatgttaattcatcggcggccaactcattttcggcattgctatctgcttttgatgatatctgataatagtttttcaataacattcatcatttatgcctatcctcaattccctagtaatggctccactctcctcctacttgcccaagcaggaaaccataggggtgattttatcttctccttttcctctcagcccagctcaaataggtaccaggaccttcaaggtaaggtctgaaattctaacctggtgtatctctcccctcctctgcttccactgctggaccctggttccagtcctcatttaaactttggcacagacattctgattaatcacttgatcacctggctctctcatttcccctgtaccagtccgttttatatcctcaagccaaggttaactacctacaccacaacacaactctgcctctgtttctctctctctttttcttttttttttttttttttgagaaagggtcttgctctaccccccaggctggagtgcagaggtgcaatctcagctcactgccaccttcacctcttgggctccatccatctccatccatctttctgcctcagcctcctgagtagtgaagactatagacagatgccaccacacagggctaatttttgtatttttagaagacacggggtttcatcaggttgtccaggctggtctcaatcctctaggctcaaactagccagccgccttggcctcccaaaattccaaaaattgcttatttatatttgcaatgcaaaaagaaataggcgtgagccgccacacccgacctgtttctcttttattccaaatatcaataagcatttttctttgacatgatgctggagacccaaaatcatgattccatacctgattcctcatcacctacaaaattaaattcactttttccctcttatacccaactctccacaatcaccctaggctccttaagaaatttggtgagtgtcccatgactccagcaatgcttacattctaggcacacctgacagctcactgctcagattacttttctgaaatgagataaggtagaaacagatgtttgctctttcctrgtaaactgctgcacatgctgatttctgtgcctttgtttgcttgttctttccattgaattttgccctccattctaacaccccactctaaccgtccttgagcacctatgtaacatcacctttatcagaaaacttctcagctagatacagaaatcattccaatgacctaacctctgctcacacagaactccagaacaagatcaagctgacagtgctggaaggagacattctggatgagccattcctgaagagagcctgccaggacgtgtcggtcrtcatccacaccgcctgtatcattgatgtcttcggagtcactcacagacagtctatcatgaatgtcaatgtgaaaggtagggtagcctggggaggagatraagcaaggtggggaaatgaggatcagaaagaaggacaggaaggaaagagaagtctatccattgaacacctgctgtgctctgggccaagtgactttgctgatcactaccaactgggggaactcaaggctgctattttcagttttatagatgagaaaactaggactgagcaatgacaagcaacttgtccaaagtcccacagttgagtgagtaagtaagtaggagagtgcgactttaaactcactcctgtgtgactccaaaggctgtggaagctctttctaatgtggccccagtcaaaagtcaactaatctccgacttcagactcttgaaatccagctacccgttggctccccggaccagaatctgaccttccgggtgccaccatagtcatcattttgaaccttatgtgtaggctgatgagaacattcagagtcttcctgcccacctcaaagaagaaatcctctcaagagaactagcaaatctggttcacagaggtctgtcaggacagaattatccagcacatgccttcccactatatgttcttaacaataagagtttcccagtgtccagaatacagtctcttcagctcaccacagggtctgctaattacatagctgtttccagccaggtgcccaaagtgcaccctcattcagtcctcatcccttaaatgcttggtggtctttctgaatcctggctttccaacctactttaaattcagacacattttcttaaggaatcttctaatgcactctcactctctgatctccagaacccagtcttcagcaccacagcattccaacccctggcctggccctccacattcagtctactcaaactccttttcttttttttctttctttyytttttttttttttttgacagagtttcactcttgtcacccaggctggagtgcaatggcacgatctcagctcactgcaacctccacctcctgggttcaggcgattctcctgcctcagcctcccagtgtatctgagattacaggtgcctaacaccatgccaagctaatttttttttttttttttttgtatttttagtagagaggggtttcaccatgttggccaggcaggtcttaaattcctgacctcaggtgatccacccacctctgcctcccaaagtgctgggattataggcttgagccattgtacccggcctcaaactccttttctaaagcaactaattgcttttgagtcttcagcaccatctaaaaaaaaaaaaccttttccagttgctacttacccatacctctaagtacccctacaatgcaaggaggatgctaagagtaaccagttttttattttaattcctgttctccacagctccatacaacaggggatatgaaatgacaaggaaagtgttaragacatctgtttcctaaaaccattatcactcccaggcttagaaaatacttcacaatgttgatcaattcccccttgaaggtaaactaactccaratttgctccctcgttagattaatttttgaaagcctaagactgtctctccagaaattcaaattgcacagagactttaaatwgggagcctctttcccagggaacacrccatcaggaaaagagtgggtctccagcatgttcccacaacccattgtttactcagtgactccagagatggtccttgtgacaaagttttattagtcctcaacaaaatgaggaaaatgtcaacaatttcatgtatattgaagagtgtatattgcctgcatactgtgtatttgtgtgtgtgtcatgtgaattcttccactgcccttttctgcctaaggattgggactatccatatactcagagtatttttaaattttaaacgatctgtctttaatggtattgatgaaaaatcataatttttcaatgtctttagttggcaaaacaaagagtgataaccctaggtcattttccaaaattaaggtacacacacacacacacacacacacgcacgtccttgaaacccaaaagtctaaaaattcttgctctccagaacccacttgtcagtttcttttcatttttgtgattttcctatggctgtagtgtggcccagtgtcagtcagagccacagaagaatgtatcctgagtctgttacaaccactgcacttgggagtggggagtggggcacatggatctgttcatgtgtttgsccctcccttagggatacttcctgacactgaaagcatgctctttctgggcgggtacccagctcctgttggaggcctgtgtccaagctactgtgccagtcttcatctacaccagtaccctccagttagccgggcccaactcctacaaggaaatcattgagaatgcccatgaagaagactttctggaaaacacatggtctgctccatatccatacagcaaaaagyttgctgagaaggctgtgctggcagctaatgggtggactcwgaaaaatggtgataccttgtacacttgtgccttaagacccatgtatatctatggggaaggaagcccatttcttactgccartataaatgaggccctgaacarcaatgggatcctgtcgagtgtcagcaagttctccacagccaacccagtctatgttggcaacgtggcctgggcccacattctggccttgagggccttgcgggaccccaagaaggccccaagtgtcctaggacagttctactatatctcagatgacacgcctcaccaaagttatgataaccttaattacatcytgagcaaagagttcggcycctgccttgattccagatgaagccttcttttattcctgatgtactggattggcttcctgctgggaatagtgagcctcctgctcaggccartttgcacctatcaaccgcccttcgactgccacacagtgacattgtcaaatagcatgttcaccttctcttacaagaaggctcagcgagatctggcatataagccactttacagctgggaggaagccaagcagaaaaccatggagtgagttggttcccttgtggaccggcacaaggaraacctgaagtccaagactcagtgctttaaggatgacagagatgtgcatgtgggtattgttaggagatgtcatcaagctccatcctcctggcttcayacagaatgtgacaagggcataagcccaggtcctgctgcctccctttcacacaatgcccaacttattgtcttcctcgtgtcatcaaaacctgcccattccctgacccaaccagaagctttctgtcctaatcatataccagaggacagacaatgtgatttgctttttccaaatctcagtggctgattctgaacaactgtggtctcttttatcttaagggtctcttttaactgctagagctctccatttctcctcctaaaagagaaggatttcttttcttttaagtctcctatttcttcacacagttcaaggaaatgagcaataaatgttttaatgcttaacctggagggaggtatggtttctgttaatacatactttcctcctttccctttcatttccaggtatcaccatctccaacttagaagagttgcatgaaactggggttggggggtgggcagagtagtgggagggtcaggaagggtggttgaaggctgaataagctctgcccttattgcaggcatgtacaacatgagctacatatgacatatattacctcatttaatactcatcagaaacctatgaggtggggtgactatttccattttattggtgaggaaatttgttcacagtcaactgattagtggctaggcctgctatcagaaaattgaccctgaaagtccttatctttccaccaaatcaaacagcctgaactggtcttgtcagtggtatggcagagcactggagcatggggtgccaatccttgggagaaccctagcttagctggattacctccttcttgcacaatcccatgcaggggattctctagaactcaggaaattccccgaggggcatctggaagggcttgcatgccttaccaaatggtcttgagcaggggagagcaagcaaaaatgcatccagcctccaccagctttagtgccaatttccttgaaggtctctaagacaaacctggctatatgtgtgttggccattctggtcattaacaaccttgcatttcagcctttcaaatcacatgatgaagccacatcatgggttcttgggcaagtaaagggagcaagtgtgaacttcgtcaaaatacagctcttattcagctcaaaaagtagaagtgtactatcccacatccccagatttaactgcctcttcctttttctttatccttctctcctttgaatcacatcctttcttcctttattcttccatctccttagccactttccttccctccatctcccttttaatcactggccctcttattcttctcaatgtgcctgagaagtggaggcaaatcaggacaagtttggggacttcaatgatgacatagtcaataaccaaccaaagaagcaacagtaaaaacaaacaaacaaaaaagtccagtctcaggggcatcagggacaaagttgaactgaagcaggtgaggaggttgttgtggggtcagagtgtgtggaggggaagctgtctctctctgcacctgggtgtgacggcaatgatgagagtcacacccaagatcaagatggcttctttcctacacaggaaatttacacatcattaattagttgaattggattatcaaaaaggatatagtatcagtgttcattctgatgggaaaagagaagaacattctaccccagatgaacagatttccaccactttcaaaaccccaaggaacagatgatcagcactagcatcagggtggagtggccctaggcagtggggtaaggtaaaaaatggaacacccctcctgccccgtcctctgcatgaaatgcaagagtcagcatctgtccagctcttgaaaggcatgcgcaccatccatatgttaatgcaaaattgcatgggagggaaaggagggtggtggaatctgggataagagcccttcctccttgtttttcaacctagtgaaaccccacacctatgaaccaccagggcaattttcactgggaaggaaagggaaaggacatatctccatcagtcagcaaggagtgattgaagagagatgagggaatcagatggccagcattctcaactgaacaagcatagaggccttgttgtgttgtggccaacaatatgtgccatcccttcttacacctactggtgccaggtgggcagagatcctgcaccaagccccgctgcacctcacgcaatgcatcacatgggggcagcaaaatctcagagggaagaacaaggaaagcagactcagtgggaacttttgggtccattttcttcaccagggtggctctgcaaggtacctggcaaaggaagaaatgaaagcacaggcaagtgctcagccaccagcttaagagctaggtgtatattaatacagagaatggatctgagctgaaatcactgggaaaagccacaggagcccatggggcttgaatgaggccttggattcttggatccaggagggggcacagccaggacagtggtttggaggaggataaagggcatgaagagccccsccaactgctgggaagtatgtacagagggcagatgagggagctcaggtgcaagactcagccacagaccagacaggcaggctctgagggcctgggtggggtgtggaactcgcagtggtctgctgagaacaggcaggaaagtggtgggaggccaattcttatgtgaagtattttgatttctaaatattagttaataactctaaacttgaaaaagcagtgtgaagaccagctttaagagggatgtgtgggctagtgttcaaactgcatgtgtaatattttgtatcttaaaaagtgggaggcgaggtgtcagcagcaaatccgttcattcttggtgatgtcccaaatatacattattatatcatattttaaaattttctgtatgtttaacacaggtttttgtttaataaattaaatttggctggggaataatatgcaaactaacaaaacacattcaaaggctggacccaggcttaaggcctccgattttccacttctgcccccagtctagtggtccagtgagggagataaaatatgagacatgttaggtgctgtgcacagtaaatgtgcagagtgtcatatgaaaagaaagcgcttctggaggatccattcccacaggggattcatggagtccttgcatttgggctggatatcaaaagatgggtaggatttcaacagacaggaatgtgagtgaaagtattccaggcagaggcaatgcagtctgcaaagacccagctggtaaaaggggtcacctttaggcaacaatgagaccagaccagagaacactaggccaggggaaaggtggaagatacacctagaaagacatgatgggcacagacaggatcacccggcgtcacttctagagacaccctgccttcttccttctttgccctcagagtacgagtctgtgcccctcttaaagaccacttgacaatcaattatttcacatataacatgcctcatcttttctcaaaaattggactgtatgggaaaagaatgtctcctccagcgatgaatattgatgttgatgctaaaagctgggacatcattcattatgcaatgggaattgttcagctgtccctggaagattatgatggcagtattttgtaggatggactgaaagagacgatgaggatacttcaagaatctaggtaagaaatgaaggcctgatttatgcattggtaacaaaaccaaatacaggggcaactgaggcaggcccgacgcagaatggccactagtttagacaggactgggtgtaggcacagaactctcatgcacccactttctcaagccagaaacctgaatggtagccccccactccacccacctatcattcattgctaccaaatttacctccaggacacctcttgaatgtgtcctcttcctccctggtaacatcattcctacttttatccccctgcgccccccacaggcctccccaccttggagagtcacccgtgaaagctatccgcagcagtgttgccagagttgtctctccaaactagtctcaccatgtcacgcccttccttaaatcgaaccactgggtggagccccaggactgttagggtgagcctgagcgccttagcataacagggccctctgaagccctgggccctgcctaacactccagactaattcttaccaccaatccctgtcctatccccagattctcctacttcgtgcctcaacaattttccaaaacccggggcttcctgcatgcagcatgcttttacgtcaacccaggccagtgcacggcattctctctgcttagagggtgcccagctctcctgccagtgcatccttcccagcttcttattttacagccttcatgctttgtgcatatctagttgcagtgacattaaattttcacttatatatcctgttccccacccctacactgccatgtctcgaggacagtaactcaccatataatctctctctccccagtgtctgacacaaaatagacacgtgggctgatggaagaatggatggatgcatggatggatgaatgggtgggcggatggatggatggataaaacacaagcaaatggaactgttagaatggagagaggaagagatggggagtcagggagcagaatgctttgaatgacaaagcaagaaagaattcaaagatgacttttcaaggtgttgatgaacctgaagaacctggattatcatgatgagaatgggaaaaaagggaagccacacagcaggtatggggttgagaatgaacttgtttgtgtgatgtgaagagtgaatgtgggagtgagaggcccatgagcagggaaaaggaaatgctgatgaaggtgaagtccagctgtcatggttataaagggactgggaattagatccaaaacctgaaatcatgcaatgcctggagtatttttatactacaaaaaaaaagaaagaaaaagaaaagatgaaagaagaaagaaagaaagaaaaagagaaagaaagaaagaaaagaaagaaagaaagaaaatttgcttttaaaaactgaattcaaaagagagtttcccactcttaggagactcaggtgagggccactcaacctctctgggtacatgtgcttcttaagacatcagaggactctggtgggaatttgggtgggagttcttttcctttatcacagcccaaggtctcacccaagactaatgagcagggaatggagtcggtgatctgaggcgtgaaagaggttcattatgaggaagtggagaggggagtctcgatgaacagaaagtgcctcggccattctctccctgaaggcagggggcactggggtcagttacagactccaaaacagtcagtaatctgttctggaaatctgaagctcccttttgaatagcgtaatctttcctcaagaaacggaagaacccagcactagtgaagtcagcccttcttcctaatcaggtactggcgacagaggggtggttgtgagatgggctgcaggcctatggtcatcctaacatgaactctggccactgaggtaggaatacccttctcatgagcccggccctaaatccttctcgcaccatctggagcctgtcaaatccctggtgtagctctgagcagggcggctgtgagggcacatggctggtgaggtcacacagggcctgtgcttggcttaagggactgacatgagacctcacattttattttgcattgaccctatccctgtaaaatatgtagccagtcctgattatgagaacttcttttagcagcaggtaaaacaactatcgttcatcgatcaatcatgggtaaatggaaaaggctctctggctcccctagggcagttcaatatctttgtggagttcagattatagagctaaagatggcttcatcaggcatggtggtgcaggcttcagcagcactgaacattggctgtgtcagtccagtgaatctcaggctgtgaagtcctgtctgtgatttctaccaaatctattaacttcgacgcagaaatcagcagagctacttcagcagaaaccttgaggtgactctcgtttcagacattccctaatgctacacttgacaagataactgtctagtcagatccttttccagccccttgacaaagtgaactagcttttccaaggtcacacactgtcctttccctcacccagcaaagccaggtacagtggacattgcctgatttgcagcaatggcagggaccctgacttacagttccaaagtccttggcagagaatctgcttaactctgagcttttgctgaatgtacaatcttgccctagcataacatgtgaagccttgacaggaagaagttccccctaaccacctcccatcccttgcagtcccttatgcccatgaaaatcatacttatagttggcaaaataattcaccacaagccggtt

SEQ ID NO: 93427 - DNA, 34260 bp, Homo sapiens
actttgtccagacaaacatattatttagagtggcaacatgttattctttcagttagccattcagcaattgtagatgatcacatgaccatttccaagtttttgacgtattttaatataaatatcgtattagtcctttctcacacagctgtaaagacatacctgagactgggtaatttataaagaaaagaggtttaactgacttagagttctgcatggctgggtaggcctcacaatcatggcagaaggcacctcttcacagggcggcagaagagagaatgagagcagagctaagtaagcagatctgataaaaccatcagatctggtgagaactcactatcatgagaatggcatggggaaactgcccccatgattcaattatctccacctggtcctgcccttgatccgtggggattgttacaattcaaggtgagatttgggtcatagagccaaaccatatcaaatgcttttttgacaagtatcttaacaaattatttgttaatctactttgtacatgcaatttttaatgctttcgaatgatttcttttagttctgaagtacagaatatcccacaggaataaaataatacttttatagccgagcgtggtggctcatgcctataatcccagcactttgggaggctgaggcaagcagatcacctgaggtcgggagttcaagaccagcctgaccaacatggagaaaccccatctctactaaaaatacaaatttagctgggcatggtggcacctgcctgtaatcccagctacttaggaagctgaggcaggacaattgcttgaacccgggaggcagaggttgcagtgagccaagatcactccattgcactccagcctgggcaacaagagcgaaactccatcccaaaaacaataataatatttttatagccctaatatattttgccaataggctgccccatcatggattaatggttaatgattgtattgcagttgccaccatcctgaatgaccccaacttcatctggctggtaggcagagccatgaaactccatttgtgattaatgttgtcatccagtaccctgtggaaaccatatcatatcctttctgttacagaggcagtggtaactcaacttccaaaaaggaaagattccaaagttgtccccagcagaaacacatgtgggagcctttgattggaaattgctacagcactgtatctccacataaatgactatgtctgctctttatacaggggggaagatcatttcctgttcgtatttctttctgagccattcttctaagtcagaatcatccatatttattttttaataatcttttattattcctttcatcttaagagtatttgaaatattcttgccatatcctgtctggcctaaaccttagtttactttgacttataccatgtggtccccaactctttaactgtctgtccttatcagccaggattctgggcgatggtaaagttcgcctgggtgcagtatgtcagcatcctgcttatcttcctctgggtgtttgaaagaatcaagatcttcgtgtttcagaatcaggtggtgaccaccatccctgtgacagtgatgccccagggagaagtgtgtaaggagcacttatcctagaaaggccgtttctgaagactcagcaggaccatggctgcctcattgtcatcttctgggaacgtcttaggaccttttgaaagagcccagcggacacmtgcgggcttgtgtgcttttccctcagagacaacggttctttccagttttgctctacacagttccgtatcttcagagctcctgcagaattgtcagggactagtttgtggaaaggtctgagagttcctggaggctataattagctttttgggtttttcttctttgccttagcgttgaatttcaggagaaaattgcagtcagttcagacatcttggaaagagtcccatctctggtcaagcagagacttttcctctgttgaactgaggaacacactgtgcatttcttccttctgttgtgagccactcttactcttttcagggctctcttgtgacaaacatgccaatcactagcactttgcacccctgggcttctccatttcccattcacagctttgatttccagagctgaggcctttaactggagacctggaggggcagggcccaagggcaagggccgcattagcacaggcaatcagggagggccgctgaaggacacttggaccgtccacctgccccagcccaacagtcagtcatctgtcatcagctcagctgagcagccctggatccctgcccgactgtggctggctctttgcccggtttttccctctgtctgtgcccctggatggcaggctgaagtcagaggggctgtttcattctcagccccctcagcagcactgggggaagaaagcattgtcacaacaggttctttctggccctcacccaacagcctgggcacttggccctcctcctccttgacagccctcccccttcctgcaaaggacaggggcgacaggggttggtgttgggattggctcccgctgcctgacaaccacaagtttatttggaaggctagcgggaagcccagcggctggcgtttcccttgactaaggaaaagggtgcccatcagagtggggcgggcagctttgggaaggacacaagaagcagtgagggtgtaaagaggatgctggcctgggcaggccagtccagcctggccactagcagaataccaagcagtccagtggattatcctcgtggctaagcaagtgtctgcaggagcagagatggctggaaggggcctctgcacacggaagatggcttgttcagccgattcacctcctgaggatgcgtgcagtctcctccaagaacacatggagctgcttcctgatcccaagcaggtcgttgcccctggaaggacatggctccggtgatccatgcttcatgcccacccagaaacacacccctcagtgtgtgcctcagtttaccttggagatcatttttcatctccagcatccgtttcctttaggctgactaaaaacagttttggaaacaaagctattttgaagtattcaagcagaggaattctctaacactgtcccccttgtctttttttaatattctggctattttagatgcctaaatttttttcttgagatttatttatttttatagatggggttttcactatgttgcccaggctggtcttgaactcccaacctcaggaaatcctcctgtctcagccccacaaagtgccaggaatataggcatgggccagtgtgccccgtctcttgagactgaaatgaaaaattgcttgtggtttaaatccccagaatttaatgaaacatgggaagatggctaaagatacgtataaactttggtttgcattttattaaattatttgaatgcaaaacttgtataaagaatccattatgttctgtagctttctaattaaaatgttcaacatggaaggttgtattagctatttttgaagcaaggctttggagggaggaagaatagggagggctgaagttgagcacacttctccgagttactcaccagtagccttgctttgccacggctctgcccaaagaccttggagcttttgttagctctttggcaaaagtttcctggtccaaccccaagtatattagtttttagtggaatccacatggcatatgggagctgcgggttggaaaattacaactgtgtctggtgaatatcaaattatttacggatcatttattggtagtttctgaaactgaaccacacagcatagttgcaggaggaagaaaggtaagaaatacacaggattttatcaactgagctgaagccatagataagtcatatttgagataattattgaatttgttttgtgggagagaaatctctaattcttccaaatgattagtccagtttctgccaaagcaggtgaggtgtctaatgccccactgagtgcccatcttgaagcttattaaagcaattctctctctttgcgtccctcttaccttatcctccacatccttgccccctctccttattcatgctttgtaaagaggttttggagctttctggccagataacttctaaatactgattaaggaaatgtaaattacatgatcctaaggaaaataatgattgccggccaatcccctacccagagttatggttggccttctggcacacatctttctatcccatacactatttctaactttttaaaaatcatgaacaggccgggcacggtggctcatgcctgtaatccgagcactttgggagacagaggcgggcagatcacatctgagctcaggagttcgagaccagcctggacaacatggtgaaaccctgtctctactaaaagtacaaaaattagcctggcgtggtggtgggcacctgtaatcccagctattcaggaggctgaggcaagagaatcacttgaactcgagaggcggaggttgcagtgagcctagatcctgccattgcactccagcctgggctacaaaagtgagactccatctgaaaaaaaaatcagtatcaaaatcatgaacaacacttatatgaaccctgtacataaatccttgtttctggtttatttccttaagatagctcctagaaaggaattaccaatccgaaaagcttacgaccattgtcaagaatcttaattcatcttgccaaaccacaaccaggaaggactgcttatttcttctcccagcagcagggagttcttgattaagatcccatcactaatttgacaagacctagaaatgcttcatccttttcaggtgcctgggctctgccctgttatttgtaaaggggattttttttttttttttttttgaaacagtttcgctctgtcgcccaggctggagtgcagtggtgcaatctcagctcactgcaacctccgcytcctgggytcaagcagttctcctgccttagcctcctgagtagctaggattacaggtgcctgccaccacgcccggctaatttttgtatttttagtagagacggggtttcaccctgttggccaggctggtctcgaactcctgacctcgtgatccacccactacggccccccaaagtgctgggattacaggcgtgagacaccgcgcctggccggattttttttttttttttttgcgagggagtctcgctttgtcgcccaggctggagtgcagtggtgcgatctcggctcactgcaagctccgcctcccgggttcacgccattctcctgcctcagcctcccgagtagctgggactacaggtgcccgccaccaggcctggctaatttttttgtatttttagtagagacggggtttcactgtgttagccaggatgatttcgatctcctgacctcgtgatccgcccgcctcggcctcccaaagtgctgggattacaggcgtgagccaccgcgcccagccctggccggaaatatcttatttattgaaacgtatcatgtctttatctggacctgctatgaacctgcgcctctgggcctaggctagggcagggaatgcgcaggaggaggggaaaagctgcggacccagctcctaaggccacctggtctctccgctcttcccagttgggacactgcaccgggtccatgtgtcatccaggtgccgtggccttgggaagggtttggattccaagtcacctcgccgcaaggatgcccccgagagtgaggagggtcaagattaagattcgacttccttcactagggcctttgtcctcccaggagccccccttctctggggatttggggtrgggtggggtacaacgttcctctgtagtcagatgagaggtgactctgccagcgccctttgacattctgggctaaaagttgagcctctcagagccccagcccacctgggccctcctgccccgccctcggccggcgcccctcccycgaggcgtggcccctcggtcgggggtgggccaaccggctccttccttcccccacggcgctagctcccgctggccacctcgggaccgcagccacgtctgaaagcgcctcattgtgtgcgctcgggcgggctgcaccgggcagcgccgagggttgccggccggcgcgcggggagtagagggcgcgggccgcagtgccgggttccagagggagctctgcgccgggtccttccctgtggtagccccaggacacccccagcctcaacatcccattctgggactcctgccctgttcccacattcgttctacctcgagtctccaggagcttccagtggcttggtcaccgccaactctcgtccatgcctcttagagcccctttcccggcctcaccgggtgtcgcttaatagtcttgggaccttaaggagcaagtcagcccctgcggaccctcccagtgaagagaaagagctggctgtgcggtggaatttggaagagacgacgtttgggagcctttgctgagtccagggagagaggcgtcccccaccgtgccgctgcagctcgggcagagccgccaagctttggggtacgttggttcttcattctccgcgggggatgtccccacactcgggtcggctgggggycgggctggtggcacagctggggacgctcctctgtcctgcaccggggacctggggtggcgggaagagctgggagtggcttttccatcagcaacgtggaaagggcatcgccgctgttggcgccggtttggaagtgtcttgctggggcttcggctgcgcaggagaatcctcactgcgaggggagaaccccttttgtctcgatacttgagtttcaaaggacatgactttcaaaagctctccaagggctttttccatagaattattgagagacrgtagcttggcgggttgatttggaaccagacccaggggaattggagtcctgcgtcactgcttctgacggcttcatcttgggcttcaggacaggccctctgggcctcaggacaggtgcctagcaaatgttgactttcctttctcctccctttttcacagaggcaaggcagtcaagtttcccatttttgaggatgggaaaactgaggcctgaagagcagaaaggagttggctgacttaaacccacaagcgagtaggccaagtaccagggcctctgagggtgctatgctgctccgggagctggggctgggctcctctccagcctgagaggccggaacttttctggctttgttctacaaacagagwcaactggagtatagagagccagagagtgacttgctctaagtcacacccctcactggtagtagagacaggatttgaacccaatccggcttcagaagccaagcttctaaggccagtcgcagtggttcacgcctgtaatcccagcactttgggaggccgaggcaggyggatcacctgaggtcaggagttcaagaccagcctggccaacatggtgaaaccccrtctctactaaaaatacaaaaataagctgggcatggtggtgagtgcctgtaatcccagctacttgggaggctgaggcagragaatcrcttgaacccaggaggcggaggttgcagtgagctgagattgcggtacttcactccagtctggacaacagcgagactccatctcagaaaaaacacaagccaggcctctagccatgactttccagcgtcttctgttttgtttgcccttgtggggaccctgtctgtgcctgccacattctgttgctggggcactggggcacctgaatctggtagagccattgtccttgggttttcctcattcaaagactttcccttggattcatagaatataagtgtggcccaggaaggaagattgctaagcaaatactcataagtgcactatgygccagactttgttctgctttacaaatatccactcactcactctttcaatcaagcccatgagttgggttatattgtttcccccactttacagatttttttttttttttttgatacggagtctcgctctgtcaccgaggctggagtgcagtgaaagtgacataatctcggctcactgcaacctctccgcatcccaggttcaagcgattctcctgcctcaaattcctgagtagctgggattacaggcrccygccyccackcccggctaatttttgtatttttagtaaagatggggtttcactatgttggtcaggctggtctcaaactcctgacctcgtgatccgccctcctcagcctcgcaaagtgctgggattacaggtgtgagccaccgcacctgaccttccagatttttttttaaccaagcaggcacagaaggaagtaacttgcacaagatcrckcagtaaatggtcaagtgggattcacactcttaacctcagtgctctatacctactgtctttaatgagacagacaccattctgcttctagtgtcttgggcggggaaatgggtccagaaatacatgaacaagattkttctgggtagtgataatagtattaataataatttctcactatcacctattagtcaatattgaaatatatctgattacctctagggtatctcctggcagatgtttttttcaaatcagaatccacacaaggtccacatgttgcatttgactatgtgttttttggttttggtttttgtttttgtttttgtttgagatggagtctctctctgtcgcccagrctggagtgcagtggcgtgatctcagctcactgcagcttcggactcctggctccagtgattctcctgcctcagcctcctgggtagctaggattacaagcacgtgccaccacacctggctactttttgtgtatttagtaaagacagggtttcaccatgtttggccaggctggtctccaactcctgacctaaggtgatctgcctgtcttggcctcccagagygctgggattacaggcgtgagccaccgcgcccggccctgagttattttcctataaaatagtctcttcctttttctgtcatagatttggaagtatgatttacttttaaaaaataaggtaattaaaataaatggttaataaaccagggaacattccagattatctctgtaatgagagggctctgtcaatacttagggaaacaggcaaatgtgctaaaagcacagtcccactccgtaccctgtgtgtgttgctgcasagaagaagtggggaaccctcagactttatggcctccagctgtaaggtactacaatttagaccaaggcaggtgctgtktgaagtgccctgtgagaatccctaaagctcccagccaaggaaaagggtttgtgtgttgctatctgcttatctgctctgaaatgccccagggcagtggctctgagccagggaggcttgaggctcctttcccaggctaattagaattcatttcccagtagattttgaaggcagatctgttttctccatcagcatctgggccttgcagtcccagccccctgcctctgggggatgccatgcagctgcatcaccaggactggcagagttggcagatgtggccagggcttgggggccaggcacagcytcagycacagcctggcccagcccacagtcctggkgttgagagtgtgcatgggagctctgacaccttttagtgcagagcgggtaattcrtgcccctggacttctctggctaactgggtactcaggtcagctgggagatggttttgcaggcacctgtctctctgcagtgatagctggacaaagacaaactccacctaagcctcctttaaccaactagaaatttctgattttatcattgtagtaaaagtctgatgtagactatctggaaaatgcagcaaagcactaataagaaaataaattaccagccgggcacggtggctcacgcctgtaatcccagcactttgggagactgaggcaggcggatcacgaggtcaggagatcgagaccatcctggctaacasggtgaaacccggtctctactaaaaaatacaaaaaattagccaggcgtggcgtcgggcacctgtagtcccagctactcrggaggctgaggcaggagaayggcatgaacctgggaggsagagtttgcagtaagccgagatcgtgccactgcactccagcctrggcgacagagcaagactccgtctcaaaaaataaaaataaaaaaaaattacctgtaaactggccatagaaaaataaacaccmaacttcagtgtgcatctcccatactttgtatttttttaaataatggctttattgagatagaattcatgtatgttaaagtttatatatattatatataagtatattatattttatatatatatatatatatatatatatattttttttttttttttttttttttttaagacggagtttcactcttgtcacccaagctggagtgcagtggcttgatttcagctcactgcaaactctgccttcctgacctcaggtgatccacccatttaatccaaagtgctgggattacatgcgtgagccactgcgtccggcccaaagtttatattttaaaagtgtacagttcactggcttatagtatattcagtgttttcacattgaactttgtatatatcagtactttattcttttttattgcagataattgtctactgtgtggttacaccacattttgtttatctattcatcagctgatagacattagggatgtctccactttttggctattacgaataatgctgctgtgcaaattcatgagcaggttttcatgtgggcttgtatgttcagttctctagggtgtgtacccaggagtggatctgctgtatcatatggtcactctattcaacctttcgagaaaccaccaaattgtttcttcaggaaatgcaccatctgacatccccattttatgaggatccccacgtctctgtcatctcaccaacacttgtaattatatattatttattataattacctttttaagattgtaaccttcttggtggatggaaagtgacttgtcactgtggtttaatttgcatttccccgctgcctaaaaatgttaagcatctttcctttttttttgagacrgagtttcactcttrttgcccaggctggagtgcaatggygcgatctcggctcaccrcaacctctgcctcccaggttcaagygattctcctgcctcagcctcccgagtagctgggtttacaggcatgcgccaccatgcctggctaattttgtattcttagtagagacggaatttctccatgttggtcaggctggtctcgaactcccgacctcaggtgatccaccagccttggcctcccaaagtgctgggattacaggcktgagccactgtgcccggcctttttttttttttttttttttttgaggcaaagtctcgctcttgttccccaggctagaatgcaatggcacaaccttggctcactgcaacctctscctcccgggttcaagcgattctccctccccgccgagtagctgggattacaggtgcctgccaccacgcctggctagtttttggtatttttagtagagacggggtttcaccatgttggccaggctggtctcgaactcctgacctcaggtgatccacacacctcggcctcccaaagtgctgggattacaggcatgggccactgcgcctggttgagcatctttccatttgtgtatcttcttcagagaaacttctcccaaatcctttactcattttaatttttttctttattcattcttaaatttatttattcttatatttcttaaatatgcttattcttaaaaaactaaataggatatttgcctattttgtgttgagttgtaagagctcttcttatattctgggtacaagtcccattctgtagacatgatttgcaactgttttctcccatctgtgagtgttctttgatattcgtgtatttttaacacccagccaactgtgtgaaaaatacatgcacatctaagaacacacacagatgggagaaatgtatatatgtatgtcagctttgttacttctgttttccacttgacactatgtagcgaagagctccaaggttacactgctagacttccaactctgactcagcagccactgtgtgaattcttcccgcaagtcccttttcttttttctttttttttttttttttttttgagacagagtcttgctttgttgcccaggctggagtgcartggcacaatctcrgctcactgcaacctccgcctcctgggctcaagcgattcttctgcctcatcttcacgagtagctgggattacaggcatgcaccaccacgcctagctaatttttgtatttttagtacagttggggtttcgtcatgttgtccaggctggtcttgaactcctgacctcaggtaatccgcccgcctcggcctcccaaagtgctgtgattacaggcatcagtcaccatgccctgcctcccttaatttttctacacctcactttcctcatctrtaaaatagggatgatcatcaggtccatgtcatagggttgctgtgaggatcaaatcagaaaatggatgggaaagactgggcatgtaggaaaccctcatagatgatgtttgcaggggttccttgttcctgccccccatgaacactcaccttccatctttatgttttatgttttgtttttggttttgtttttctttgagacgaagtttcactcttgttgcccaggctggagtgcaatggcgtgatctaggctcactgcaacctccacctcccgggttcaagcgattctcctgcctcagcctcccattacagacctcatgtgatccacccaccttggcctcccaaagtgctgggattacaggcatgagccaccgcacctggcctgttttatgttttatgttccctgctttatgttttgtctcattttctgttttcttctctcttctttcttcctctttcttttgctccttgttagccttcccccttccaaatgcccagggctccactagagcagtttggccccagttgtagctcttgatgcctcaaggccactgactcctcattgggtatgttttttccagcctttgggattcttttttttttttttttctccttgtgacggggctttgctcttgttgcccaggctggaatgcaatggctyatgatctctgctcactgcaacctccacctcccagactcaaacaattctcctgcctcagcctctggagtagctggggttacaaataggcacctgccaccatggtggctaatttttgtatttttagtagagacgaggtttcaccatgttggccagsctggtctcaaactccygacctcaggtgatccrcctgcctbggcctcccaaagtgctgggattatagacatgagccaccgtgcccasgtggctttgggattctcgaacagggatgacctccagccaactctaaacagagaaatctaaacctgggatctatacctagtgttacattttgttcccttagattctatgaacagggctggaacaggctggtaacaagaagagctgctgtgtcttgttgttgttttggttttgtttgtttgtttgttttttgaggtggagtgttactctgttgccaggctagagtgcagtggcatgatctgagctcactgcaacctctgcctcctgggttccagcgattctcctgactccgcctcccgagtagctgggattacaggtgyccaccaccacacctggctaatttttgkattttttctctttttttttttttttttttttttaggggggacggagtctcactctgtctgtcacccaggctggagtgcagtggcacgatctcagctcactgcaagctctgcctcccagattcacgccattctcccacctcagcctcctgagtagctgggactacaggtgccygccaccacgcccsrctrattttttgtatttttagtagagacagggtttcactgtgttagccaagaagatgtcgatctcttgaccttgtgatccaccctactcagcctcccaagtgctatgattacaggcgtgagccaccacgcctggccaaatttttgtatttttagtagagatggggtttcaccgtgttggtcaggcttgtcccaaactcctgacctcaggtgagccacctgcctcagcctcccaaaatgctggtattacaggtgtgagccaccactcccggcctggagctgctgtgtcgagggtaggcagagcttggctggaagtgagtgctgcccagagagccaggactcctgggctccagctcaaccctgctatggaaaaccatccttggtcaatgtcttgcttttcctatttgcaaatcaggcagaaccatagctccttcctaggtctctcaggccaggccaagaaatggtaagggatgtttagaagatcctgtgactttaaggtgctcggcagaaagccatgtgggctaytggggaattcctccctctggatgtggaccacagagtatctgagtgcaatggcaagtatttgttcatgtcctctactcatttgttgtttgggacattccttgacatgactcttactatcttcttcagtcaggattctttactttttattgaagtatgccattcttcagagtacatataatgaaagtacagcttggtgaactttcacaaactgaacacacccatgtaattagcactgtcagagagaaacaacgcagggccagcccccagaagctctgcccctgcacccttcccacctcaccccaccaagggtttcactgtcactatctaatcaccactcttgggtgtaagtgacagaaactcatctcccarggacttaagcagaaagtgaatgcttccctcagctgaggggtccatgggtaagccttgcacaactggatccaaatgcttagatggtgctgtcagcttgcctgtgaactttctctgctgagttctcttctgttgttgattttaaacctaggcagtttcctcttcccttgtgatcaacaaaactccagaattgcagttgagcagatgtcccattcctaggccaatagttctgtgtgggctgggggggcagggtcagtgtgtggaatatagaggtgggtctgtcttgggacacatgacccttaggagccgggagtggtggatcagccccatctgagccacatgcacttttgagtgggtgagggtgattccccagggaaaagcctagagactgttatcagaaggaaaaacgggtactgagtggacagaaccaagcatgtccagtgcacctgtgcagtgctgatcctcacactagtcaccggagaacaggtgttcgcttgcgaaaaaccacaatccaaagttccgggttgctcacaggcaagaagggaaagcaaagtacaatgcagggcagagtgggrcatgccttgacaggcacagaggaggtggctgcaggcgaggctgaaatgcctcccagtgggagtcagggctgcgcactcatagcatgggtgagggagttgggagagatggagcttgtttgatgaacactgattattcccggccatctgaagcctgggatatgggagataaggytggaaagctgaaggttactgaaaaggagaatgacaggatcagatgtgtggtgtaggcacctctgggggcaactgtacaagatggactgaagggaggccaggtggggactttgctggaatccaggagataaggatgcagccaggaccagcatgaccctcccgcggctggatgtccaggccatccactgggacaccatcaggtcccttgaccgtcacatagccagatgtgtcttcagtgtccccaacttgattgtcagctctgccaggatcgggatcctgagcactggctttcctggatgaatcttttgctgatcttatctcttctctattttccaacctttatctgtcatttatgttttttgttctacttttcacatcttttaaatttttctttcaacgtttctaatatctaatgcaattagccccaaggaaaactaagggaaacaagaaaaaacaagaaaggaaatgtactctcagtacttcagctgtgagctgtgagcttcagctgtgagctggagtgttttgctstggttttaggtttttgattttttttaagaaagagggtcacactctgttgcccaagctggtgagcagtagaatgatataactcactgcaaccttgaactcctgggctcaagagatcctcccaccttgrcctcccaaagtgctaggattacaggcacgagccaccgtgcctggcctccaggcatattttatcctttctcaagctatgtgtagtgttttgacaaaaataaattttaaaaagagttaatgtcaaaaaaagtttctgtgacttaagaaggaccactgcttagggtgctcctcctgggtaccaaaacaagaaacagaactttctattccctttatggcctcttgtactttttagttccaccctcctcctgaaaaaatatgatcattttcatcatcatcatcaccatcatcaccattaattacttgttggaaatttaaagcagaattgcctctgaggttggaaggctggagagggcatgagagataggaaacgtcactttcttctgcctgactggccttgtgctctggtgtggggctgtgtctgcccagggggtgtggcctcttttcctgtcttcacatatgaaacatgagctggcaatgccctcatctttaccttgagtttttttgtttgtttgttttgtttttgagatggagtctcgctctgtcgcccaggctggagtacagtggcgcaatctcagctcactgcaacctccatctcccgggttcaaatgattctcctgcctcagcttcccaagtacctgggactacaggcactcaccaccacacccggctaatttttgtatttttagtagggttttgtcatgttggtcaggctggtctcgatctactgacctctagtgatctgcccgcctcagcctcccaaagtgctgggattacaggcgtgagccaccatgcgtggcttagaattttatacaacacctatgtgttaacttttccaaaaagtaaacatataataaatatgtgcccctcatcaagggaagactttcaagggggagataggccttccaggatgggaaaggrcactggacaaaggctcaggactgcgacacccaccacagagccctgcagtgagagtctggttcttcgatgtatttatgtatgtttgtttgtttatttatttatttactttttgagacggagtctcgctctgtcacccaggctggagtgyagkggtgtgatcttggctcactgcaacctccacctcctggrttcaagcaattctcctgcctcagcctcycgagtagctgggactacaggtgcctgccatcatgcctggctatttttatatttttagtagagacggggtttcaccatgttggtcaggctagtctcaaattcctgaccttaggkgatccacccgcctcagcctcccgaagtgctgggtttacaggcgtgagtcaccgcacacccggcctatttatttatttattatttatttatttttgagacagggtctttctcckttttccaggctgragtgcagtcacacagtctctgctcactgcaacctgtgcctcctaggctcaagcaatcctcccacctcagcctcctgagtagttgggactacaggtccgcgccactgcactgggctaatttttgtatttttagtagagatggggtttggccatgttgcccaggctggtcttgagcttctgggcccaagcaattcacccgcytcagcctcccaaagtgccctaattacaggcatgagttaccgtacccggctggctcttggatttaagcccctgcccttcctccttcttactggatattcatgtctctgagccccactgcttcaattaaaacagagaggtatggtcatttctgcctcccagggacttgggatgatagcatttaatcatgaagacagaagtacctatcacagggcctgcctgacttgttcttcctaatgtcaaaaccttggcccaaatgtctactgtgctgaacgtaaggctcctatcagaatgctctcagctaggaactggtcttctggagactctgtggcgtaggatgattcaaccaccttcctagttcttgagtttcagtaataggatctcatagcagttcctgtagtgtgtgagtcacttaagaagacctctggcttccctggaacacaggtaacaaataccttggcttgggatcaagatcctycctacccagggaagggctgagctggccaggacaactgtgtttgggccagagcagcagggtcctgcactctgcagggagcaatcacaggtgggagaagcccacagcctgggatcagaagtgccagaagcttaggaacaggagtcctggggtcccagctttctcgctgtctctccaagccttgagtctttcacctgaaaaattgacatcatcgtgcccacctcagggcccgttgagttaagtcatcgcgtggacttgaagcacctagcacttgtgatcattgaagtcagaaaatgagttcccttctctttcggcgccccattggcaggaagccaaccatcgtcagcccactggcactggaggagcgttgatcatgtgcagagcagatgagtggctactctccctgtcttccaggttttcccagagtggctgtgggatctggagtcggctggtgacagagctgctgggcatcctccacycacccctgttgcctcctgatgagggaaatgggcagagaggagatctgctcacaagttagaccctggcttctctcagtgggcrrtgtggacaggggaagggggmaggcarggagcaaaggatgcaggagcaaggagaaaacttccaggctcctcccttccaaagtcacccagccttgagatcattgcagatgcaacaggtgcaaasagaagaacactttgggaccttggaatgcgggaagctggctcagtgttccttccaccctgtgagacatgtgtgacatttttgttgttgttgctgttttgagacggagtttcccccttgttgcccaggctggagtgcagtggcatgatctcggctcaccacaacctctgcttcccaggttcaagtgattttcctgcctcagcctccctagtacaggcatgtgccacaacgcctggctaattttgtatttttagbagagatagggtttctccatgttggtcaggctggtctcaaactcccaacctcaggtgatctgcctkccttggcctsccaaagtgctgggattaccagcatgaacctccatacccgacctatgtgacattcttaaggtccacgaaagggctggtggttggaggccagagggtggcctgtgagatactgggattggaagagtaggtggcctgtgggtgtctcctctggggggagactccccagggggaggggttcctcctctccaaacagtagctcagcacagggacagtaacagtaatgggggcatgtgtgtaaggaatgctttcccaggccccctcttcataggtgtttgcagcagcatctcacwgccctaagaggttaaatgttgcacatcccatcctacagaagtggaaatcgagcctcagagaagttgtgtcgcttttggggctatcttcccctgtagagtgtgactccatcgccctcctgctttaccaggtgctgaggaacctctaatcatctcccatggatttgtgatcagcgttgcagctctcccagcagccctggacagtggtgagtcccctcagctggccgggacagtcctctgctctcacctctctgcttctctggctccatcccagctccgcctcagctggtctccttgcaaacccacagggctccaggacatcctccctctggagcccatgctgccttcagcacttcaccccctaccggtgatggcaacaattggtgttctttgtccactttatttattggctcatttttttgtttttgagaaagagtctcactctattgcccaggctggagtgcagtggcataatctcagctcactgcaacctctgcctcccgggttcaagcgattttcacgtctcagcctaccaactagctgagactacagacatgcaccaccatgcccagctaatttttgtattttttttggtagagatggggttttaccatgttggccaggttggtgtcgaactcctgacttcaggtgatctgcccacctcaacctcccaaattgctaggattacaggcatgagccactgtgcctggacttatttgctcattttgatattgtactgtatgttttgagtcagagtctcactctatcgcccaagctggagtgcagtggcatgatcaaagctcactgcaacctcaaactcctgggctcaagcagtcctcccacctcagcctcccgaatagcagggaccacaggcgcactccaccacacctggctttcctttttttgttttttttaatgtttttgtagagacaggcaggctatccatatgttgcccaggctggtctcaaacttttcgcctcaaggtatcctcccacctcagcctcctaaagtgctgggattacaggcttgaatcccaggctcgcatcctgcctatttgcttcttttcttttcttttctttttttttttttttttttggaatgaagttttgctcttgcccaggctggagtgcaatggcgcgatctcgtctcactacaacctctgcctcccgggttcaagcgattctcctgcctcagcctcctgagtagctggggattacaggtgcccgctaccacgcccggctaatttttgtatacttagtagacatgatgtttcaccatgttgaccaagctggtcttgaacttctgacttcaggtgatccacccacctcggcctcccaaagtgctgggattacaggcgtgagccaccacgcccagcgcctatttgcttattttcaataagaaaagttattttccataagaaaagttatacctgtctatttaaaaaaaaaaaaatcatacactgcagaagcacacgctgtagcaagggcactcttcagttagggacattactacatgtctctcctgtccatccaggatattcaaacatgttcccattttccaataatccacttaaatcctgtattatgtgctggtatcatctcccttttgcagatgggtaaactgagtcacggggcgatccaatattttgttcaagatcacaggctatgtatgtcagtgtagtgtgggagattaaaaaaggaaaaagaccacaggctacggagtggaagagcctcagggagcctggccgtgctgtgacatccaccagagcgcccatcagttcaacaacctaaaagagtttccttacaggaattcttaagcaaaagacaggaattccgtttgaaatatatttccctctccaaatagacaatggtaatgtgggtaggtagaactaagaaggtaggactcacattaagaaggtaggactcacattaagaaggtaggactcacatgtagacagatttccgaccgcattctgcatttgtacttttgctctcagctagactggatcctgagttatgtcttaaggccacatttccgggagagctccccactgagaccatcatgttcatgggatgctcgggtctggtggtagaatctgccccctgcgggcactgggcagtggggtacgggatgggcgtgcaggctgcagcccctaaccgctgcgctctcctccctaaggcccccagcagtcagcatgtggctgccgcgcgtctccagcacagcagtgaccgcgctcctcctggcgcagaccttcctcctcctctttctggtttcccggccagggycctcgtccccagcaggcggcgaggcgcgygtgcatgtgctggtgctgtcctcgtggygctcgggctcgtccttcgtgggccaactcttcaaccagcaccccgacgtcttctacctaatggakyccgcgtggcacgtgtggaccaccctgtcgcagggcagcgccgcmacgctgcacatggctgtgcgcgacctggtgcgctccgtcttcctgtgcgacatggacgtgtytgatgcctatctgccttggcgccgcaacctgtccgacctcttccagtgggccgtgagccgtgyactgtgctcgccrcccgcctgcagygcctttccccgaggcgccatcagcagcgaggccgtgtgcaagccactgtgcgcgcggcagtccttcascctggcccgggaggcctgccsctcctacagccacgtggtgctcarggaggtgcgcttcttcaacctgcaggtgctctacccgctgctcagcgaccccgcgctcaacctacgcatcgtgcacckggtgcgcgamccgcgggycgtgctgcgctccygggagcagacagccaaggctctggcgcgtgacaacggcatcgtgctgggcaccaacggcacgtgggtggaggccgaccccggcctgcgcgtggtgcgcgaggtgtgccgtagccacgtacgcatcgccgaggccgccacactcaagccgccaccctttctgcgcggccgctaccgcctggtgcgcttcraggacctggcgcgggagccgctggcagaaatccgtgcgctctacgccttcactgggctcagtctcacgccacagctcgaggcctggatccataacatcacccacggatctggacctggtgcgcgccgcgaagccttcaakacttcgtccaggaatgcgctcaacgtctcccaggcctggcgccatgcgctgccctttgccaagatccgccgcgtgcaggaactgtgcgctggtgcgctgcagctgctgggctaccggcctgtgtactctgaggacgagcagcgcracctcgcccttgatctggtgctgccacgaggcctgaacggcttcacttgggcatcatccaccgcctcgcacccccgaaattagtggaggccacagttgtagcaggcgctaggcccgggaggagagtgcatggtgcagagggggctggggcgcacggagaagcaggtccctatattgaccaaggagtttgtggtacgacccctccccctccccaagtaggcaaggactgcacgtttctttctctcttgattcttggttttcctttgagtcctctggagctgccttctcatcaggtgcactcttcatggaaagcaactcttgcccctcctcctctgggcacagggtgtgcgttcagatgacttggctcctactcaagggctttcttcccctttaactctctccttctggtgacacatcctgcagcagctgagggggtgccctggcactggctgggagtggagaggcactgtggtgaaatggctccagaggtctgtacatcacatacatatgcacacaggcacacatggcaaaactcggaagtgaaaggacttgtctgaaatcacatggtgagaaggaggatgaagggaggagagagcttttgctctgggtctccagtggataggagaggacctgcctcctgggtgagaagggtcagattttcctattttaattgctttagggaagagcaagcagagtcatgaccagggacacagctgagagatagaggaggctgtgaatgctgagaccagagtttatcatgctggacaagcctggaaggaggcaataagtgggaaaggtaggaggagagaaggctggggagggctgggcagcaagccaggcacagtgagtggcagagcaagagggggaaagcaggatcagtgcctggaaggcaggtgtgcccgtcagcggggagtggaactcatcaggcttgccaagaggttggaagggaaatggctctgggctggaactgtcttcccttggtccttctggtccaggccttggaggaaagcagaggatgatccctgcctgtgagccacacctcctagctctgggggcaaaggggcttagtaaaggaatgctggatgtgtagagggtttagtcccgagctcaggaaatgagagcctataagtgcccagtacatgtttaaaagaagagctcatggaacctctggaaaggacagggaagttgagttagccacataaatgaacccaagtcacattggaacacagagctggtctgggaactgtgttggctgccaacagaacttctgaccctgttacctgtgaaatgaggcagtttccctcacgttgccatcagctaccaggagcgatgctggtggtcactagcttctgatcctcatcctgggtgtggccacagattgggggaacctggattgtggagtcacatcctccctgcaaagcaagcagggcaagggagatctggcattttctgctttacgtggagggagaacaggcacattagccttgaagctgaagctcattttaggttccttccaggtttagaagcttcaaccaaatgaaacttgaatctgtccctcgtgacaattataggaggaaggtatttaaaaccccagatttatgaatgtgtactacatggcttagagaatgtctttgttcttgttcaggtggktataacaaaataccttaagagtgggtaacttggctggatgcagtggctcatgcctgtaatcccagcactgtgggaggccgagggggatgaatcacctgaggtcaggcattcaagaacagcctggccaacatggcgaagcccctcctctactaaaaatacaaaattagcgaggcatggtcgcacatacctgtaatcccagctcctcgggaagctgaggcaggagaatcgcttgaacccaggaggcrgwggtkgcagtgagccragatcacrccattgcactccagcctgggtgacagagcaagactccatctcaaaaaaaaaaaaaagactgggtaacttataaacaaatgttcttctcacaagtctggagactgggaagtccaagatcaagccaccagtgytgtctgatgagggcccactttttcaaagacagtgccttctagctgtgtcctcttatcgtagaagatgggagacagctctccagggccatttttttttttttttttttttttttgagatggagtctggctctgtcgcccaggctggagtgcagtggcacaatctcggctcactgcaacctctgcctctctctgcctcctgagttcaagcaattctcctgcctcagcctcctgaggagctgggactacagggatgcaccaccatgcccagctaatttttgtatttttgtagacactgggtttcaccatattggccaggttggtctcaaactcctgacctcaagtgatctgcccrcctcagcytcccaaagtgctgagattacaggcatgagccactgtacccagtctccagggccttttaaagaatgtcactaatcccattcttgaggtctccaccttcattatctaatcacctcccaaaggctccacatcccaacaccatcatattgtgggttaagatttcaaccacaagccaggcgtggtggctcatgcctgtaatcccagcattttggaaggctgaggcaggtggatcacttgaggtcaggagtttgagaccagcctggccaacatggtgaaaccccatctctactaaaaataaaaaaaattagccgggtgtggtggtgcacrcctgtaattccagctactcaggaggctgaggcaggagaatcccttgaatccaggaggcggacagtgcagtgagccgagataatgccactgcactccagcctggatgacagagcaagactccatctcatgcccagccagcatgcccaacaagcttcatttgcccctgtttaggtcacaaattttattgatggctgcaattaatggcctcttggtatccaagtcctttgttgtatgacccatccattctcccctgactcccaaggtgtcaggacatgcttgactggctcctgaatttgctctctgcrcatgggcagtacagtcaagcctcacagtgaacccaggtcagctttcaggacaaagaaagtggcctggctgactaggcacagtaaagccagggctgggtaggtacatacttgtgctgatcacgtatgtcttatatctctgtgagagtgcagtcccaacaggaaggtttaatcactggggactgcccaatgctgtgacagggcacagagctctgggttgctgtgggggtgactgcattgaccactgttagtggtttgctgtgttgacactgtgctgtgtgaccatggctcctgccatcaagaagtagagtctgtttctccacctctgaatccaggctggtcctgtgacttgctttgtcctgtagacaagtgtagtgcaacttcctgtgagccagtttgaagcataggccttggaagcaaaactttacctccacctgtcttaggttttcagctggggctctgctgtgatttgattgtgtctcccaaagttggaaccttgatccccagtgttgtgaggtgaggcttgatggaaagtaaattacgccgtgcgggttatgcccttgtgaatgggtagagaacattatttctgggcgcaggcatggtagctcatgtctgtaatcccagcattttgggaggttgaggtgtgcggattacttgaggtcaggagtttgagaccagcctggccaacaaggtaaaacaccatttctagttaaaatacaaaaattagccaggtgtggtggcacatgcctgtaaggccagctacttgggaggctgagacaggagaatcgcttgaacccaggaggcagagattgcagtgagctgagatcgcaccactgtactccagcctgggcaacaaagcgagagtctgtcttaaaaaaaaccaccattatttcaggagtgagttggttatcctgagagtggtgccttttaaatgaaggagttcattctttgtctttctctcgccctcactttgcccttctgccatatgatgccttccatcatgctaggacacagcaagaaggctctcgctagatgctggctccttgatcttgggcttcccagcctccagaactgtaagccaatacacttctatttattatatatgacccttgctgggttcagtggctcacrcctgtaatcccaatactttgcaaggctgaggcaggaggatcacttgagaccaggcactcaagaccagcctrggcaacatagtgagaccccatctctacaaagttaaaaaaaaattagcagggcatggtgtcgtgcacctgtagtcctagctacttgggaggctgagttgggaggactgcttgaccctgggaggttgaggctacattgaaccatgatcaygccagtgcactccagcctgagtgacagagcaagacacctatctctaaataaatgaccccayctgtggtattgttatagcaaaacaaaacagattaagagagactttttaatgaaaagacagattcacaaagaaaaacaatgtttttgtttctgtttttttgaggcagagtcttgctcttgtcccccaggctggagtgcagtggcgccatyttggctcactgcaacctccrcctcccagtttcaagcgattctcytgcctcagcctcccgagtagctgggattacagatgtacaccaccacgcccggctaattttttttgtatttttagtagagatggggtttcaccatgtcgatcaggctgggctggaactcctgacctcaggtgatccacctgccttggcctcccaatgtgctaggattacaggcatgagccactgtacctggcgaaaaacagtttgttaacacaggcagccaacatcactcaggataagcctcaatgaaaagtaacaaagtgatggcttggaacactgtcttacacagcatttttaaaaaatacaataaatttgtagagataggatgaccaaggacaacagttttaggcttccaaaggtggtaaactatgggatggtaaatatccgagaggaagctgatgcaacaggatttgtctgcagcagcctctggtaccacctctgagtcaagggttgtgtccagtgatggagagtttatatcgtgcctttaggcagaaaaggggagggaaacctgaacttttcctgcactttctgcttcttaattgccttcagctgaaaatcattttttatgtgaaaaaggcatagtctgagctgacgcctctgctttcctccacctgaagagaacctgcgtgctgctccyttgcttcggacctccgcctctgcccgggagaaagcccaggccagcctgctggacaagcagagaccatgagaaggagagttcaggggtcccaatccaggccatcctagaccagccagctccagctgatccgcacgcagccacttcggctaccttctactggccaaagggagtcccagggctcacccagattcagaggtggggaaactgagtccaccacttgagaagagtagctataaagacatatgagcgagrccagctgagcccagcactgcggccaagtcgaagactttaggagcaataaaagtgcttattgtgtttcagtcatttgagtgttgtggtggtttgttacgtagcattgcctaaccgatacacttgagaacggagggctcctggcacctgcagcttccaatttccaccagggtccaggctccctccctgctggtagggctgtaattagtgtctccccttacctgtaggccctgtgatgcagctagaagtgtctaggcccagcagtcacccacaattaggggcaggcacgcttgctgcctctgctctggctgtgggagctcagaaggggcaatcaaagcactagatgggctgatgggtgcatagaaacagtgttgcctggaataggtcagagaacccacctctcaagaggctgttggggaatcaatggtgggccttatttttgttattttgcatcaagaagatatattatccacatcaacactgtatcaactcctcatggccaccacagaccctgtgtcccctagctttgtctttgatgtgcctttgtcacccactcctacagactgcgccccaccactgccacaactgccccatcacctctacagggttaaatcaatggttttaatttttgcctacctgatgggtgaaaaatgttacttgatgtttcagtctgcacttctttaattcctggggcagctgaacatcttttcatgcttatgactcaactgtattcctttttcattgttcaaggctgtgcccatgttgctgttgacttaccacagcctcttttgaatatgctttgttatttttgttgtgcaaatggtttctcctagcttgtcatctgttttttgttgttgttgttttgttaacttactttatggcattttcccctcaggcttcttaaaaaaaaagaagcttcattgagctataattgatatacaacatctgcacataaagtgtaaagtttgattaaacatttgtatatacctgtgaaatcaaatcaccacctcatcacaatcaaatttcaaaaagtttcacctagtttatcatattgttgaatgtgaatcctttccttatggccagtggattttatgtcttgttgaaacgactttgtcctgctacagtgataaaaatggtcttcacgcttgcttccagtactttagtagtctagtgttttacgcttggatctaaattgcatgcaatattcctgatcggtgcgagtcatcagttctcccagcgccctctactgaatgatctcactcatcacacactgaaaccaccatgggctggaatctgtccctcacccacaggcccactccacaccagtggatcaggcgagcaatttctttaggtcgagtgacccctatgctgaggtccagtgggttatccccactaccttcacaagttaatggatttagatttaagcaccacctgcccccagcagattctcttacaatttaaatatcctctcacagtgcaaatccttattctgtgaatgactctattcagaccatgttccttaagaaccagagctaggctgggtgcagctgtaatgctagcaatttgggaggccaaggtgggcagattgcgtgagctcaggagttcgagaccagcctgggcaacttggcgaaaccctgtccctactaaaaaaaatacaaaaacgtagccaagcgtggtggtatgtgcctgaaattccagctacttgggaggctgaggcatgagaattgcttgaacccaggaggtagaggttgcagtgagccaagatcgccccactgcactccagcctgggtaatagagcgagactctgtctcaaacaaacaaaaaacgaaagaaccagagctaaagtcttgatgaaatggaaaggattggcctactatccatttttccaagatggcaattcattccarccaatcgagcattttctcctttgggagtaagaccagaaaacctggcctgtcctgcaagtcttgtgttattctgctcccagtcctcaagaactccactcattcattcaacacacattatgggttgagcaccaaccaggcactgggctattataggagctggagatacagcaggaccaaaaacagacaaaaagcaaaaacccctgccctaggctgggtgcagtggttcacacctctaatctcagcccttagtgaggccgaggcaggtggatcacctgaggtcaggagttcaagaccagcctgacccatatggtgaaacccagtctctactaaaaatataaaaattagctgggcatcgtggcatgcacctgtagtcccagctactcaggaggctgaggcaggagaattgcttgaacccgggaggcggaggttgaattgagccgagatggcgccaaaggactccaacctgggcgacagagcgagactccatctcaaaaacaaacaaaacaaaacaaaacaaaacaaaaaccagccaggcgcagtggctcacgcctgtaatcccagcactttgggaggccgaggcaggcagatcatgaggtcaggagttcgagaccagcctggccaacatggtgaaaccccatctctactaaaaatacaaaaattagccaggcgtggtggtggtggtgcacgcttgtaatcccagctaatcaggaggctgaggcaggagaatcrcttaaacctgggaggcggaggttgcagtgagctgagatcgcgccactgcactccagcctgggcgatagagtgtgactctctcaaacaacaacaacaacaaccctgcccttcaggaacttgcattctgatggtggggagatagctgatgaataagcttaataaatggctacattatttagcatattagaaagtgccaaggattaaagtagagaaggatcgggggatgaggaatatatgtgtgtagaggtgtgagttgtaatttttaatggggtgatcagggtaggtctcagtgagaaagcgacatttgaggaaagtcttacaggaggtgagggagtatgttaagggcaatcatgggtagcctgtctgggagcaggaaagagctaacacaaaagccctaaggaggggaggcatctggcttgttgaaagagcagcaaggggccagggggtctggtgtgctggaccgcctccttggcttccttagacagggcccaggaaacctccattttctgagtcctgcaaggctaaatgtctttttttaacctgtcaattcataaatgaactaaagatcgaattctaaattcaaaataatgtttcctaatgtaatacataattgattatgtaaccctacaataattgatttcttccacttttttttttttttttttttgagacggagtctcgctctgttgcccaggctggagtgcagtggcgcgatctctgctcactgcaagctccacctcccgggttcacgccattctcctgcctcagcctctccggtagctgggattacaggcgcccaccaccacgcccagctgatttttttttttttttttttttttgagacagagtctcattttgttgcccagactggagtgcaatggcacgatctcggctcctgcaacctctgcctcccgggttcaagtaattctcctgtctcagcctcccaagtagctgggattacaggcgcatgccaccaggcccggctaatttttgtatttttagtagagatggggtttcaccatgttggtcaggctgttctggaactcctgacctcgtgatctgcctgcctcggcctcccaaagtgctgggattacaggtgtgacctaccacacctggccctttttctttttttttttttttttttgagacagagtcttgctctgtcgcccaggttggagtgcaatggtgcgatctcggctcaccgcaacctccacctcccaggttcaagcaattctcctgcctcagcctcctgagtagctgggattacaggcacatgccaccatgcccggctaatttttgtatttttagtaaagacggggtttcaccatgttggtcaggttggtctcaaactcctgacctcgtgatccacccgccgcagcctcccaaagtgctgggattacaggcatgagccaccacgcccagcggtttcttccacttctaatagactctgctagtctgggaaatgtaccaaaaagacagcatggttaaaaggtcagtatttcctgaccctttttatacttcctatttttattttagataggtttcttggttgatgcaaaacgccaattgtagtggtagggaactggcaggaggaagcttcctaaacggaggtttcaagagagacttctgtttctttttttttttttttttttttttgagacggagtctcgctctgtcgcccaggattgagtgcagtggcgcaatctcagctcactgcaagctccacctcctgggttcacaccattctcctgcctcagcctcccgagtagttgagactacaggcacctgccaccacgcccggctaatttttttgtattttcagtagagacggggtttcaccgtgttagccagggatggtctcgatctcctgacctcgtgatccgcccgtctctgcctcccaaagtgctgggattacaggtgtgagccaccacgcccggccttttttctttttgagatggagtctggctttgttgcccacgctggagtgcagtggctcccgggttcaagcaatgctcttacctcagcctcctgagtaactgggactacagtcacacaccaccattcccagttaattttttctattttagtagagatggggtttcaccatgttgctcaggttggtctggaactcctgagctcagacaatttgcctgcttcagcctcccaaagtgccagaattacaggtgtgagccaccgcgcccggctcaggagaaaattctaataaacagtcttgctaatgttcttgaattaagaggaaaatatgggttgggtgtggtggcttatgcctgtaatcccagcactttgggaggtcgaggtgggtggatcacraagtcaggggttcgagaccagcctggccaagatggcaaaaccctgtctctactaaaaatacaaaaattagcagagcatggtggtgggcacctgtaatcccagctactcaggaggctgaggcaggagaattgcttgaacctgggaggcggaggttgcaatgaactgagatcgtgccattgatctccagcctgggtgactgagcaagattctgtctcaaacaaacaaacaaacaaacaaaaatggaaaatatgtattttgcacacaatacttttgagtgtaaaataggttaatgaccgggtgcagtggcttacatctgtaatcccagaactttgggaggccaaggcgggaggattgcttgagcccacaagtttgagaccagcctgggcaacatagtgagaccctgtctcttaaaaaaatttaaaaacaaaaaagctttaaaaaaaatcattttctctgcaaatactgaaggtgttggtacattgtcatccagccttcttcttcatttggctactgaaccatttgattctcatttctttgtaggtgacctatagattccctctgttttaggaatttcttttttatttctttctttttttttgagatggagttttgcccttgttgcccaggctgaagtgcaatggcaagatctcggctcactgcaacctcttcctcccaggttcaagtgattcccccgcctcagcctcttgagtagctgggattacaggcacccgccaccacgctcggctaatttttgtatttttagtagagacagtcttcaccatgttggccaggttggcctccaactcctgacctggtgatccacccaccttggcctcccaaagtgttgggatttcaggtgtgagccactgtgcttggtagaatttcttatttctatctttttcttcttgttctatttatttttcttttcctttctttattatgattaatttggtggagcaacaccatttatttccagggccagcattggatatagcacaattatggaaaaaggctgtcagccactgtcacaaaaaaatcctacagaatctgaaatgccaacaagaagtctagctgcgccagaaaatacctgtgaatcacaggtttttcca

SEQ ID NO: 93428 - DNA, 12756 bp, Homo sapiens
atagagaacctaaggtcacaactcaaggaactagagaaacaagaacaaaccaaacccaaacccagcacaagaaaagaaataataaaaatcagagcagaattaaatgatattgaaacaaacaaacaaaaatacaaaagataaatgaaacaaaaagctgtctctttgaaaagacatataaaattgatagactattagtgagataacccaagtaaagaataagttcaattagaaacaaaacagacaatactacaacggataccacagaaatgcaaaagatcattcaatgctaccatgaacatctttatatacataaactagaaaacctagaggagatggataaatttctggaaatatatagccctcctagattaaaccaggaaaaaatagaaactctgaacaaaccaatgaaaagcagccagattgaaatggcaatttaaaattgctaacaaaaaaaagtccaggaacagacagattcacagctgaattctatcagacattcaaagaagaattggtaccaatcctactgacactattccaaaagatagagaaagaggggatcctttctaaatcattctatgaagccagtatcaccctaataccaaaactagcaaaggatgtaacaaaaaagaaaactacagaccaatatctctgatgaatatagatgcaaaaatcctcaacataatactagcaaactgaatccaccagcatatcaaaaagataatccaccatgatcaagtgggtttcatatcagggatgcagggatggtttaacatcagtaagtcaataaatgtgatacaccacataaacagaatttaaaacaaaaatcacatgatcatctcaatagacacagaaaaagcagttgacaatatccagcgtcgctttatgattaaaaccctcagcaaaatcggcatagaaaggtcacaccttaaggtaataaaagccatttattataaacccacggccaacattatactgaatagggaaaagttgaaggcattcccctgagacctggaacaagacaaggatgcccactttcaccattatattcaacatagtactgaaagttctagccagcacattgaacaagagaaaaaaataaagggtatcaaactgataaagaggaagtcaaattgtcgctgtttgcagatgacataatggtatacctggaaaaccccaaagactccaccaaaaagctcctagaactggtaaatgaattcagcaaagtttcaagatacaaaattagtgtacacaaattaatagccctgctatacaccaactgtgatcagtgataatcaaatcaagaattcaaccccttttacaatagctgaaaaaataaataaaataaaatatttaggaatatacttaaccaaggaggtgaaagacctctacaaggaaaattacaaaacactgctgaaagaaatcttagatgacacaaacaaatgcaaacatatccatgctcatggatgggtagaatcaatattgtgaaaataaccctactgccaaaagcaatctacaaattcaatgcaattcccattaaaataccaccatcattcttcacagaactggaaaaaaatcctaaaattcatatggaacaaaaaaagagtctgcatagccaaagcaagactaagtaaaaataataaatcaaaggcattacattatccaacttcaaaatacactataaagccctagtcacaaaaacagcatggtactggtataaaaaaaggcatatagaccaatggaacagagtagagaacccagaaataagccaaatgattacagtcaactgatctttgacatagcaaacaaaaacataaagtggaaaaggacattctattcaacaaatagtgctaagataattgacaagccacatgtagaagaataaaactggatcctcatctctcaccttatacaaaaatcaactcaagatggatcaaagacttagatctaacacctgaaaccataaaaattctagaatacgacattggaaaaactcttttaaaattggcttaggcaaagccttcatgaccaagaacccaaaaacaaatgcaacaaaaccaaagataaatagatggagcttaattaaactaaaaacttctgcacagcaaaagaaataatcagcagactaaacagacaactcacaaagtagggggaaatctttgctatctatacatctgacaaaggactaatatccagaagctacaaggaattcaaacaaatcagcaagaaaaaaaaaatcccatcaaaaagtgagctaaggacatgaatagacaattctcaaaagaagatacacaaatggccaaaaaacatatggaaaaatgctcaacatcactaatgatcagggaaatgcctgatcaaaaccacaatgtgatactaccttactcctgcaagaatggccataatcaaaaaatcaaaaactaataaatgttggcatggatgtagtgaaaaggaacacttttacactgtctgtgggaaggtaaactagtacaaccactgtggaaaacagtgtggagattccttaaagaactaaaaatagatctacaatttgatccagcaatcacactcctgggtatctacccagaggaagagaagtcattatatgaaaaagatactcacacatacatgtttacagcagcacaatttgacatttcaaaaatatagtaccagcccaaatgcccatcaatcaacaagtggataaagaaaatatgatttatatatatatatatatgtgtgtgtgtgtgtgtgtgtgtgtgtgtgtgtgtgtgtgtgtgtgtaatggaatactattcagccataaaaaatgaataaaataatggcatttgcaacaacctggatggaattggagaccattattctaagtgaagtgactcgggaatggaaaaccaaatattatatattcttgcacgtaagtgggagctaagctatgaggatgcaaaggtgtaagaatgatacaatgaactttggagactcaggagactcagttgcttattaaagggtgggagggagtgaggaataaaagactacaaattgggtacagttaaactgctcaggtgatgactgcaccaaaatctcagaaatcaccactaaataacatattcacgtaaccaaacagcacccattccccaaaaacctattgaaaaaaacgtgatcacaaaataagactacatattgggtgcagtgtacactgcttgggtgacgggtgcactaaaatctcagaaatcacctctaaagaacttatccacataaccaaaaaccacctgcccaaaaacaattgacaatggctaggtgcggtggctcacgtctgtaatcccagcactttgggaggtcaaggcaggcagataacttgaggtcaggagtttgagaccagcctgcccatcatggtgaaatcctgtctctgctaaaaatacaaaaattagctgggcatggtggtgtgcgcctgtaatcccagctgctctggaggctgaggcaagagaatcgcttcaacccagaaggcagaggttgcagggaaacgagatcatgccactgcaccccagcctgggttacagagtgtgagattccatctaaaacattaaaaaaaaaactattgacattaaaaataatactaataataaaatgaaaataaataaaaaataaaagcagcacttctcactgtgttctacaaggccctggtatggccctccccagcctctccacgtcatcttctactactcttcaccgagcttcagccatgccagtcaccctgatgtccctcaaacacaccaggtgtcgttctccctcagtcctttatatgtgttccttctgccaacatcccaggcctcacaacttttttctcaacttgcaaatttcatctcaaatgtcacctcctcagacagttttctctaatcccccatacccagttaccctccattctacaatcctgtttccttcatggcagcttgatctaaaaggagaccatttctttatttgttctctaaatactataattctcccctactagaatgcaaactctggcagggcaggttcttgtccaacttgtttatatctgtatcactggcaccaggtaataaagaaacattcggtaatcattagccaaatgaatgaatgagcaaatgaccaaaagaacaggtattaaatccaattcaaataactccttccaaaaagaattcctggatgacattaggtatccttttctgatggacattatgttgcaataataatgaccgacagttaaaggagcatgtaatgatggtctactattatctacttattaagaaatagttacttagttctgaatacctggcaagcactctgtaagttactggaagtacaaagaccaagaagagaagcatggtctgtgttctcagtgtagctttttattcaaaatgaaaaatgttcccgctagtacagattgctaaaattcaaagtcaaccctcaacaatttctattttaaccaaaactgtaactctgactgcattatgaaacacactagattttttatcagatcagatagaaagcacaacattcaattacttattcttatttctgcccactgttctaaaagagaaaaggatattaaaacatttaaaactgcagatagcaagagaggaaagaaagagacaagaaaagttttactacctgtcaaggcataagctacccataatgtgcaaaatcaagaattatctgtaagagttttcctaaagaatctcacattgctgtattcagcaatatctaccaagaagtacagaaaatccaatataaaacagttgcttatttcatagtgacatggtttgaatctgtgtccctaccaaatctcatgttgaattttaacctctagtgttggagttggggcctgggggtgaccagatcatgggggtggaattctcatgaatggtttagcaccacaccctcggtactgttctctaataaataaataaataaataaatgataaaacaccccctttggtgttgttgtaatagtgaaagagtgagttctcatgagatctggttgttttaaagtgagtagcacctgccaggcatggtggcttatgcctgtaatcccagcactttgggaggcaggcggatcacaaggtcaggaaatcaagaccatcctggccaacatggtgaaacccgtctctactaaaatacaaaaaaaaaaattagccgggcatggtggcacaccgcctatagtcccagctactcaggaggctgaggcaggggaattgcttgaacccagtaggcagaggttgcagtgagccaagatcgcaccactgcactccagccgggcggcagagtgagactccatcaaataaaaaaaaaaaaaatgtgtagcacctactccctctctctcttgttcctgctccaccacataagataactagctccctgtttgcctttcactatgattgcaagtttcctgaggcctccccagaagtagaacagatacctccatgctttctgaacagcctgtagaaccatgggataattaaaattcttctttataaattacccggtctcaagtatttctttatggcagtgcaagaacaaactaatacacatagttcagatatgttaaatcatgaatggcagaaataactccataaaacaaaatcatcaacaatttgcctctagtgtatgggcctatcctattccaagaacccaacttcataaaataatcccactatcttatcagtctggcacataagggttaaggagatagggcccagggctctgaagtcatcagatccaggttcaatcagaatggtaaattgtacaaatatatgcacatatatataccatataaaattctatttcaaggtttttaattacttaccactttgcccagttttctctcataggctttatgccgtagtcctaatcccaacaatcccacaccaacaagcagccacagaactaaacagaaaaaagaaataattgggtttttttaaaataaataaaataaaataaatttgctgacactgaccttcagtgcctcagctccagtgccatggcaccctccaggaagttcttcttggaggacctggaagatgaatgggtggaagaagagtcttggggagctcattgacactgaacgtgaccaaggtgccagccgacgctgaggtggtttgctctcccccaactgcctatatcgacttcacccagcagaagctagatcccaagattgctgtgcctgcgcagaactgctacaaagtgactaatggggcctttactggggagatcagccctggcataatcaaagactgcggagctacgtgggtagtcctggggcactcggagagaaggcatgtctttggggagtcagatgaactgattgagcagaaagtggcccgtgctctggcagagggacttggagtaatcacctgcattgggaagaagctagatgcaagggaagctggcatcactgagaaggttgttttcgagcaggcaaaggtcatcacagataaggtgaatggactaagcagcccagaagcccagtaactgcccctcccctgcacatgcttctgatggtgtcatctgccctcttttgtggcctcatccaaactgtaccttcctttactgtttatatcttcaccctgtaatggttgagaccaggccaatcccttctccgcttactataatggttggaactaaacgtcaccaaggtggcttctccttggctgaragatggaaagggtggaatttgctcctgggtcccctaggccccagtgaaggcaggagataaaccatcctctcccttcttacaccatgaggccaagatcctcccatcagaagccaggaatgctgccctcttccatggtgcccactcctgtgtgtgctctgtatgcgaaccactcacatgggagggaataaacacatggcactagggaaaaaaaacacctaaatttgttttaaaataacaaggtttataaaattattgaatttattggccaatgattttgtgcaaaggggaaatgtgtagttcttcggttaattttcatgtgtgacatgtgtacatcaaccactctttaaacccagatttcaagaatttcccctaaaaatgttccaaggaccatgagcttaaagtaaaaataagtcacaaaacacacaagaaaacaagtttccatgagcaggaaacaaagaaaaaaacaccctgcagaatcaagcccacaaagagacagatgttggaactctctgaatcagaatataaaacaagtatgcttattatatttacagaaataaaagagggtattcaaaagtatgactagggaacatgagactaaaataaataatcagaaaattttgaaaagaaatcaaatagagttctagaaataaaaagataattataataattgaaattagaaactcaaagacaatcaaattagacaaagctgaatagagagttagttcaaggggcagcccaaaacatagaggcagaaaatatgaaagaggttaacagcaatggaaaacagaataagaaagtccaacacatatctaattggagtcaaaaagaaagagaaagaatgggaaagaagcaatatttgcagaaacaatgttgagaattttccagaaataataaaagacatgactcttcagattcataaagcctgaagactatcaagcaagatggaggaaaaaatctgcatccagatatatcacagtgaaactacggaacaccaaaacacagaaaaatcttaagagctgccaaagagaaaagacagattattttccaaggaaaaacaattacactgacagctgacttctcaacagcagaagacaggagaataatatcttcaatgtgctaagagaaaaacaaccaactactaaaagaatagatattgaaagtataatttccaaactagaaagaggagtggggaggaggggcataagggaaaaaaaaaaccctaatcaatgaaaaaaatatcaaaaagaaaaaggaaaaaacatacctagaaaaagtggaaaatgaaaaagaaaagtaagatgatcacattagataaatatacattcagaaatcatggtaaaaatagattaaacccttaaaagacaaaaattgacattctggaaaatgcaaaacaatgaaaacagtaaaacattagtggttgccaggggtttggaggaggaatcgatgattaggtgaggcacaggggatgtttagggcagagaaagtattctgtatgataccgcactgagggatctatgtaattatacatttgtcaaaactcctaaactgtacaaagctaaaagtgaaccctaatgtaaactatggcctttgggtgacaatgatgtatcaatgtaggttcatttattttaacaaatgtatcattctggtgagtaattttgatagtggggggtgctgtatgtatgtgggggcatgaggcatatggaaaaatctccacgctttccatataattttcctaygaacctaaaattgctctaagaaacttgtctttttttaatcacacaaaaatgactaaataactgtaaataaactgttccaaatgcctcgatttgataagtgaattaaagaattgtggttcttaccaacaacaaaaaaaaagacaaagattgtcaggattaaaaacaaaaactgctagttatttgtttcaagggatataccaaaacataagaaaacacacaaaaaaaatctcatttctccctaagtttaaatagaatcttttcttctctctttttttttttttttttgagtcagagtctcattctgtcatccatgctgaagtgcagtggcaccatcactgcagccttgacctcccaggctcaaaagatcctcccacttcaccctcgccctccctagtagctgagactactgggactgcaggtgcaccaccacaaatggctgatttttaaattttttgtagagatggggtctcactacattgcttatgctggtctcgaactcctggccccaagcaatcctcctgccttggcctttcaaagtgctgggattacagaagtgaaccactgcacctggccaaatataatcttttaaattaagatgaaacatatatgaaggtttttatataatggtctgttttgtgatatttcttttggaaatacatagagaacttatacagcttcttaattgttttttatatctttacactataatattttgtctcctttgtaaagcaccaagtccttgaaggtggagaccattattcacatctttgaatcctacttaacaactacttaacacgctgtcttcacattaaatacattcagtacatttttatttaatccagtctattttacatgagtttactatattgaatagtaaactaatttcatgtttgagattttagttcatcagcatcccaaacattaacataatctccccaaaaaaggaaaacaagaaatggagtaaatagtctcaaccattagaacaaatcattttggaaattctgcatgttgaattctcttatctatgttagaagtgaaataaaaccaatacagagtatttatggtggaaatggcatgatatcagagatttgctttaaagtacaaaaaaaaagtagagaaatagatggacgaataggaacagctctgttctgcagctcccagcatgatcgacacagaagacaggcgatttctgcatttccaactgaggtacctggttcatctcattggaactggttgcacagtgggcacagcccatggagggtgatctgaagtagggcgtggcatcacctcacccgggaagtgcaaggggccagaggatttccctttcctagccaaggcaagccatgacagactgtacctggaaaaacaggacactcccgccaaaatactgtgtttttcccatggtcttagcaaccggcagaacaggagataccatcctgtgcctggctgggtgggtacctcacacagggagccttgctcactgctagtgcagcagtctgagatcaacctccaaggcgcagcctggttgggggaggggcatctgccattgctgaggctagagtaagtaaacaaagcagccaggaagctggaacagggtggagcccaccacagctcagcaaggtctactgcctctatggactccatctctgtgggccaggcatagctgaacaaaaggcaggagaaacttctgcagacttaaacgtccctgtctgacagctctgaagagagcagtggttctcccagcacggcatttgagctctgagaacagacagactgcctcctcatgtaggtccctgacccccatgtagcctaactgggagacacctcccagtaggggctaacagacacctcatacaggtgggtgccaatctaggacaaagcttccagatgaaggatcaggcagcaatatttactattctgcaatatttcctattctgcagcctccactggtgatacccaggcaaacgtctggagtggacctccagcaaactccaacagacctgcagctaaaggacctgactgttagaaggaaaactaacaaacagaaaggaatagcatcagcatcaacaaaaaggacatccacaccaaaactccatctgcaggtcaccaacatcaaagaccaaagatagataaaaccacaaagatggggagaaaccagatcagaaaagccaaaaattctaaaaaccagagtgcctcttctcctccaaaggatcacagctcctcaccagcaatggaacaaagctggacggagaatgactttgatgagttgacagaagtaagcttcagaaggtggctaataacaaacttctccgagctaaaggagcttgttctaacccattgcaaggaagccaaaaaccttgaaaaatgttagacgaatggctaactagaataaacgtgtagagaagaccctaaatgacctgatggagttgaaaacaatggcacaagaacttcgtgattcatgcacaagcttcaatagctgatttgatcaagtggaaggaggatatcagtgattgaagatcaaattaatgaaataaagtcagaagacaagtttagagaaaaaagagtgaaaagaaatgaacaaatcctccaagaactttggaactatgtgaaaagaccaaatctaggtttgattggtgtacctgaaagtgacggggagaatggaaccaagttggaaaacactcttcaggatattatccagaagaacttccccaacctagcaaggcaagccaacattcaaattcaggaaatacagagaacaccacaaagatattcctcaagaagagcaaccccaagacacatgactgtcagattcaccaaggttgaaataaaggaaaaaatgttaagggcagccagagagaaatgttgggttacccaaaaagggaagcccatcagactaacagcggatcttttgtcagaaaccctacaagccagaagagagtggagaccaatattcaacattcttaaagaaaagaattttcaacccagaattttataactaagcttcataagtgaaggagaaataaaatactttacagacaagcaaatgctgagagattttgccaccaccaggcctgccctaaaagagctcctgaaggaagcactaaacatggacaggaacaaccggtacctgcaaaaacacgccaaccagtaccatgcaaaaacatgccaaattgtaaggaccgtcgatgctatgaagaaactgcaccaattaatgggcgaataaccagctaacatcataatgataggatcaaattcacacataacaatattcaccttaaatgtaaatgggctaaatgcccagacacagactggcaaattggatagtcaagacccattactgtgctgtattcaggagacccatcttgcatgcacacacacatgggctcaaaataaagggatggaggaagatctaccaagcaaatggaaagcaaaaaaaaagcaggggttgcaatcctagtctctgatacaacaggctttaaaccaacatagatcaaaagagacaaagaaggccattacataatagtaaagggatcaattcaacaagaagagctaactatcctaaatatatatgcacctaatacaggagcacccagattcataaagcaagtccttagagacctacaaagagacttagactcctacacaataataataggagactttaataccccactgtcaatattagacatatcaatgagacagaaggttaacaaggatatccaggacttgaactcagctctgcaccaagcggaactaatagacatctacagaactctccaccccaaatcaacagaatatacatttttctcagaaccacatcacacttattccaaaattgaccacataaatggaagtaaagcactcctcagcaaacataaaagaaccaaaatcataacaaactgtctcttagatcacagtgcaatgaaattagaattcaggattaagaaactcacccaaaaccacacaactacctggaaaccgaacaacctgctcctgaatgactactgggtaaataatgaaatgaaggcagaaataaagatgttctttgaaaccaatgagaacaaagacacaatgtacaagaatctctgggacacatttaaagcagtgtgtagagggaaatttatagaactaaatgcccaaaacagacagcaggaaagatctaaaatcgacaccctaacatcacaattaaaagagctagagaagcaagagccagcaaattcaaaagctagcagaaggcaagaaataactaagatcagagcagaacgaaaggagatagagacacaaaaatccttcaaaaaaatcaatgaatccaggaggtggttttttgaaaagattaacaaaatt

SEQ ID NO: 93429 - DNA, 41853 bp, Homo sapiens
  misc_feature (1)...(41853): n = A,T,C or G
atagcaagcagctcattggagagccacacagtcaccaggacagagagaatgcccagcagcagaagccaaaaaaagaaactttccctttctgtctcctctgtctgtggcgtgcaacccagctatgaggacgtggggttgaagccatttcctttttcagtttcagcttctgaccctcctcaggattagaagtggcgattcagaggctgggagggtgaaagcatgacttctcaagaaccagctcgtgctgaagtcactgctcaccttcctgtctcagggatgctcctgatgctaatgacgtcgtgtgaatcatgctctacgtgtctgcatgcctgagccgagcttatcctcatggcaccctgtgaggcaggctgctgctcctactcccactcaccagaagaggaagccgaggctcagagactgagtaactcttgaggttacacagccaccgagcagggtcattagggccctatgagatttccttccgactccgctctgaactcactctcgtaggcccaagctgggcgcctcccccagggaacaccgtagtggcccggaaaacagagagcacaggttacatttggctcacattcttggtgtgtccactgtaggttgctgtgaagtaaattttaaatttttatataaaaacaaacagataatttcttgagtgggacataaaagcatgaatttgaaagttaaaatgtaagatattgaccttttacttaataataatgtaacaatattgctttattaactgtgacaaatgtaccattgtaaaataagataatcataatgaaaactgggtgtggagtgtgcaggaactctgtattatctttgtaataatatggtaaatctaaaattgttctaaaataaaaatttttctctttaaaaaagtaagatatcaaataaattttagaatctcagtttccttcaggggtacctggtcatgattatcttttgttagaggcatatcagaggccatgttgctcgctgagtagaaggacattctacagtgtacgcttacagcctcttgaaaagcctgtattcattaagagaagaaaaagagggtgggacagtgaagattctttcacttcctctccccagcctctgtccccttcttagcactgtgcgaagagtgagaggtaataaccacttcaccctccccaggtttccaccagagtggaaggggttccatcacagacagactatttgagcatttcaccccattccagcctccaccacaatcctacaaattcaactggcccttctaacccctgcagtggggtaaaagtccagcctcttccagagacaggagaatcacttgaactcaggaggcagaggctgcagtgaaccaagataattccactgcactccagcctgggcgacagagcgaaactccgtctcaaaaaaaaaataaataaataaaaaataataaataaataaataaataaataaataaagtggggggtaattcagggcagggcagaaccagaatgtggggaagtcaaggaagccacagaggcaagagatttatgaaggacaaatggacaggattcagtgaccaagaagatgggaggaaggggaggaagagaaaagagggaaagaaaaaagaaaaatgcccagggtgtctccctggtttccaacttgagtgacagagaatgatcacattcccagcagaatttttcttctttctcaacaagattcttcctgttcttttgtttctggttgtccctcagaactaaggagaaacagcctttgggatagttgtccccctaccccatcccagctggtcctaagagtaagaacataggattctcatcccccttttatataaagagaacctgagggtatgtaatgtgtacaagactgtacaatgaggcagaagctcactggcactgggacctacaagatctactgattcacaattgaattctaaacatcacagcccaagggaaccaacacaattacttagtggacccatttctctttccagagaaggaaactgagacctctgaataaagagtaattttcccaatgtcacatgctgctgactagcaagctaggactagagcctggcttgctgagttttaataatccagtgctccttgcattttcgctagttgctttgtcacatctgtatgcacgtgtgtgtgcaaacacatacacacacacatacacatgcttgcttgcttgagaaacagggcattttattcgcatgatattttctttatggacttatcacaaagcatatcctcagactgctcacagaataacaatagcaattcaagattgttttttgtttaaaatcctgtgtttctttatttgtggcttaagtgggaattggtttattgccccatctctaccctgagcaactcaggatttattcagactgtcttgctccattgaggtctatccccttccccagccctatgcctacattaccctgccaaggcagggaacagatctgacagcttttttgcttaagcaaacttattaaaattcataatttgtcaactaattaggaagagagaggattaggagtaagaaaaaaccagaagcacatactattaggtgctcagtgaatatttaagaggaacagggaaagagggaggaaaggaaagacaacactgaggggaaatggttgaatggcattaactgaaaaaaaaaaaaaaaaagatttgccattaatgaagagaaggaagagacagtattctgcccacccaccaggtcggttcccagggaagcccttcagtctcagcatgctgtggctaagtggaaaaattcattgatcataggtttgccagttggaacccttgtgttatgccaatctcagaagctaccaagcatcagatcaattctcccactaaaaaatactaggaggccgggctcagtggctcatgcctgtaatcctagcactttgggaagccaaggcaggaggatcacttgagcccaggagttcgagactagtctgggtaacatagggaaaccctgtctctacaaaaaattaaaaactagtagggaatggtggtgcatacctgtagtcccagctacttgggaggctgaggtgggaggatggcgtgagcccttgcactgactggtggttgcaccactgcactctagcctgggaggcagagtgagaccttgtctcagaaaaaaaaaaaagttgctaggagaagataacagagcctcctcctgtctgctagagagacatacaacccatcccaaatatttctttttctcatctataaatccctcctctctctccaaagggggctgcctggcaatgtccccatcccttccaacagctcatgccgccctgggacaccattcagagaagctctgccatctgcacacccctccagaggccagggacagcttaagccagagtgcctgggttcctcccttctctggggtagaactagtggatgaatcccaaaaggggtaaacatgggcatatagagccacccttgggacaagaagtctgtttgtttggtgttctaggaaaccaacaaaaggaaatgcattttagccaggaaagaaaagaaaaaaaacaaccctgcccagctatgaatgacagccaagccagcagacaaaggtgaaaacagacagctaaggaagggactagctatgcgcccatgggagagagcacctgacatgggcccagtgtgagagctacaatcaccttacacaaatagaatggtcactgtgttaccaaccatgagtatcctttggatcaaccaaaggttgtgtatgcagcatgcagcattctaattctagaaggcgacagaggtgagccagctatgtccaaaatcagtctcatttataaactgtgtgttcctgggaagtatgtgtgcatgtttgtgtgtgtgtgtgggtgtgtgtactgtcatgtgccagcgatagaccttatcttcattgggtactccctgctgctgctgcttttgctaaaatatcttggactctgcactgacatatgagaagctattggcctttttagctttctcctgaactttctgccttccactctccatttctcaggccaatttgccattcccacatgggaagacatctacctgtgctacagatttgactagactgagataaacccatgaaaacatgtcatcacatgtcagcaaagctctcaaataaaaattagctatagaacaataggcatgtcactgtcagattgactgcctccaggtgtgcttcacggccaatatcaaggaaggtccttactgggctggagctgacactgccccatcctatttgacccattacagaaagaccaaagctaggacatatcatatcatgtcataacatgataaaacccgggaataatcagacctgtattttgctgttaccctgaccaataagtcactatattttgtacataggaagcaatgttatcccatagggtcttctaaaaggaagttccatcttcagattattcagaaccaactaggtcaagatctgcctaacaacacagcttcctgaacatattaagcataaaactcagaggcaagaaccttgagaaacatgtgccaaagttcagggaatggtcagacacagaaaaacaatgcttggctaaggagctgaagtgtgtttcaaagaaaacaagaagagcctgatgtctcattcacctctcctggacagctgccttcttccgagatgcccagcttatttgcctggattcatcacgagagaagtagtttttagatatattccaccatctagagaaaggaaatatcacttttttgaaggcgaaccaagaagtctgttttggggttgataaatttctgacagttgctcccagagtattttcaactcaaagtataatttcataaagaggcttattatgttttaaattgtctgtctgtaaaatatactttcatgaaattttgttttctcggaatcttcctttttccttcttgtatgaatctaatgaacttgaatttccaaagtcattgaggtaggaaaggtatgtaacattatgcttgagctttaggtcaataatttatacgatagtggtggttttgttttgtttcgttttgttgagacagagtctcgtcctgtcacccaggctggagtgcaatggcatgatcttggctcactgcaacccctgcctcccaggttcaagtgattctcccacctcagcctcccaggtagctgggattacaggtatgcacctccatgcctggttaatttttgtgtttttagtagagacagggtttcaccatgttggctgggctggtctccaactcctgacctcaagtgatccacccaccttggcctcccagattctggagttttttaaatgggtcaccctatagaaggcatgaagtcatagaatcataataatcaccaaaaccaaccattgatttcaatactagaaaatttgagacaccagaaggtgaagtgacttgcctagagccatacaatggcagaggcagggactgcaacccactatgaaagcttagggctcttctcaccctttggtggccaaaagtattttgaaattttgaccaaaaaaattaatgtttattgatcactttaaatccaaaagatgaatccactggattccacagtaaattgggtggaatgtaagggagggatcaaagggcagtgaatatatgaatggggaggagaaccatttagctaggtgcaaaagtaattgcggtttttgcaatacttttgcaccaacctaataattgttcataattctaagagctattcggatcccattaggagcttaaaagggacaaatgtgctcagggcatgcagtttttgccttccggaactagatcaggatcatgcatttaagctagaaaatggaaagaggagttgcttcacccacagtcagtgctattgcatcaaccaatccctgccattctgcagtttcctggtgtatctgcccggagtcacacagtctttcctgctaagcctcagcgtctcctccaagccacatcaaaatctttccttctgggcctttcccagaagtgaattcttgctggaaggtataaaagaccagctcctccaagcagagcaactccctggctgccgtgaaaagacaaggcactgggcaggtaagactcgtcaactttcatctttcctggtttctgcaaagttgatgatgaaatttcctaacgtcttctcagaaagcttaacactggatttagacttgtctctatcaggcactttctggtgccagctttagccaccccatggcacactcctcttgtttggtataagagagaatgtaattaagcctccccccaccactgtgggggaaaaaggcttttctgtgtctgaaaactatgtcagagaatcataaactcttagggctggaaggtaccatagacctctcttatccaccttgtttaggaactgagacytaagcaatttaatgtgtccagagtcacacaggaatttgggggaaaacagtgacagaatggtgctccctgtgctgttcttgagacagtgtgatgaaatctggcctctccactatagtggagattttgcagtgttttaaggggttccctaagccggagctgtcaggtcttcatctcatttccagcatctcatgcctgccatctgcagcagatccgaccatctagtttgccctcaatgtctagtcctagctgtcttaagtgccctgtggacacctggctctcaagcaggtgtgtgacctgtatgcagcggtagtaggcaggcttcattttgggggaatggggtggttaaattatatttgttttttatgcaattgtgtgcctcaaatctttcagttgaagtagattatttccgctctagagggcttgataagagctatctcttcattctcatcctgatcttggagtcactcaaaagatcaagagagtgttcctgcaggtgatggggcaagaattatggctttcctattggctcactccaccaccctccacagggctctttacaatcatggaagagaatctcactgacttcatcccttctcaggccttccccctatctccttggtgactgctcagcgacattgagaaccaaagtctggaaggccttggtactcagagtgtggtctgcagaccagcaacatcatcatcacctggagcttactggaaatgcagactttcaggccccttctatgaccttctgagtcagaatctgcatttaccaaaatccctaggtgatagtaggcacattacagtgtgagaggcttgccgagggactatctctgccctctccctctgcaacctccagatgctgaayttctctgctctaggagttttattcattcagcatgcacccaacacctattatgtattgacatgcttaggtcctgggaaaacaaataaataagatggagcccttgaggagttcatggtctgataggggaaacagatgtgaagacagtaatatgagatatggatgaaatactgtgggaggacagaaaaaggaacgatctaacttttcctggagaaaactggtaaacttcacagaggaggtgaaatttggtctgggttttgaagaatgaataggagtttattagccagagagggtattgtatagggaagagcatgagtagaggcatgggattgtggaccagcctggcatttgaggggcaaaggctgtggctctgtctccagatagtgcttcatgtcccagggaaggctccaggctttgctgcaaatcaaagggcttgggaaatggtttctgcactcagcatgttgataagaatatggataaatatctacacatcacaggagcctcttgttggcctcttacactctaaagccccaggccctcttgccctgtgtggttctggctgaagacagtgtccctctagaatctttctgcacacccccttttcagtgacatgaccttgtattcacctggctctgatttttgttcatacccgtccctcacacccaccaggaacattgcccaagacatgggaaaataatttctctctggccttgaagtccccctcctccactttccagtgaggagagcatgaagggggtcctaaagaagaggagaggagaattgaatatttaagtattgtttcctgttcaaatttctcaactttcatgtcttcttctatgattttgtcttcctcaggctgtctcagatgatgtctttttaaaaaatggactaattttttactttgtgtttgtcatttattaggaaacgcattagtcattcaaagaacaatataatgaatgtttgtgcccacagccctctttaaaaaaatcagtgatatggtggttgccaggagctagggggaaggggaaatagggagttggtgttcaatgggtatagggtttcagtttttacaggatgaaaatgttctagagatccattgtgcaacatgtgaatatacctaacattacagtactgtagagtttaaatgactaggatgctaaattttatgctatgtggatttttgttgttgttgttcttttcttttcttttttctttttttttttttttttttttttgagccaggctggagtgcagtggcgcaatcttggctcactgcagcctccacctcccaggttcaagggattctcctgcctcagtctcccgagtagctggaattgccggtgtctgccaccacgcctggctaattcttgtatttctagtagagacagggttttaccacattgaccaggctggtctccaacccctgacctcaagtgatccgcctgcctcagcctcccaaaattctgggattacaggcatgagccaccacacctggccatgttttttaccatagtttgttttttaaagtcaatgataccttttcctccaaaaccatcatctctgtttgtctgaagggcagatttctgctaactcaatgaaccctgcaatgggtcccctgaagttgcaaaatatggtgacagagggataggaggtcacagaatctcttcctccttggggccatacaactataaggacaagagcccactgagaggtcaagctgtttgagaactcatcttggggtggggggaagtaacagagagaatcttggccagagaggtatttattcatgccttgccccttctctagagttagctggcaaaaagtacaacaagatayaaattattagggggaccacgaaagggcagagggaaaaattggaggcaggcaggggtgaaggaggctgaaatgacctgatccatatacagaggtctcctggtctggcctattccaaagggagatgatttggagagggtctgcaagacatacggggaagtctgtcaggcaaagctccagaactatgatttctctctgggagctgagccctggggagacatggctggggggcaacctgaggctgctctccttagtgtgcttctggattccaccagtgaacgccgtgctgcagggagagcacaggcgcccttgtgaaagctgaggagcctctcaggaccatggtctaaacacacaatcattccatctgcacgctgtggctgccaccccgggctggagccagaatctcctcagaagatgtatggggtctgctccactaagcccagtgaagaccctcatcagaaaacaaagcttcacaaatttcagtctaaagatttgcattcagagttaaagctcatggcaaagaggttaatccatgagctggaatctttccaggcagcctggggcacagctgtgggctcaggggagctctgagctttgtcataactttctttcagtattgccatcaagttggcactttgagggaaggggaagcccctgccaggtttccgaagggaggcgctgagtgtctgcctctcaggcattctctcctggggctgggccagaggaaactggcttgcagggagcaatgcatcctgcagggaaggagggaggggaactcaaaggcaggctccagccttggtaacagcgtttctcacacctgtgmcaagacaggtacagcatctcccgaccacaggctgtcagggcagaattgaacattctggatcacttggtcccacctcctcccatagcaagccaggaccccagagatgttaagtaacctgcccaaggtcacagagctattggagcaaatgcagaatgataactcagggccttagatcctgaagcctgagttctttcccttccaccatgtcttctcctctttccatctctcccagtacctagcacaggcctgtgtgtatggtagatgcttcattcgttaatgtggtttctcctttcctgttccaatattagggtgtctggtgctcctttggctttctctgctttctgtggttcaaaccctcccacttggtctctagagaggctcacagtgtgatcctgcatctcgtttcagtgatgagggtccttctccatctcccagccctcctggcttccctcatcttgcttcaggctgcagcatctaccacaagaggtgagtgtctccctttacgggttttctggggctgctgtcacaaagcacaccaactggatggcctaagacaacagaaatgtattctctcacagtacgggaggatagaagtccaaaatcaaggtgttggcagggctgtgctccctctgaaggctctagggaagaatgcttcctttcttcttccagcttctggtggccctggtatccttggtgttccctggcttgtagctgcaacactccaatctctgcctcagtctttgcgtggcctttttcactgggtgtcctctcctcttctcataaaaccaccatttattggatttagggccgatgctaaggcagtatgacctcattttaattcataacatctacaaagaccctacttccaaataaggtcacattctgaggttccatgcagatgtgaattttgggagggccattatttaacccactacactctccttgttgagaaaacagatcctgtcctccatgctccagaccccaatacaagagggaacagggaatcccaccattactctcatgccatccccttctgtacgtcagggtcctggtgatcagtgggtcctctttgatgaacttgagatagtccacaagaccatctcaccaggaaccagagaaatccccacagtccagtagcccaagccaccctgagtggccacactccctcttcatcccatctctgggcattctagtgagatctcaaagagcaattttgacatcttgttgaagatccaagagtattcttcccattctgtgctttttccccttaaggactcttatgaaactttcctaatcttgatctcctgcctacccagatttgaggggtgggggtaatggccgagaaagagggagacaaaagcagaagacatcgcaaaggagtggtgtctgacaccctacttcctgctccccactccaaccccaagcgcagactaccagaacctctgccatctccgatactgtgagtcaggccaaggtccaagtcaacaaggccttcctggactcccgaaccaggtacgtgagacacacacacacacacacacacacacacacacacacacacacttcccttcacaggcttcctgttcatgacaagcacatctaggccagcccggatgagccaatgaggtgaacaatgataaaacttacccttccatcctcctagccctccaagtacatgacaagtaggagcaatagcccacaattcctaaagtcctcagcctgtacatcacctgaaagaggacatctaatctaaccctagaaggactttcttccacgtggcccaatgtttccttgggccatgcattccagagtcccagaaagcctctcagtaaaagttcttcattcatccagctgatattgactgattcagccaggtccaccagaagccgaatccgagccctgcattcaggtgcaggtgacatattaggggaatgctcacaaggaagctgtgatggggtgaagaagcagaagtgaagggggaggttagacaaataaagtggcttcaagtctatcctcagcctgaccccacagggagacctggagcagaagttgctcctcagagcctgtcccatcttggagcgagggagcagagccctcatctgcccacatcagtcagacatggctgcaggcttgcaggtggctgagaggtgttgtggcacacctgtggaattcccgggcacccccagccaggccactccagtggctcagaagcaggcgcccaacaaggttactggagtgagcctgtagcagatgcacccatggcagcaaggggaagagcccagggcccacagggcaccagtagagtcaactgccctccgatccygtacaggggcaacgtgggcgccttccctcaggaaacgcacactctagggagagggcagacattgagaaaaaaagtaaccttattctttcctctcgctgtccctttacactggacctgggcttccactcactcctcctcagcccttgaatgaactttcaagccgtcagataacttttttggtgacttagatgataaaacacgctctggacgcttctagtccccagaccaggattatctcaggaattaaagtgtcagcataagaagataaagccagacctgctctattccttcagctcagaactgcttgaggcctctggcgggagaagagagtgcagtctccttctccctctttctggggctcctccttcccagcttgggtttctgctccttgggggttaagctgaaggaggagggaaaaaggggtggtgagtctacatcccctgaacagttcagtcctcaaggggccggaagctctctctctctctctccccttgggtgctttcctggtttcagagagagattctgctgccaactctgtgatctggaaaattctctggccagtggctcccagctctaaccctctctgcctgggagcatcgggcccactccttcacccctccccaccctgtcttggggcaggtcccttttaagcagcctccagaagactagcagcttcgccctactgttgaggcggtgcagattccagattccgcccctctctccgtgctctcaggacactgctcttcaggcaggtgtcaaaccccagccatgactccaggacacacagttaagccctcctcctaagacctttctccctagaattaaactagcaaaggaggagccccatggtgttgggagggacgtgcccagtatttctgcaaatgtctccaaaggaaaattctctctcgctcctcaaattcaatccctttatagcctcaagatgggggacagcataaaagccacaaaaccggtgttcatacacctcctttgcaagtcctgcacaggccaaccagcgccctgctttgaaatgtggaggagcccttccctgctggttagtccttggactcaggggcctcacagagacagaacgagtcacatttaaacattctgttacccaagtacatacacagtgcagtgactcacaatttatgataaggaaaatgaaggaaataaacagggcaagggatgccactctaggcacagggatcagggaagcctgttggagaataggaaggagccacccaggcagagggcatgggggtggcattccaggcactgcaacagcatagggtctgaggcaggaaagaccgtgggtgctcaggaaaaggaaggccagtggaggcaggaggcaaggaggatcacgcataaggtgagagcagagaggtgtgtcgccccagggtaagccattagaacatttgaatcagcggtggcatggtctgatttttatgctaaaaagatcactccagcagccctgtggagaacgaatgggaagaggacagcagtggaagtaagagctgtctagatgggagaggatgatggctaggaccgcggtggagactgtggagatggcaaagaggtccttccaagaccctgcctacccccaacagagcccagccccagggcagagcaggaggtgagtccctggtgaatctgtgttcaggcagaggaagcatgcagagcccagggccgggcgggaaaggaaggaacatctggaaccttggatgggaccttacaggctaagcccagggaggcccagcgcggcctgcctgcctttgttcacggtgtgaggtggggactctaaaataccttgcagcagcccctctgggacccggctgatggagacagtgatgctcacacacgtgagtgtgtgctctgtgcagatgcagctctgggggccctacattcattcctccccaaaatcctaggaagtactgaatcgaactgtagaaaacagctgttttcaaggtcaaaaatgatgaaacaacatggttcaacctaagattaccatcattattttcattataccaataaggaaactgagtacaaagagcttaagtaatttgcctcaagggcacacaactagaaagtggcagtcaggagccaatcccagtcagtctatcccaaagtccatacagaagtctctgatgggaggaaattgtgatttccagttcataaatgaggggaagtcactcagaggtcatataattaaaccaatcctggtggaacccagatccacccctgtgtctgtccagctctaagcccactttaggctagcagtgtccaagataactttctaggatgatgaaatgttctatatctgcactgtccaacacagtcatcactaaccacacctggctattgagcacttgaggtgtgcctagtgctgctgaggaactgaatttttaattttaattttaatgagtttcaatttaaatagccacatgtggttagtggctactgtattggacagtgcagcagctgggttatgaggccatgttgtacacacacccctcccacccctccagcggcccccagcccccttcctacagggtccaggccatgatccccatctccctccactgtaggctgaagaccgccatgagctctgagactcccaccagccgacagctctcagaatacctcaagcatgccaaaggccggacgcgcacagccatccgcaatggacaggtgtgggaggagtctttaaagagactgaggcagaaggcatccttgaccaatgtcacaggtacagaaaacccaccagccctctgtggcaggaaggggtcatctccccacaggagaaagcagaggccacccaaagctgcacttcctgttgagagctatctactcagaggaacactcctgtctctcccttcttagacccgtagacgagactggcagagcaaggaaggtcttagaggacagctagggcaatgctgtttttgcagaggaagaaactgagacctagcaagctcacatggccgactccaagtgaggggacattggtgctctttgtataacaccgtctgtaaggcctctgcccaaaggaagtgctaaagtcaataaacatgggttccttgtcctaagccacagtgtcaccacttcctctagtagaagagacatttaagccacatgtgtcagggggatttacttgggataatgtcacaggagctaagatttccatcgtgttctgggtaagatggagctatcagtaagtgaacttaactgatggcttggtcatggcctcctccatcccctccactctcacccccaaccaaatgccacagcccacagagggtcatgaggaaggggtttggtcctgacaggaggaaaaggctgcaggttctccctgggaaaacatcaagtgaggggggatacctggcccaggagttgggcaaattccaaagctccaaaagaaggaaactgggacaaggtaagaagtaggaagcactttgacctctgaaatacaaaaggttcggagagctgaaatcctgccacctttcagagatggccccccggaagaagcccccatgagccagattccctcacctccctgcccttgcagacgccagggtggatgagggtatgcgttcagaagtgggcatctctctccactctgtgcccacactgaacactctgatgcctaaagcccccctactctgtcactcctcccacaacccttgcccctcactgaaaaattacctgtcccttcccaacctctatcctagctatgtccctgcttgcttggtacttcagatgtgaacgaagctttagaagaaagcagtcttatcacactaactcatactaacatatgcttaacctcccggggtatttccattctaaaagaaagatctgtcaattcaaatgaatctggacctggtataccaggaattactagcaattctggggacattcccagttactctgtgtggccttgggcaagtctcttgaacattgtgttctcattttcttccctgtaaaatgggaataaaatgtattaccttaatgtgctgtcagattaattgagaaaccacttgagaaacgcttacttagaatggaatgcattccaaaacatgcaggttcacctctggtctccatttcctgcctcccacgggtgcctgtgaatggagaaagaactcagtccctttggggtcccttctgtttcagatcccagcctggacttgacttcactgtctctggaggtgggctgtggtgctcctgctcccgtggtgagatgcgacccgtgcagcccttaccgcaccattacsggagactgcaataacaggtggcggggcttggggtgtgggggccgaccattccagccactccgncccgccctgccaaggcctttgtcccttgggcactctaggcagatctgccactgccttgcccacctgggctggcgttcccaccttccccaccttctcaagatcgcgcgtctccagccctctccctccagcccactgtgtgtctctggaagcggcacctttccccggggcgggggagccccgcgccttcagggggtgggcgcagttcagagaccccaaatttgagaggcccccttmtctgcgtcccctccgcctcgagcagaggctccttcccycatggggtcctgggctttggagccccggagccggcctgccgaagctcagcgaggatcgtgctggtttcaggaggaagcctgcgctgggcgccgccaacagggctctggcgcgctggctgcccgcggagtacgaggacgggctctccctgcccttcggctggacgccggggaagacgcgcaacggcttccctctcccgctggtgagggcaggccgggccggggtgaaggatgggagccagaggggacgggatgcactacccaaacacgcwgtgaaaggaggaggagggatcggtgggggcagcaggggtgcgcgatggagatctgcacagacccccaccttccgctagagggcagcagagctcggagcccggagcccggccacgtggcggtcacgttctggccgccgcaggccagataccctggggtctcccgggcagatggcctccctgccccatcccgctcgcacttaccccagcccccgcccctggagtgcatcagctgttgtttgcctggaggtcctatttgttggccttatcgagctggcagcccctacccagagcccctctcctattcctggacacctggcacctccgtagctcgcatttcagaggcagcctgtctttgttttccctctcttagtggaaagggcaccggcttggcaaatcatcaagtcatacggatctgggttcaatcccatccctgtccctttgtagcggcaggaccttggagaactgacttcacctgtccaggattcaatctccccctctacagaataggctaatgccacccacctcacaaactccttgtagggattaagtgcacttgtaacatggtaggtagttaataagctgtagttgcatctgaatcctcaaagcactttttcctctaatctgccctccccttctctctccatctgtaggcccgggaggtatctaacaagattgttggctatctgaatgaggagggtgttctggaccaaaacaggtccctgctcttcatgcagtggggtcagattgtggatcatgacctggactttgcccctgacaccgagctggggagtagcgagtactccaaagcccagtgtgatgagtactgtatccagggagacaactgcttccccatcatggtacggccctgcagctrggcatctctgactagccccttgcccaccctgatgtagcagacattcccagctcatcagctaggatctctggatagatctgggatactgatttggtagtttcccatgcctcacgtgtccattcgttcactcatccgtttattcagtaaatagacattgaccaccccataccaggcagtgcactaagcgctgaggattccaaagtgaacaggacaccgctcctgctctcaagaacaaagggccagtgtgggaattggacaagtaaactactgatagcagaatgggaacactggagaaggttgtctacattcccgacccagcagcattggtaaaacctgcttattagaaatgtaaaatctcagttgggcgaggcggctcatgcctataatcccagcacttggggaggctgaggtggacagatcacctgaggtcaagagtttgagaccagcctggccaacatggtgaaaccccgtctctactaaaaatacaaaaattagcctggcgaggtggcacatgcatgtggtcccagctactcaggaggttgaggcaggagaaccgcttgaacctgggaggcggaggttgcagtgagccgagatcacgccactgcactccagcctgggcaacagagcaagattccaactcaaaaaagaaaaaagaaaaagaaaaaaaaaatgcaaaatctcaagtctcacccaagatgttaggaaatagattctacatttttaccaagatcaacagagattcattttatacatgataaagtttatactgctgtacatcatcgtggaggatgacttcaactccactcagaaggacttgaaacctggatgaatccgagtgagcagcagggatttgtagggatttccatccggaagggagaggagcttgcagcaatgcatcttttcttattattcatgggtattacagttggagagtcatttcttcactcaaagaataaatcgaggctatgtgctgtggtataaagagcataaactgtggaatgaagccaatgatctgaatcctacatctttcccttccagtgtataagttcttaggcaacttacttaacttttctgagccccagttttctcatctataaaatggaactgaattgtccaccttacagggtttttttgaggactgagatgagttaaagtatgcataattcctggcacatggtaagtccaaaataaatacatggcagctgttgttagtagtaattattaacaaacctgttcccacctcgtgtcctgctttcctgtccagggagctcaatactccctcctcaccagaaatttggagccctcactgtgaggactgaatgattaccctcagttctttcacacaacaggatgtaatgaacttcaggatattatgagcccagggtgtgtaatgtcagcaagaagtgtctggggtcagtgtctggtaccagggtcctaggagggtgccatcagcatctttgcatccagacttgccctggggagaggttgccaggacccagctgttccacccctgcccagtcacttatgcccactctctctgcagttcccacccaatgaccccaaggcggggactcaagggaaatgcatgcctttcttccgagctgggttcgtctgccccactccaccctacaagtccctggcccgagagcagatcaacgctctgacctccttcctggatgccagctttgtgtacagctccgagccaagcctggccagccgcctccgcaacctcagcagccccctgggcctcatggctgtcaaccaggaggtctcagaccatggactaccctacctgccctatgacagcaagaagccaagcccctgtgagttcatcaacaccactgcccgtgtgccctgcttcctggcaggtgagtctagcctgggaacagaagggcccaaggacaaggggattatccagggaagctttaccactgcccccttcttgtcatctttctggaaaaatgcacactgagccattgctgtccctagcagtggtccaggactagcagaagggcccagatgaataaagaattccagaacatatgttcactgtaaaacaaaatcaggaagtccagaaaagtaacaaagaaaataaaaagaaagtgccaggcttggtggctcacgcctgtaatcccagcactttgggaggccgaggcaggcagatcatgaggtcacgagatcgagaccatcctggctaacatggtgaaaccccgtctcttctaaaaacacaaaaaattagccgggcgtggtggcacacccctgtagtcccagctactctggaggctgaggtagaagaatcacctgaacccaggaggcggaggttgcagtgagccgagatcacgccactgcactccagcctgggcaacaaagcaagactccatctcaaaaaaaaaaaaaaaaaaaaaaaaaagaaagaaagaaagaaaagaaaagaaaaagaaaattcacacaatcccactacccaccaataatcatcgttaacattttcatgcttattttccagtattttttctatcacagatacagttctacattgttttacataatcgggtcttactataaataatgctccaaaacctgatgtcttcacttaatttactccatgccattaactgttcttctatgacgtgatttttaatggctgcctggtatttcatgacacatattaccatcatttattttctcaatcctacttgggggaatttagttatttcaagttttcctgtgttttgttgctgttgtttaggtaatgaacatcttcattgataaatctttgttctcatttttaatacatttattaagctaatttcccagaagaggaagttctagatgaagaggaatgtatatttttaaagctttttataacctggggacaaaatccccattccattcagcctgtgcacgaccaaagccctgctaattctgttcattccaggtgccctcctggtcctctctgtctccggcttctagaggccatcccaccctcaaacatcctctctctttggacaaaccccctggccaccctgacattgcagaaggccagctcttaggccaagatacctttatagatcttttggattttgtgttcacatatatcccacakcaatccagacacaaaaccgagttctttcttgtttttcataaaaatatgcactcacaccaagaatttacaattttaaatagatttcctggcctggtgcagtggctcaygcctgtaatcccaacactttgggaggcttaggtgggaggattgcttgaggccacaagttcgagaacagcctgggcaacatagcaagacccctgtctctacaaaaaatttaaaaactagcaacacatggtggcacatgcctgtagtcccagctactctggaggctgaaacaggaggatcacttgagyccacgaggttgaggcttcagttagccaagataatgccattgcactccagcctgggcaacagagcaagactgtccagatagatagatagatgatgatagatatatagatatatagatatatagatagatagatagatagatagatagatagatagatagatagatagdctctcctaaagattagagggcacagggagaagtcctttatccccttatgagacacctggtctttggccatttaactgttcccccatcgttactcctctctccctcccactacagacccccatctccagattattctccctttattacccagaggaactcagccttacccaagctcctcacctcaaacccgcattcctaaaaccttcaaatttgctctgtgaagtaaaaagctcctcattcattcgaagctccccttcctagaaggcggttgggttataattagcaaaatgttactgtgtagtttgtcaccactagcctttgtcacagtgctgtgataggctttattctcattttcataggtaaggagaccgaggctcagaagtgttaagtaacttgtccaaggtcacacagctaaaaagtgtgtatatagaactgagagtcaaacctatgattcagtaccccctccccatccctattcacctgacgggaagtagggcttgttgacggggcggggggggcggggcgcggtcctgtggggcaccatcatttctttgtgcaggttactgggtcctggggctgttagggagaatctaccttcctgccttctgggctttcaggagattctcgagcctcagagcatattctgctggccacatcccacaccctctttctccgcgagcataaccggctggccagagaactaaagagactcaaccctcagtgggatggagagaagctctaccaggaagcccggaaaatcctgggagccttcrtgcaggtagggagtcccaggagcactgtcacctggtcccacctggctcccactcctggctctgccctctgctggctgctgtgcctcaggctctctcctctgttcccacacctccgtttcccccggcccctctgctgcttctctcttgttgtctcattctttgaaatccccttcctttcatwtcttcagcttctctgtctcaaaatgaatctctggatttggagtgttggaaagtcacttgtgcgttggtcccttcagtgtgcctgcctgggtgccattactgggactgtaggctccttcactcccgggactgctacatcgcagtgatttgggttattttgatttgattctcttcctttttaattgtctacatctacgcccatctcatgggcatactcagcggatactgttgattggctgatcaactaactagaagagatttacaaaggttgatgtgttgatattaaccatgcacatattttttaaacattttattttgaaataattatagattctaatatattgcaataggaggggggtttcaaaggatgagacaacaggagagaagcagcagagaggccgggggaagcagaggtttgggaacagagaaggtagctggaggcgcagcascgagcagagggcagagccaggagtgggagccaggcgggccccagtggcagggctcttgggcctccctccctgcagattattagattctaagaattgtacaggaaatttttaaaaatgtacaaggaggtcccatgcacccctcacccagtctcctccttacattagcatgtaagtgctaatgtcttacataaccaagatacactggcaaaaccaggaagttaacaatgatataaaccatagagcttactcagatctcaccagttataaatgcaatcaactgtgtgtgtgtatgtgtctgcatagctctatgcagttttatcacagatgtagcttcaagtactaccacaataaagactcttaaccgtactgtcccctaaaactccctcatgctatctcttcatagccacatccaccctcacccctatatccctaacccctgacaagccctgatcagttctccatctctatgttatttcacagatgttatatacatggaattatgcaacatgtatccgagatgggcttttttcattaagcataatatctttgaggctcatccatgctgttgtgtatataaatatttcattcctttttgttgctgagtagtattccatggtatgaatgaactacaatttgtttaaccattcaacttttgaagggcatttggatagtttccagttttagattattatgaataaagctactacaatcattcaaacataagtttctgcatgaaaagaaatgtttatttgtttgagatacatgcctaagagtgcaattgctaggtcacatggtaagtccatttttaggtgtttttttttttttaattttttaattttgtgggtacatagtaggcgcctatatgtatggggtacattagatggcttgataagggcatacaatgtgaaataagcacatcgtgaagaatgaggtatcctgctgggcacagtggctcatgcctgtaatcccagcactttgggaggctgaggtgagcagatcataaggtcaagagatcgagaccatcccggccaacatggtgaaaccttgtctctactaaaaatacaaaaattagctgggtgtggtggcatgcgcctgtagtcccagctactcgggaggatgaggcaggagaatcgcttgaacccaggaggtggaggtaggaggcggaggttgcagtgagccaggatcacaccactgcactccagcctgggcaacagagtgagactccctttcaaaaaaaaaaaaaaaaagaatgaggtatccatcctctcaagcatttatacattgagttgcaaacaatccagttacactcttaagttatttgaaaatgcacaattaagttaaattattattaactatagtcaccctgttgtgctatcaaatagtaggtcttactctttttttttttttttttttttttttgagatagagtcttgctctgttgcccaggcttcctcagcctcctgagtagctggggtttcaggcacctgccaccacgtcctgctgatttttgtatttttagtagagatagggtttcaccgtgttggccaggctggtctcaaactcctgaccttaagcgktccacccaccttggcctcccaaaatgctgagattacagacatgagccaccgcgcctggccatcattctattttttggtacccaccaaccatctccacctccgccccccacagcccctcattacccttccagggatctggtaaccatctttctactttctatgtccatgagttcaattgttttgatatttaaatcccacaaataagtgagaacatgccatgtttgtctttctctgcctggcatatttcacgtaacataatgatttccacttccatccatgttgttacaattgactagatttcattcttttttatggctgaatagtacaccattgtgtatatgtatcacattttctttatccattcatctgttgatggacacaagttgctttcaaatcttagctattgtaaacagtgctgtaacaaatgtaagagtgcggatatctctttgatatactgattttatttcttttgggtatacacccagtagtgagattgctggatcatatggcagctcaatttttagttttctgaggaatctccaaactgttctccatagtggttgtactaatttacattcctgccaacagtgccaaatgtgttctccacattcttgccagcatttgttattgcctgtcttttttatataagttattttaactggggtgacataatatctcattgtagttttgatctgcatttctctgatgatcaatgatgttgagcaccttttcatatgcctgtttgccatttgtatgtcttcttttgagaaatgtctattcaaatcttttgcctatcttttgattggattattagatttttttcctatagagttgtttaagcttcatatatattctggttgttaatcccttgtcagaagggtagtttgcaaaattaatattttctcccattccgtgggttatctcttcactttgttgattgtatcctttgttgtgcagaagctttttaatttgatgtgatcccatttgtccatttttgctttggtggcctatgcttgtgggatagtgctcaagacatttttgcccagaccaatgtcctggagattttccccaatgttttcttgcagtagtttcacagtttgaggtcttagatttgtctttaatccattttgatttgatttttatatatgggtaaaagataggggtctagttttattctccggcatatggatatccagttttcccagcaccatttattgaagagactgtcttttccccagtatatgttcttggcatctttgttgaaaacgagttaactgtagatgtgtggatttgtttctgggttctctattctgttacattggtctttgtgtctgtttctatgccagtaccatgctgtttggttgctatagctctgtactataacttgaagtcaggtaatgtgattcttctggttttgttctttttgcttaggataactttggctactctgagtcttctacttttagttttaaaaggaactgccaaactattttttagaatggctgtaccatttacattcctatcagcaatgtatgcatgatccaatttcttagcatcctgacggtgtcaccaccattttttgttttatcctttctgataggtgtgtagtaatagctcattgttttaatttgcatttctctaatggctggtaatgttgaacatcttttcctgtgctcatttgccacttgtgcatcctcttcaataaaatacttgttcatatattttgcctattttcaaattggactatttgacttgtaatgttgagttttgagagttctttacgtattctagacacaagtcctttgtcagatatgtgatttgcagtgattttctcccagtctataatttggtgggggttttttttttcatcctcttaagaaggtcttttgtagagcaaaagcttttaattttaatgaagttcttttaatcaaattttcctttcctggattgtgcatgtgatgtcaagtctcagaacttttttcctagtcctaggtcccaaagactttctcctgctttttccttctagaagttttatagttttatgttttacatttaagtctatgatccattttgggtaaatttttgcataaagtgtgaggtttaggtcaagatgcttttttaaattttttctggctatggatgtcaaattgctccagcaccacttattgaaaggctattgtttctccattgaattgcttttgtttctttggtaaaaaatatttgggcatatttacatggatctatttctgggttgtctattctcttccattggtttgtatgtatgtctattcctctcataccacagtgctcaattactatagctatacagtaagccttaaaacactttattcttctttttcaaaattgttttggatattctaggatctttccctttccatacatattattaaataagtttgtgtatgtctatcaaaaaaccttatggaaattttgatagaaattgcattaaaattatatatacatttagggagagttgacatctttacaatgttgagttttccaatccataaactaagtatgtctccccaatctttagattttttatttctttaatcaacattttgtagttttatcacacagattctgtacatgttttgttagatttatacctcagtatttaattttcattttgttttgttttgttttgagacggagtcttgctctgtcaccaggctggagtgcagtggcacgatctcggctcactgcaacctcccgggttcaagtgattctcctgcctcagtctcctgagtagctgggattacaggcgcccgccaccatgcccggctaatttctgtattttagtagagacagagtttcaccatgttggccagaatggtctcaatctcttgacctcgtgatccgcccacctcagcctcctgaagtgctgggattacaggcgtgagccaccatgcccagcccagtatttcattttctttggaggaattataaatggtattacagctttattgcagtttctacttattttatcagtgtatgaaaatataattgatttttttatgtgttgattttgtatcctgtgaccttgctaaattcaattagttctaggcattctgctgtagattacttggattttctaaacaggtaatcatgtaatatgccaataaagacagttgtgtttcttcttttctaatccatatgatttttctttctttttcttgccttattacgtggcaattcctggaacttcctagtggctcaaacttccaatactatattaaatgcgcatggtaagaaagcaggcatccttgtcttcccaatcgagaaagtattcaatctttcaccattaagtataagattagttataaatgttttgtagttgccctttatgaggttgaggaagttctgcttcattcctagtgtaatgagagtttttatcatgaacaggtgtagaactttgtcaaacggtttttctgcatcaattgataggatcatatgatttttatcctttaaactatactgcttgctttggatttattttgctcttatttttcaagtttcttgaagtagaaacttagatgactgatttgcaatcttttctattttctaatgtatttagtactataaatttccctcttagcactgagttgactgcctcccacaaattttgatatattgtgtttttattttcattcagtaggtattttttaagtttcctttcggacttcatctttaacctatgtataatttagaagagtgttatttaatttccaagcgtttgtagattttcctgttgccttcctgatttctagtttgattccatcatgatcagaaactatactctgtatgatttcaattttaaatttgttaagatttgttttataaccctgctgtggactatcttgttgaatattctgtgagttcctaaaaagaatgtgtattctgctgttgttgaatgcaatgttctgtaaatgtcagttggatctgttggttgatggtgctattcagtctgtactccagctaattttctgtctagtaattctcccacttactgagagtcaggtgttgaaatccctagctataaatgagaatttgcctatttcttcttccagtcctgtcaggttttgcttcatgtattttaaagctttaaagttctgttgtttgatccatatcatttaggattgcttcatcttcttgatggatagatccttttatcattatgtaatttccacttttgtcctctgaagtcaactttatctgatattaatatagtcacccctgcttttaaaaatttatgtctgcatgatctttcttattccatcaatttcaacctacctatgtcattatgtttgaagcgagtttcttttagacatcatatagttgggtcacttaaaaaaaaaaaggaaaagaaatatactctgccaatctctgacctttagtaattagtacttttaaattatctttaaaataattattaacatgttagggattaaatctcccatatctctcattttattacttgttttctgtttgttccttctgtttcttcttcctctaatattgtttttcttgccttcctgtgggttaattgaacattttttagaggtccatttgatcacatattgctttgtataattttcttagtggttgttctccggatagataggtagatagatatagaaataaagatagagagagagatagagatatggatttacaacgtatcacaacctattggtgtcagtgctttatcatttcaagtgacatgtagaaaactcatttccatttggtcccttcaccttccccacttttgaaatataattgtctgaagcatttcttctatatatgttttatagcacatcagatggtgcttcaaccataaaatataatgaaaaaattcatgaggtggaaaagaattgatgtttacttctatttttacccattacattgttcttctttcctttctgaaggtcctgtccttcttctattaccattcttcatgtttagagagtttcctttagccattgtttaaggataggtctgtgtgcagcaaattctctgagtcttcctttgtgtgagaatgtctttatttctcctttattcctgaagaatcgttccaccagctattggattcagggttggtagttcttgtctttcggcacatgaaaaatgtggcgacacttcccctggcttctgtggtttcagatgagagcttcaccgatattttgtttgtttgtttatttctttgtttctttgagacagagtcttgctctgttgcccaggctggagtgcagtggcaacatctcgactcacggcaacctccgcctcccgggctcaagcgattctcttgcctcagcctcccgagtagctgggattaccgatgctcaccaccacacctggataattctttttgtatttttagtagagacaggatttcaccatgttggccaggctagtctcaaactcctgacctcagatgatccacccgcctcagcctcccaaagtgctgggattgcaggcgtgagccaccacacccagccctttaccattacttgaattggtgtttctttataggtaatgtgtcatttctctttgactattttaatactttatgtttagttttcagaaatttaattatgatatgccttggagtgaatttcgctgtttatcctgtttgggattcattcatcttcttgaatctgtaaatgtgtgcctctcaccaattttgagaaattttcaggcattatttattcaaatcctttttcagtttcaccccctttctcctctgtttctggaactccattgatatgaatgccagatcttttgttatggtctcacagaacccagaggctctggtttgtttgagcaatttttaaagtctattttctttctgttgttcagattgagtaaattctattgatctgtctccaattctatcctctgtcactcccactctgttattgagtctattcaagcttttttaaaatttcagctagtgtattttcagttctgtaattttgatttgtttcttttttataatttctacttctttgctatgatactgtatttgtttcaggagaatctgtaattgattattgaagcatttttataatggctgcttttaaaatttttatcagataattatagcatctgattcatgtcatccttggcatcagttgattgtctgtttactcaaaacgtggcatttctggctcttggtattatgagtgattttcagttgtatcttagacattttggttgctatattaggagacccttgatcctatttaaattttctattttaggccaggcacagtggctcacgcctgtaattccagcaatttgggaggccgaggcgggtggatcacctgaggtcgggagttcaagaccagcttggctaacatggtgaaaccccatctctactaaaaatagaaaaactagccgggcttggtggcatgcacctgtggtctcagctacttgggggtgctgaggcaagaggatcacttaaatcagggaggtcaaggctacagtgagccaagatggcatcactgcattccagcctgggtgacaaagtgagaccctgtcaaaaaaaaaaagcacttcattttagcacatagttaccttgtttaggtttagcatgtaggttctggactacttttgtgggctttaggtccaccaaagcttagtttcctgagccttgcaatgctattctggtctacttcactcttctggtgtttgggggsttcccactcaatccctgctggtgctgtctgcaaggcaggaaagtacttccctggctgcctgctgttgctgagcaaccttctaggggaacaggaaccactgcacctgagctccttatggcactgggttaagagcaaagagacacagagcctcactgtgaaagctagatagaaatgtggaaaatgtgaagcaaaaaagcagaatgcacaggtatgcattctgtaggattataactatgtaaaagtcggtaacatatagacaaagactacaagaataaaaattaatataattattaggttatgtggaggcatttttcttttctgaaaattttttatttgtgttagttcattgtgtttttatgtaaaagaaaaccagaaaccagtctttccattcttctgtatttctttcagaactggagattggatgaactttcctcagttgcccctgaatcattcctgtggtttatcattcctcttgcyctgacattgttacattaaagtgacacacaaagactgtcactttagcatcaaggtcataaacttagcacaaagatgacaaagatagtacgtttcatatgccaaattcaaatgactgattagtagagcctatgttgagacaaatcgtaagagatcagcagaaaaaaatgtcatgattgattagcaatgtctgctatgctcataggaatgggaactgggcacatatgctatccatttgccatccttggttttcaacagctcatcactcttggctgcagctctttcacagcctccctctgcagaggtttaaaccttcttacaccctttcctcttgattttattctccctccagattatcacctttagggactacctacccattttgytaggtgaccacatgcagaagtggatacccccatatcaaggctacagtgaatctgtggatcccagaatttccaatgtcttcaccttcgccttccgctttggccacttggaggtcccctctagtatgttccgcctggatgagarttatcagccatgggggccagaaccagaactccccctccacaccctcttcttcaacacttggaggatggtcaaagatggtatgccctttcagggaagtgctgtcacctgggtctcccactccgcagcctattgtagggaaacttgggttggaagtcagattccaagcacttttacatgaccttgggcaaatgaattcacctcactgagcctcagtttcctcatttataaaatggggacaataatagtacccatctcacgaggctatccaaaacattaaatgagatatacatgtggagcaccctacaatggttcctgacacacaggaggtgatcaataaatataagctattctttctttcctcttggcttctaagatgactgggatttccctacctcctttccccgccctaggcttctctgacttctacagggtttggtaaataaattgctcttttctgatctcttctagagtttttcacttcatagaggtgccagaggttggacccaactttcctttatccctaggctatgttgtgttgaaattaactttacttaaagcctagcaagtcaaggacatttccttgagatttatgcaacctcttcccattatgcaacgttcctcagcagaacatatggaagaaaaagctgactccatgaactagagctttaaaaataccttttttttttttttttttttttttttgagacagggtcttactctgtcacccaggctggagtgcaagggcgcaatctcagctcactgcggccttgacctcctgggctcacatgatcctcctacctcagcctcccttgtagctgggattacaaggcacacacccccatacctggctaatttttttgcctttttttcagaggcggggttttgccatgttgtccaggctggtcccaaactcctgggctcaagcagtcttcccaccttggcctcccaaagtgttaggattacaggcatgagccaccatgcatggccaaaaaatatctcaatgtttatattcatgccatcatcccatgactgcccctttctgcccacccccagagcagacaatctggatgcccctgtctccctgagcacacccttcaggctgcactgtgctcttctctccctccttccagcctgggatgtccaggtgacccacattcaactaagagaaaatgtctggtggaggcagaggcaagccatgaatgatgwtcccactcttcccccaacctaagcatggcttctgggtctcccttggcaggtggaattgatcctctggtgcggggcctgctggccaagaaatccaagctgatgaaacagaataaaatgatgactggagagctgcgcaacaagcttttccagccaactcacaggatccatggctttgacctggctgccatcaacacacagcgttgccgggaccatgggcaacctggtgagtgtctgaagtctggcctgcactggggaaattttagctaactttctagggctcctggagactctcttctataaccctgaggatctgatcatctgatcaattctgaaacaaaagtcaggccagttttttttgtttgaggttttttttttgagacagggtcttgctctgttgcccaggctagagtacagcggtgcgatcacagctcacagcagcctcaaactcctagcttcaagtaatcctcctgcttaagcctaccaagtaggtgggactacaggtgtgccacatgcccagcttatttttttttttaaatatagacatagtcttgctatgttgcccaggctggtctcgaactcctgggctcaagcaatctcccaccttggcctcccaaagcactggcattacaggtgcaagccaccatgtccagccccaggccattcttaaaacccactttgttcatctatgaaacagaatgtcccatttcccctaatgcagagaaaagagcatatatctggtactatcttggcattccttaaatgaaaaagaggtcaccaactaactttaaaaacagtttaaaagccctgaaaacattaagaaaacaatagagagaaaccaatgactgttggacctttcttttgtccccatgaaaggcaatttaattaagaaccagactgcctgagttcaaatcccgcctatgccatttactagttataagactttgggcaaattacttaacatttctattcttcatttacttatttgcacagtgcttagaatagtgcctggactcatagtacataccacataactttcatgattgcttagtggttacataggacttaaccaactagcccccttaagattgaagtgcagataaaaaacaatggattccctccttccccatcccaaaggctgtaagcccagactttctagggctgatagagctggagtggacatggccccaaaggrggctgtgaacaggaagtccccgggatgagacagcctcagtctctccaccctagggtacaattcctggagagccttctgtgacctctcacagccgcagacactagaggagttgaacacagtgctgaagagcaagatgctggccaagaagttactgggtctctacgggacccctgacaacatcgacatctggataggggccattgctgagccrctggtggaaaggggtcgggtggggcctctcctggcctgcctcttgggcaagcagttccagcagatccgtgatggagacaggcaagtgcgycctcagccagggagggaagggcagggcccttctccaagaggggtgtcccaaggtcctgcgtgagcgctgactccggatctcagtgtgagtagggcttttcatggtccctgtgaccctttccttcccctgtgacagagtggggaggggccagcggccagactgtggagtgactctacttctgtctctgcaggttctggtgggaaaaccctggggtcttcacgaacgagcagaaggactctctacagaaaatgtccttctcacgccttgtctgtgacaacacccgcatcaccaaggtcccacgggacccattytgggccaacagctacccctatgacttcgtggattgctcagccatcgacaagctggacctgtcaccctgggcctcagtgaagaattaggggcccgcgctgcacaggaaagttccctttggtccacagggccatttcaagcaagttcaatgacctggtcccttagagctccatatcccagtcccagcccttctttgcagctgggcctctctatayccctggatgaacagcttgctcaggccccagggtggctgcctcggccctcccagctcttacactcagctccagtggcttctcctttctgtcaagacttagccccgctgagatgcccttctgctccagcttgctggatgttacctgtcctcttccctccacaagtcttggcccttaacctttatctttcttcctgtcctctcacctagattgtaagctccctgggccaggacttcagcctgcctccgagggtcccctgtggcacctagcatggtgcacagcacattagaagtgctcaaaaacatctgatgactgactaaagatgctaggcgtgacaccgttccctccaaaagcagacctcggaatcactgccaaataagtaactagacgtttacaggccatacatgtcttaccactgagatggcgcgtgcgtgggtcttgaggtggaaggggatggtttggtgggatttctaagagttctcagagaaaggggaggggcagggggctcctggggaaaacaagcactggccgtggagtagcaagagagaggacacgggggggacggtaggcggtggtgccaagggataaaacaggaagggaaaccaagcctgggtctcccgcagctgaagctaataccccttccagtggcccttctgagaaataccctcttctagagtggtccttagatcctgtgatgcctctgaaggggcacttccagaacattccttgagtttctgcccaatacatattcatatgttcttcttttaaaatgaccccctgggaaagattagcccaaccagggcctccagatcccccaactggtggggtgggagtgggagacacccagtcatcctgtgggaagagcccaggagccagatgacctcggctgcagcctggcactgccacccacttctttaaggcctcagacgagtcgcttcacccctctgagcagccctctcctcatcacagaaatgaggacaagcagtatttttgctgcttcttaccatggtgaggtcctaacgttaccaggggccccatgagtacattagaccccaccgtcctacaccacttccagccccctccccatatttgagaaggaagaggagagggagggagtccaccagtcagacgcagggttcaagctccaggcaagactactagggaaatacactccttcccctccctcagtgctggccctgtcctctgggcccagccatctgctctcccttctccaggagccatgtgcaacatgaatgagaaggagtccactgtcttgagggcctctgaacccctgtgccaggctgctgggatgcaggatgcagaggcccctcttgttggggaagggcctgcctcctcaccaggtctctgtactttctctcctaccacacagcattttgtcccctccacttcctagcccctggcacaggcctgacacagagtgaacacatagcaaacgtttgctagagcaatgaacaaacatgagggcttggtgaccacagttccctgcagggtggcaggggtggaaggtgagggaggagggtctgcaccgcatgccccggcccccaggcttccaagagatggctgccctccacgtacggatctcaaaggaaaactccccaacatcctcaccctcggttcagaaacacagggccctgagcacagaccacactggttcaagctcagagcccagagtaagcctctgcaaaagcgccagttcctcctcagacacagacagagtggaggtccccatcagcggtgcctttattatcataaacattgggagcaaataaatggtacagaaagggcaacaggcccagttcctcttcaggagaacttcagtgaataagcaagaaatcagggtgaggaagaaaaaggggagccatggcctgagcctggctggctgggcccataagtcaaccacacagcccagctgcagctggcttatccctccaaggcaccactggtccagctctgctaaccaggacacagatggcatcttggtatctctttcttgcctctatatgcttctcacgcctagtacagtgccttgcatgtagtaggtgctcaataaatgaagaaccagaggatacaagtgggccctccaagaaaccatgacagatgtaatttacaaggaagaaaactcttgtttaaggagggtaatttgctcaaggtcacatagctagcaagccacagagccaggattggaacccaggcagtctagttcctgagctgtgctcctcaccagtccgctctgctgccttccacatactcagtattctcatcagcacaaacacacactcacataaatggcacatacacataacccatgaaacactccccatgttcagacaacacacacgcatgaaaagccaatttatatacttcgcacatacatgagcacacaaatgaacgtctagtcactcattttctcagctgcacccagaacagggctgggctcatctagggcaaggagatctccgtggttccaactggccagcccagatatacccctcactgctgcacccccttacctggcctctaggaggcttccctccaggaagccaggttcaatgcaggaagtgtactgcagttgacaaagtcccggggatatgagttggacatgaagaygttgttcttagacacrgtggtgatgcctgtgttgtcgcagatgatccggggcaatgagatctgggccagggcctgtcgctgctgcatgctgaacacaccctcgttctcccaccaaaacctgcakggggaacacccatggacactgtgcccaaggatattctgggctggcagggcatcgatgggcttgtgctgctcccaggatataacaaagccacaacaaatgccacctggaagcacaggagggccccaggcccttgggcagcccaggggctttcacacaagtgatgctccactcatcgtgcagagtaaagcacagctgcccagtggcctttcccttacccctagcccggcggcctccagggcaccatgctggagggggacccgggcccacacacactcctgaagccctgtgccctggccaggagctgcatccacaggagtggaagagaatcttgggggtggtttataattcgcccacccagagaggggcacctttttctaattttcccaaaggtgcagtacaggctaagcaagaactagacatgaagacatcaggaccacgaggaaatgacactaaggggagctgtgggaaagctgggaggggactgcccactggtgactgacacccacatggtggcacagtgaaacccatgggaagaagtagctaagggtggcacttttctatcttccaccctttacaaccaggggtccaggtctttccttgctgcacccccaacaggttcagggcacattaggggcactccagggcatctggaggattcctggaacacactggaaaattactgactccctccagtccttcaactgacaggaggaaatttgggctccaagagagtcaaggatgggcccacagccacccagcggcccacgacgcctgcccctcctcaccgatcaccatcccggagcttcctgaactgggtaccgatgatgcaggcgaggagtgggcccacgcggcctttgcgcttcagaggctcggacacgccgcccatccagatgtcgatgttgttgggcgtgccatactgctccatcagtttcctcgccaatttcaggttcctcagcaccgtgcccagctggcccacagtttcaggctgcgggagcccacagaagcgcctccaggcattgtatcctgcatgggggaggggacaggtggctatgggcaggtctctctgcttcaaggtggggaggtcactggagacagcagggaagattcacatatcgccagcagcccagaaaacccaccttcccaacacaaccaaggtcatagagggagggaaggacctcacctcaaggaaccctgtacctttggcttagaccaaggggcacaactgggcctctctgggaccctctctgtctttctcttgccctcctaccataaggcaaaccctaaactgccacagttcctgctgggtccaagaatagggacatctccttgtccccctccagagcagcccgatgtgtctgtctctgacccatgagaggtgaaatgtgtctagaagcctcagccacatgggctaccccataacataggcacaggctttgaggttaggctaatctggcttcaaatttcagctttgccactgacttggctagagaacctggccaggttctgaatctcatcaagcctcagtttcctcatcagtaaaatgaaggcaataataatctcttcccccagagttaacgtacaatgaagcaaaatggaatgatgacagagacagattttcagactgtgggttatcattatgatgacgatgcccctaatatgagaattacagcatgcaaaggaggttgagaggagctggaaatttatcaggtgggtccgggaaaaggcaggggcctggcctcaggctacttcctgagagcaaagtgcctctaatatgctttggagagggcagggaccctagagtgggaaggggggtgatgggctacctaggaggcagctcaggggaggtgagcatcaggggagactcctgcagcccctcacctgggaggccgtggtccctgctgcgctgcatgttcagagcaggcaggtccagcccaatcctcatgacctgctcaaacaatcgctcccrgatctcatccactgcaatttggttctgacgattcagcttggcaggggtggccatgaggccccggaggatggggtcaatgccacctggggaccagaggagccaggtcaggggaagtatctggctcagtatcagagctcagattggagtcagggacaagtccaggtagggtcaggaggattcgagaagagggctgggcacaagcagtgcctggtgccaaggtggtggccccagtgagcaggtcctcaccggtcactacatgaccccagggacatataggtctcaggagattatgccattcagacttgcaagattgggatgctcccaggccctggcttcctgggtcacagcgagccacaacacataggaagtagccagttccctctgagggccatccccaccccactgtttattatcagatatggaagcagagtcagaggaactgaggctagagagtcagaccagatctccaagatgggaggaaagcagactgctccccaccctagctccctagagccaaggtgatccctaccccacctttagctgtcagcccactcgctcctggcctaggtcctgcttaccttccagcacgaccctccaggaggcaaaaaagaccctgctgagggggacacgggggttgggttccatgggctggtaccgattgtccaggcggaacatgaagggttggatgagggtgtggccgtagcggaaggcattggtgaagacgttggcgatgcgtgggtccactgagtcattgtaggaacggtacgtgggcaggtacttcctcatggcygttggccccagcaccaggggcaggtagtcccgrtaagtgatgatctaaagacaagtcatttggaatggcctctccacccactcctccacagcaaatgccgcctggcagcacaggagggccagagtctctgcctgctcttggcttcggggaccccttccatccctctatggtcagggaatagcctcccacaataccggacctgggcctaacagagtggcactgagaggcataaatagagttctactgcttgctggctgggtgaccttggaccaattattaacctctctgagcctgagttcctcaaatgtacattaaggataattatattgccctctgccttagaggactaaatagcaaatcacttttttagtcattgtgataacttccttgtcctcaagttattaatgtctcatttctgcaactatcttataaagtccttgagagcaagggaaattgaagttgttgaaattcttcacagtgcccaccaagtgcctgcccacagtaaggctcagtttaggtttgtggaaagcagggaggcaggaaggaacgaagggccattctggcatgattttccctgtgaaaagtgaagacatggaatagtctcactctacattctagagtctagaagttattttggagtgtaaatgaatttcacttgagttcttagtgcaaatcaaaaactcacccttagcaccgaaaactctctcctccagaatctaggagtgtgtgtgtgtgtgtgtgtgtgtgtgtgagtgtgtgtatgtctgcctctgcctctgagggagagggtgggggcaatgaagcaccagatgttgagagacggaaccaggaacattgccccaggggtaaatgaggctaaggacattgggtggattatgac

SEQ ID NO: 93430 - DNA, 14869 bp, Homo sapiens
catttatccccttgaaattctccttgaccataatcatggtcaaagacttgaaatagttggaagtttcctcaggtggacaaaggtgctgagattagatgttctaaaacataacttcagtagtcattaaggccataatctgaattaagtttcctagtaaattactgaagaatgcttatttaagtcttctgatcactgtaccttgtatgtatcaagatatcgttttgtatcccatgaatatgtacaattattatttgtcaattaaataaaaaattttaaaacacacataaaaataaagttatctgaaagctattcatctaaaactgatccaattagacagatgtatcactgcaagctacagtgctcaaatttatgacattcatagtgaaataatttactgttacaatatatttaagctccctggaaccttaatgtcaaccatattgttaggcacacatagtaggttctcaataaatatttggtggaaaattgatgtattttaatgtatgtatatttgagtgagctatttctgtttttggtgtcctgtcctgatttatagtgaaatctctcagtctagattattttggcacattgccaaacataatgtaatgaaatagaaaattctgttcatactaatttatgaccaaatctaaaacctctttgaaattagtagaggtgcctttgtcttcacagagcttggaagacaatgaactatttttcacagagattatatttagttattttctttttgtaattgtattttagcacaaactgacaaacaactacatcagcattatcgtctttatcctgtattcacgaacatttaaattaaattagtattctttaggttacatatgacataacttaaaattttttctggataaatggttatttttatagttgcattatggactttggcattattcaaagaatacataatttaaattctgacaagcttttaaaacattttcttctaagcaatgcctgcaaattagtcttttctttccctttttagactggggctgtggctgagatgtcacatggcagataggatcacaaatttctgttgtatctggatggagatcagcaggaggatctatgggtgagaagaagcacagttacagatggattctagagcctgcttgctgacacaggcttgcaactgcggactttataagcttagtttttaatctgctatcagctagcataataccataaatgcataagaaactaagtattcagtcttacgagaaatgctatcttgacctgaccctttctccaaataaattgacaaaatatctcatcgtctaggatgccagacagaaataccagttgcaatgttttgttgcataaagtttatcctaatttaaattagtggcatataaagtcatcatcttgcttgaacaaacatcttattaaattgagcatgtcttttatcccatgaaatgaaattaattttgagatagttatttttcagttggaaatttattgagttgatagaaaacaagttatatagtcttccaaagaatatgttacatccatttgcattttgtttttcttcagcaatgtttggtttttagaaaatcttacaagttaaatatactaatgtagaaattgaaagaaaataatcagagatagagcaataaatttgcaaataaagattattcttaaaacaaatgtttactgtagttttatttatataaaaaatcccaaactacccaagtcttcaaataataaagacactgttaaaaaactgttacctttccatttatggattattaggtagactttaaaaatattttaaaagactttttaaagggctatgccattttccctaatgtaaaaacaaagtaaaacaccatgacgaacccccagaaaaccgacctgtatattcaatgtaccaaccaattgcatatacactagaatttttgtttgtaaatagatgagtgtgcataagacaatatgttaaagtacagacacttcctacctaatacagattgagttcttactatgtattcagttcccactatactctaggctcttggctaagcactttaagggccttatcacatttaatactcacaggagcacaatgagattgttctgggcaagccagaaaatcacactgtcagaaactgatttgctgggtgaatactttcagatcattttgaagttgaaaatcacaggcaaacactttgaagccatgtcagttgtgtattggaaggaattaaacatgcaaatgtaatgagtgcaatagattttaagagtctgttttttcggaggtgatgcagtaattgctgtggttgggactgtctcttgaagtggaaactagacaagtgggtttagacattaaaattcctaacagtggtttgctccctctgtagccttggatagagcacctgtcccttaacacattagagctcccataaaataaactgctttaccccagctaaaaggaacagtctctttgatggaacttgagctacagtcatggtgattttccactaggtacttcaaagaggacatcctctcctgaagaacagaagaacctgaaatgtttggagcctaaggtttctaggatcttcttttgccagtcttccccatttattgctctcctcccatcaaccacactgacagttgaagggttaaagagtggtgttgcatgagggtttgcacgagggagtccattttctcctaagaattattatattacattatgttgccaagacatacaaatgaagaataactggttttaatacatagaagaatcaggcttgttttgcttctttaataataatacataaaaattggtggcaatttatttttgcatgtgaggaaaataaaacgcagagaagactgtaatttccctaaagtcacacatctactgcatgagagacagagtcagaatttcaacgcaggtctgtctggcttcaaagaccttcgttatttcagtagtgggaccatggatcatatttcttcctttaaaaaatatttcctcagtatttttctaaaccttagatgatgatattgcttttataattaagcaatacatgttatgaaaatagaaataaaatatttttatgtaagctgaagaaatgagaaaagagatttttcctgttaaggaaaaacaagttcctgttcttcttttctattgtagactgctgtgattgcacctgccatcttatgcagaaatgacctgaagacagactgaaacaacgtgttctacagcctgaaaatatctaccttgacttacagttttattaatgctggtgtgatcagactggacaaaaattagcatatgttattaactgatctaattcaagtgccaattcttaatagaaacacaaaacaataaaagcaattcagaaaatatttactatttgatttcttcaagctccaaacaggcttgtgcttagctgtagaaacttgaatatatacaaatctacatggatagaattcttagtcttctttgggccaggtgtgttagccccttgggaaaggataaagttttggaatatatttttattcatgaacctgctctctttaagacttctgaggaaaagagctgctgggcagatgagtagaatatgttactactgttccgacatgtctacccatcaaaactagctgatacagtacactttaatgacccttctatagtcaaaactgacattgacattgacattaacagaaaagatttgggacaaagaactgtgttcatgcagcaaatcagcctcaaacttcaccacaagctgcacattttatgctactgtattctgcttaagcacttatttgtatttatgtaaactgaatgatcctttaatacttaaggactttattctgggtgagttagaatcacactgttttggcaggaaaactctttgataggaaaaactgtatggcttgataatttaagagctaaaagtagccaaatcaggaactactgaaattcttcagtatctgttagaatatctcctgtttgagccatgtttgtaaatgatgttcaaaggcatttcaaaaacatgtaaattaaaaaaacaattcatttgattctgctatggtttaaatatatatatccctccaaaattcatatgttggaacttaaaccccaaggtgatggtgttaagaggtgagggctttgggagttattataattaggccaggagggctctgtcctcatgaatggcattaatgccattataaaggagacttcagaaagctgcctggcctttttctgtctcttctgccctgtaagtacacagcattcatcccttttgccctcccaccttttgccatgtaaagatgcagtaacatgcaggcaccatcttggaggcaagagcacagctctcaccagacactgaatctacctgcaccttgatcttggacttcccaacatccaactatgagaaataaatttttattatttataaattacccaatcttagtgttttgttatagcagtacaaacaaacagagacagattttgacagtcatataaaacctcaagtactttgtaaaaagaaaatataaatgttgaatgattgaagaacgtgaaagactggacagtgagaaaacatgggggtaggggttgtagaaatggagtggtattcagagacataactaatttaagctatctctaggacaaggttaaataacagaaaaatcaaatgggcctctgactggtagcgtgttttgtttgggtactaaggggtagagttgtattagtccattttcatgcagctaataaagacatacccgagattgagtaattaattaagaaaaaagaggtttaacggactcacagttccacatggctggggaggcttcacaatcatggtggaaggtgaaaagcatgtcttacatggtggcaggcaagagggaatgagagccaagtgaaagcagaaaccccttataaaaccatcagatcctgtgaggcttattcactaccacaagaacagtatggaggaaccacctccatgatttaattatctcccaccaggtccctcccacaacacgtgggaattatgggagctacagttcaagatgagatttgggtggggacacagccaaaccatatcaagagtgttcagctttaaagagtgcctgagagtatgggtccaggagtttggacatccacagctattgtgactcttggcataaattgataactttcaaaattaaaagaattcatcttaaactattagttcctctgaaattccagcaaaatactcaggtttgagaatttctgaccactgcctattagctttaggtcaataactagaagataattaggctaagagctctatcagttattttatatttggggtgatagatgtcaatatttacatgtatgatttaggtgcttttgtgtggatctttgcattgtggcaaattgaggaaacctagatatttggtatgattgatttggactgctagaaggagccttccctgtttttcaccacaaaaatattggttatttccatggcctcagtatcccaggaaaaagtgaatgaaatagctaaagggaaaactcctaggtaattacttctgttgattatttaatcttagtaaatataatatttgatagagattttaactgatcaaggagagaaaatattttttgttctgtatgaatgcaacctgataattctaccaaagcaagagtggaataaaaatctttccactgacacaggttgtggtggatatgggatgtagtacaacagaaaagaaaaacacagcctcacaatatagataatgcatagctgagagaaactttcctaggtaataagcatttgcagctaagatttcctagggtgttttggaagaaaacaactgccacagaaatgcagttgggaaagactatgttgaaattttgaattttgccatttgtaaaaagggaacaaatattatttgtgaattgtactgaaaacatggatataaagaagtgatcattggggggtggaggaggagctagccgggccggggggcagctgcacagtctccaggatccccaggcctggagtggggtccgtgcatggccagctggctctgccccacggccagtcctgagcaggcctcccttgggccagcccgatgtgactgagcccagcagaccctgagcaagaagcaggtccatcgcggagccagagggcaggaggaacatgacatcayggaaatggtttcacccaaatatcactggtgtggaggcagaaaacctactgttgacaagaggagttgatggcagtttttcggcaaggcctagtaaaagtaaccctggagacgtcacactttctgttagaagaaatggagctgtcacccacaccaagattcagaacactggtgattgctatgacctgtatggaggggagaagtttgccactttggctgagttggtccagtattacatggaacatcatgggcaattaaaagagaagaatggagatgttattgagcttaaaaatcctctgaactgtgcagatcctacttctcaaaggtggtttcatggacacctctctggaaaagaagcagagaaattgttaactgaaaaaggaaagcatagtagctttcttgtacgagagagccagagccaccctggagattttgttctctccgtgtgcaccggtgatgacaaaggagagagcaatgacggcaagtctaaagtgactcatgtcatgattcactgtcaggaactgaaatacgatgttggtggaggagaacggtttgatgctttgacagatcttgtggaacattagaagaagaatcctatggtggaaacactgggtacagtactacaactcaagcagccccttaacacgacttgtacaaatgctgctgaaatagaaagcagagttcgagaactaagcaaattagctgagaccacagataaagtcagacaaggcttttgggaagaatttgagacactgcaacaacaggagtgcaaacttctctacagccaaaaagagggtcgaaggcaagaaaacaaaaccaaaaatagatataaaggccgggcgcggtagctcacgccttgtaatcccagcactttgggaggccaaggcgggcggatcacaaggtcaggagatcgagaccaccctggccaacacggtgaaaccccctctctactaaaaatacaaaaattagccgggcgtggtggcacacccctgtaatcccagctactagggaggctgaggcaggagaatggcgtgaacccgagagtcagaggttgcagtgagccaagatcaccactgcactccaggctgggcgactgagcgagactccgtctcaaaaaaaaaaaaaaaaaaagatataaaaacaaaacatcctgccctttgatcatagggttgtcctacacaatggtgatcccagtgaggctgtttcagattacatcaacgcagatatcatcatgcctgaatttgaaaccaagtgcaacaatttgtagcccaaaaagagttacattgccccacaaggctgcctgcaaaacactgtgaatgacttttggcggatagtgttccaagaaaactcccaggtgattgtcatgacaacgaaagaagtggagagaggaaagagtaaatgtgtcaaatactggcccgatgagtatgctctaaaagaatatggcatcgtgcatgttaggaacgtcaaagaaagcaccactcatgactataagctaagaaaacttaaactttcaaagattggacaagggaatatggagagaatggtctggcaataccacttgtggacctggctgtaccacggagtgccctgcgaccccaaaggcatgctgcacttcctggacgaagtgcaccataagcaggagagcatcatggatgcagggctggtcgtggtgccctgcagtgctggcattggccagacagggacgttcattgtgattgatattcttattgacatcatcagagagaaaggtgttgactgcgaaattgacgttcccaaaaccatccagatggtgcggtctcagaggtcagagatggtccagacagaagcacagtaccgatttatctatacggtggtccagcatcatattgaaacactacagcgcaggattgaggaagagcagaaaagcaagaggaaagggcacgaatatacaaatattaagtattctctagtggaccagacgagtggggatcagagccccctcctgccttatactccaatgccaccctgtgcagaaatgagagaagagagtgccagagtctatgaaaacgtgggcctgatgcaacagcagaaacatttaagatgagaaaacctgccaaaacttcagcacagaaatagatgtggactttcaccctctccctaaaaagatcaagagcagacgcaataaagtttatgtgaagacagaatttggatttggaaggcttgtgttgtggttgactaccttttgataagcaaaatttgaaatcatttaaaaaccactgtattttaactcaacaatacctgcttcccaattactcatttcctcagataagaagaaatcatctctacaatgtagacaacgttgtattttatagaattttgttttaaattgaggaagcagttaaattgtgtgctatattttgcagattatggggattcaaattctagttataggtttttgttgttttttttttttttctttttataaccttaaccagtttaatttttttttcattgtggggcaaggtaagaagaaatgatttgggaaaattaagtaacaacatcctagaaaagtgagaacaatctcatctaccatcatgtatccagtagtggataattcattttgatggcttctacttttggctaaatgagaattaagccagtgcctgagactgccagaagcttactggtctacctttgcattagcattaaggagtcatagaaaaagaatcatggatatttatgaattaagataagaggtgtggctttttttttttttttcagccgatgaccaattacagttcagctgttgactgagaaggttgtggtgggaaaacatttaccatattttctttgcatttgagtaattgtcttgtacttagaaaaaaggcacctatgaatgaccagtgtttttggttgtcaaatgttgctcacaaacttaccccaaaagtttagtggcttaaaacaatcccacccccaactgttcttcaatctgagcagggctcagctgggccgttcttctgccagcctgcaggtggccactcaatgtggtcagcaggttgacggagagactgtgttggctggggttctctcttggcctgcagtcctgagtctctccttctctgtgtagtctctttcagtggcctgactggcagggtaactagacctctcacatgcagttcagagctctcaagagctcaaaagcagaaggggccaggccttctgaagacttaagtccagaattgttgcagcatcccttctactgccctctattgatgatgacgatgatgatgattttttctaaacagaagagagctggagtatgcctctacttattaaacaagtcacgagcccagcccagattcaagaaaagggtgtgaagtggaggtgcagttaattggggggccactagtctaacagatggtcacaaccagtgccatggaaaaccaaggatattagcaaaagtagaagttgctagtgaccttgggaagccaaagccgcttacagtagctgggacaagctgaaagtcagactaagaaataaggagaggtccttcaagaagcttcctgaatgatttctgctagccctgagcctatttctggaaccagcacttggggaaactgatcctgtgagaatggatgtgtttagggacacagggcttttgaaagcagcaccaccccactgggccacctctagacttgggaatgtgatgttttcttaatgccactggttttcagtcaggccacagtgagaaggaacagccctaacaggcctccagccaggttgaaagagctcatttttgttttagccaaccggtaagattttctaatgttctaccttaagtgccttctccaaagacatccctcttttgctcatatgttgaatcatcattcagtatatttcagttaaaatatcattggttgacttttgtaacggtaataaaatgctgtggcatcttggccgtgaaaaaaaaaaaagaagtgatcattacaatagatatttgtggacaatatcattggtgtcaaatgcagacaaggtttgcagatgaaaaaaaattagatgacacaccaaacctgaggccaaacagagtagtgctaggtcatttccttggcttccctaattccccaggagggaagagctgggtgctaatcaactaataccaataaactgctcttcctttgcccctaatttttgattgttctataggtgagcagaagagggtgagtgtgtttgagggtgagtgaaggtcaagtttccgtatctgcaacaaagcgtctgttgttcaaaatctccccttgcattctaagaagggtggaccctgaaggcgcacttttatttgctgaggtggatggtgagtgaggatacaaactggggaagttaagtatctactacattgcttaatttaatgaaagtggattgagaggttggggaaggtagttccggtagcagtgagttggctacagatgtggagaagagttttaagcaactgaagtgggagaggaaattaggggcaaaggaagagcagtttaaagcagagcatttctgatgtcttcctaggtagttaaaactcgctttttcatttccacatagacacttcaaccaaagtgacttctatttttggagtggtgtgtgtgtgtgtgtatgtgtttagataggacatattgaaactgcatccttgtctggggtaaatacctgaagttcgttgtctcctggcagggaaatcgaggatgtggacacacaggaagtgagtttaagagtggaggtttggccgggctcggtggctcacacctgtaatcccagcactttgggaggctgaggcaggcagaatacctgaggtcaggagtttgagaccagcctggccaacatggtgaaaccccgtctgtactaaaaatacaaaaattagccgggggtgatggcaggcgcctgtaatcccagctactcgggaggctgaggcaggagaatcgcttgaacccaagaggtgaaggttgcagtgagccaagattgtgccattgcactccagcctggggcacaagagcaagatttcgactcaaaaaaaaaaaaaaaaaaaaaaaggtggaggtttaataggtgaaaaaaagaaaagagaataactctctctcctgcagagagagagaggggttccaaagtgggtcttctggctttatggtcaaatgcatgaggttttatagatgagcttgaggaggtggtgtctgatttacatagggcccaaagattggttggaccaggtgtggcatttacatagtgtgcgaagaagctggttaccccaccctaatcttttattatgcagatgggttttctacctggccagcgccatgttatctgttccttactgtacatgtggttgacaaaagggaagatggagctgctatgctgaacatgcctagcccccaggtagccttttcctattggtacagctgccagcatttacctatggaagattttcacttgcttatctgtgcttgcagcttgatttttcaggctgctttttgttagaaaagaaatgattttggggctgctttttattagaaggaaaccttaccaaggattctcttaccctcactaactaacttcctaaataatttctttctagctcctatatcaatatcaggtctgacytcaaggcacatttgggaggagacragggaagcccagtgaggccagtctcatttgaattacaagtgaataaattgaattttaagctgtatgcaattattattctataatctatcatgtatatttaatcatatgatagattatagaatcattatttatcttcgtttatctttatagaatacgtatttaatccccacccctctcagaggttattatacaaaagtaactaagttggaatatgtgctgacaattgcagtcaagattctgtggctagagagtagagggagtaatagaggtttttatagaatgattccagacaaactttcatttctgttgacatgagcttgacataatatatgcctacaagttatcattatttgtagattaataggacagtttataagcttcttatcaattttagtcaagatataattctttatccaactaatgagggattgttagcacataaataacattccaagagtgtgttttgtccatttcagtaagtcaaatacttattcaattggtgacaaargcaagatctaaattcacgagcactttatgtccttcctcagtggaaggtataacaggaagtaaattaaggttctatataatttattggatttttaaaagctttgtgcacttttcctaaaaatgccttgaggcattaacaataaaattaacttaagcatctgcatctacttatagccataatgatatattcaaatggaaatcaagagcatgcaaatcaagcagtatgctgttacccttagaatattgaagggtgcattaaagatatatagttattttaataagcaaggatgaaaacctttcatgtgtcctctttttatacattctgtacttctcttgatcgagcagcaaaacaaacaaacaaacaaacaaaaccaccaaaaaaccaaaacccctcaaaactaatagaagctagggttcaggggctctacttgaatgtgaatatccaagtcttttcttctgtgtctgtgccctgccatagcccctcctccctcacactgtgctggggatggctctgcttcttgcacacaccagccatcctccatcatagagctatgctggtcacacacaccttacctgagtgcttgctgccagagagcagcatgcatcattgttctagaaagtggtctttctagtagattgctagagggccctttacctttatgatttatttataagacaaaattctaaaatgtaagaaggagtagaaatatacagcataactcatgtggggaataaaagaagctttgaaatttttttctaactgattttatcttgcattgtgatctcttttgtgctaatgaggtaaaaacttaaacttgacaattaaagatagtcaagtctctactggtgaaaacagcccctttagataaatattcaagctgttcaaagttcaaactccctctcagagctatttcttttcatacaagtgatagccctgccctccctctcttccttccctgggtggcaggtgggtgcaggaggagacttaagtgttgtcacagtggtgggtgggaactagaagcctggacgctggaatgggcacgagtccactgagtcctcatcaccaatgtgtcctgtcctgcttgtttgtggggagagaccttggtctcactgcctttatcgctgacatatctggtgcccggcatgaataatgcagtgggctctaaattgctggactcttcctgatgatgtcttccctctccacctctgctttcactgatgctctggatccctgaggtttggctgtgactctcatttagccccagcttgacagtcggccattctgctcacattctcagcatcacttctctatctgtgcttatctgccaggccaactcactatcctgcaacctcagctattccctctgggatagaggacactgaggggttacttgcatgtcacactgaggacctgcagaactcaaggtaccgtctcaggccttctctctgtctaagcctgtcatgagctatttcatttcaacatagtcactccaggttggcaagggtgatttgagcggttgcctttcagagttccagtggcatttggctttccctttaaacttgagtatatctattactcttcttgaccctgatctacaggtctttgtagtctctcctctccactgctgttttcctcttatttttccctgtgaagaaggagccatttatctatgggaaatataaagggaaaaaaagaaaaaggtgatcaattccctgtaatctttagtcaaacacacatctcagtcccagctctccagggtttgttgtgtgctgtgacatcagctcctttgatgactacaagtgcagatgcacagccagtggctgtgttagcaggtaattggtagagagaagagaagccacagagagcatgctaggaggatctgtcacaaaaattgtagtccataacttcagagtgtcagcaacaggaatgcaagacagttgccacctagaagtatggatttgttttcactaactctattcatctcctcagttgagaaatgaactagctcagtgacttttttgcttcttgtgtttaacccctcatggaaaaagtagaataggcaccaatgattttatttttactgtattcttacatagcaagtatgttagtttgctagggctgccataccaaaccccacagactggatggccagaacaacagacatttattttctcaaagctctggaggctggaagtccaagatcaaggtgggggtaggtttggtttcttccgaggcttctattcctggcttgcagaggaaccccttgttactgtgtgcatggccttctgtgggcactcatccctggtgtctgacttcttaggaagatacaagtcatattggattagggccccaccctaacagcctcgtttaaacttaatcacctctttagaaacctcatctccaaatatggttaccttctgaggtactgggagttgagattgcaacatatgaacttacagcgggaaaacaatttggcccataatagcaatggcattctaaggaatttcggtacttttaaattataaccattactgaaacaaatgttaataccatccctgc

SEQ ID NO: 93431 - DNA, 13965 bp, Homo sapiens
tttcatcagttccacatgctcctgattattgcagtcttataaaattggataaggtttgtcatccaacattttttcttcttcttcagtattacgttggtttttgtaggctgtttgcctttccactaaaatgttacaatcaattcacccatatgtatatcctaggttgctcagactttgattgagattgtgttgaatctatagattaagttgaggagaattgacatcgtaacaatattgagacttctaatcaataaacagagaaaaaagtatcaatttaattagagcttgtattttttcataatgttttgcagttttccttaaataggtcatgcatacattttcttagatttaaaaggaagtattttactgtcaatgtatagttctactgtaatattttttgaatactcgattgcctttgtatattaatgttagatttcacaatcttcttggactcattaattttagatgtttctgtttattcctttgaattttctacatgaactattattccattacaaatgaggaagtttctatttcttctttttcaatctttataccttaccacccttgccctgctttttttcttattgccctggccaggaattccaatatgatgttgaatagaagctatgagataggatattattgacttgttcccagttgtgatgtttaattttgtgtcaaattgactgggccatgagattcccagattgtgtttagagtggtagactgaagaaagaatatttcctggcctaatgtaggtgaatatcagccaacctgtttaagtcccagatagagctaaaatatggaggaagattgaagtcttgctctctgtctggctgcttgaacattgaaacaacagtcttctcttactcttggactgagacttacaccatcagtcctcctggttgttaggccttcagacttggactgaaatatatggctgtcttgggtctttatctttcaaagggcagatcctgggccttcttagcttccataatcacacaagacaagttcttattataaataatattattaaaaataataataatattatgtattttttctattgattctgttttctagagaactctaagacaccaaccttatagaaaaacatatcatttctcaccagctgtagatttattgtaggtgtatattatactataaatttccctctaaatacttcttttccttcattgcacaaaggtaaatattttatttttatttacttcacattctttacaatatttgtttgaaactactgtttgatacatttatcatttaaaagtgtgctgttaaatcttcaaatgttctrggatttcccaactatattttatgcatttctagtttaattgtattgttttctgaacacatggttttcatgatttctgtgcctttaagttattaatatgtgttttaagttattaatatgttttaagctattaatatgtttctaacacattgataggcattttatgtcccagaaaagaatgtggtttccattgttgaatgttccatgcaaacttgagaagaatatacatgctgctgttattgaatgaagtggtatwtaagtatcaattataccaagttgatttttagtattgttcaggtcaacaatgtccttactgattttctgcttactgatatatcacttgtgaaaagaaatgttgaaattttatagcacactaagtataatagtgtatttctctatttcttcttcaggtctaatagagcacttcgattctttattattaggtttagggttgttatatattatacatatttggataattgtttcctttctcgttatgttgtgttgctctctatctgtaataaattttcttcttctgatgtctgctttatccaaaattaatacagttacttctgctttctttgtattagtgttagcatgatatctttttcatcctttttaaaattttaaccttagtttatatgcttcagatgagattctttttgacaacaaagagttgcatctctgtcttttaatggttcatctaaactagtcattttaaagccattattgatataggtgatttactgtctaccatgtgtgtaactgttttctattcattttgtttgttcttagtatatcattcatagtaatttttaaaaattttaagtggctacccttaaggttctaatacattcacttaactaatcaaagtttatcttcaaattatagtgtatctattcatgtttactgtaagtttcttagaatagaatagtcgcaattcctccgttccatcacttttgtcattgctgttatgcatttcacttatccatatattatataaacatatgtaacaacaaattgtcataattatttaaacacaaattttatattttattcataaaaataagaaaaataaaaaatattgtttatcataatctatttcttttctcttgcctttatttctaagtttcaggcctgcattatttttattcctcttggagaacttttatcatttattataaggcagattaaatgatgatgaatttcctcagtgtttaattttcagaggatgtcttatttttccttcacttttgaaagataatttctcatgatatctaattctaagtggttttttaatacgttaaatatttgaccctaatcttttcttgcttatggacttatgataagaagtttgctgtaattcctaaccttattcttctctaggtattttccctcttgtgtttcctcaagagtttttttttcacttttggctgtctgcaatttgaaaataatatgtgttattttgtgagtgtgtgtgtgtgtgtgtgtgtgtgtttatcatgcctgttatctctgagcttcctgagtgtttgttttsgtgtctattcttaattttgtaaagttcttagccattgttccttgaagtattacttctgctacactatctctttattcctcttttagtattactattatgtgtttgttgaagattttcaaattgatcctggttttgggacattcatttctatttttgttgttgttattattagttttatcctttgcattaagtttaagacaattcaactggcctaattttaagctcactaatttcttttctaggccatgttcagtctactgattagctatcaaacaacattcttcatttctgttactgtttttcatttctagcgttaccttttgattttttcttataattttctttacttaaattgtccatcttttaagttgtctactttttctattgcagattttaacatattagtcataactaacttcttatctgtatcatatctgagtctagtttgtttgctttctttatcgcttctgttcttcatgggcatgacttataatacttttattgaaaggcagatattttgtaaagggtaatacaatatgtatatttaatatcatgtcttaaatatatctaaggcattccaggtttatgtgctaacaacaaaataaagttcccccaaacatgtgcctcttccaatgtttcctatgtaggtgaatgacattatgatctatagaattgcatatattcttatttattttacctagtaaaaaatactgtattttttttgaccttccctccatctacaccacaatacctgctcatgcaattatatcactcacctggaaatcagcagttaaatttttgtttttcccacactagccatagattacctgtgctccattttccccatagcagtcaggataatattttaaaaatctgaaaatgccaacaaacacaaaaaatattttaattgttttcactcttttttagaaaaagacaactgttaggctgggcacgatggctcacgcctataatcctagcgctttgggagtccaaggcgggcggatcatgaggtcaagagatcgagagcatcctggccaacacggtgaaaccccgtctctactaaaaatacaaaaattagctggacgtggtggcgggtgcctgtagtccctgctactcaggagagtgaggcaggagaatagcttgaatccgggaggtgggggttgcagtgagctgaggtcgcgccacggcaatccagcctggcaacagagtgaggctccgtctcaaaaaaaaaaaagacaaagaaaaagacaactgttatcctgatcaataaaaatctaacaccctctccctaagtgtctcttcagctttttttcatatcatgcatcctcattgtattctttgctttgtcatctctgatcttttactttcgggagtctctgtactcattaataatgcccctgcatatcacagtacacttcatgtgctatttcctgtgtcttggcttctctatgctgccccacttattatctggttttttgattattcaaccattaatgcattatattccattatttgatttccactttcactaatcataattatgtcaaatcttacttccataagtcctcaaagagttagttcctttatatagcagtaatgatggatacacatttatagtgtctgttgtgtttaatgtgcttttctatctctggattattagtacaaagtaggccaaagtcacatctgtttttgttatcaacacttataaaaaatcatgacaactttaagggctcaatagtgttttgataaatatttatacattaatttcctgctgaaattagtcaccagacttatacatttaaaaactacgtattgagcccttcccatactgttgtctcaatactaggcattaaaaatgcagtgatgcctaaaatgtacttatgcatcctcatgaaactaggaggatcctcatgaagcaatgagtctaatacatggcctaatagatagcataaatattaggtattactttttagtctcagaagtatatattaaaaggtctgtaaaacaatagattatataagatctatcttgtctgtattcaccatgtaatctttacatgtaagtgttattcaaacataaagaaacattatgaaaaagtaaggcaacttctacttttcgaggcatacagatctttataggagtaatcaattgtatctgttttatcaggtaccccttgagtcaacacataataagtatgagaagaagaaaaaatgctagaaaataaatacaaaatattttaagtgaaagaattttaatgtacaaaactaaaatactgcggaaaataaagtttcatttcctaaaaattctgtttcttctcataaccagttcagaaaacaaaactctgaatgtatagatgtacaaaagcaattctatcaaatggcaagaatatcattatgaagtttgcatttttctagtagtgaatttatcagttttactactttacattgttggtcttcttatgagagcctctagaattttattggaaattcaggaaaatcttgtctatcctataatacaccataattttcttcagttattcctataagctaagaaaaatatagtcagataatccaataacagaaaatccatatctttctaattttggatattacaattactattttgtatgtttgaatcccatgctcagatcttcagtgttttatttgaaattcatgaaattatatacagcttgtaatatagatatttctataattagttatggaaagcaaagcaatataatacagtataggcttctccagatgtccatccaaataaaaatcatattgaaatagaggcccgaccaggcctggtggctcaagcctgtaatcccagcactttggaagcccaaggagggtcaggagttcaagactagcctggccaaaagtgagaaaccccgtctccactaaaagtacaaaaattagccggaggaggagcaagccggacccggcgggggggcggctgcacagtctctgggatccccaggcctggagagggggtctgtgcacagccggctggctctgtctcctcgtctggtcccgagtaggcctcccttgggctagcccgatgtgacccagcccagtggagcctgagcaagcagcgggtccgtcacagagctggagggcgggaggaacatgacatcgcggagatggtttcacccaaatatcactggtgtggaggcagaaaacctactgttgacaagaggagttgatggcagtgttttggcaaggcctaataaaagtaaccctggagacttcacactttccattagaagaaatggagctgtcacccacatttagagcactggtgattactatgacctctatggagaggagaaatgtgccactttggctgagttggtccagtattacatggaacatcataggcaattaaaagagaagaatggagatgttattgagcttaaatatcttctgaactgtgcagattatacctctgaaaggaactgaaatatgacgttggtggaggagaacggtttgattctttgacagatcttgaagaacattacaagaagaattccatggtggaaaccttgggtacagtactacaactcaagcatccccttaacacgactcatataaatgctgctgaaatagaaagcagagttcgagaactaagcaaattagctgagaccacagacaaagtcaaacaaggcttttgggaaaaatttgagacactacaacaacaggagtgcaaacttctctacagccgaaaagagggtcaaaggcaagaaaacaaaaacaaaaatagatataaaaacatcctaccctttgatcatackagggttgtcctacacgacggtgatcccgatgagcctgtttcagattacatcagtgcaaataccatcatgcctgaatttgaaaccargtgcaacaattcaaagcccaaaacgtgttacattgccacacaaggctgtcagcaaaacacagtgaatgacttttggcagatgaagttccaagaaaactcmcgagtgattgtcatgacaacaaaagaagtggakagaggaaagagtaaatgtgtcaaatactggcctgatgagtatgctttaaaagaatatggcgtcatgcgtgttaggaacgtcaaagaaagcgcagctcatgactatacactaagagaacttgaactttcaaagattggaccagggaatatggagagaacggtcgggcaatatcactttcggacctggccggaccatggagtgcccagcgaccccggggtcgtgctggacttcctggaggaggtgtaccataagcaggggagcatcacggatgcagggccggtcgtggtgcactgtagtgctggaattggcctgacagggacgttcattgtgattgatattcttactgacatcgtcagagagaaaggtgttgactgcaacattgacgttcccaaaaccatccagatgatgcggtctcagaggtcagggatggtccagacagaagcatagtaccgatttatctatacggcagtccagcattatattgaaacactgcagctcaggattgaagaagagcaaaaaagcaagaggaaagggcacgaatatataaatattaagtattctctagcggaccagaagagtggagatcagagccccctcctgccttgtactccaacgccaccctgtgcagaaatgagagaagacagtgctagagtctgaaaacgtgggcctgatgcagcagcagaaaagtttcagatgagaaaacctgccaaaacttcagcacagaaatagaagtggactttcaccctctctctgaaaagatcaagaacagatgcaagaaagtttatgtgaagacagaatttagatctggaaggcttgcattgtggttgactaccttttgataagcaaaatttgaaaccatttaaagatcactgtattttaactcaaaaatacctgcttcccaattacttatttcctcagataagaagaaatcatctcttcaatgtagacaacattatattttatagaatttgttttaaattgaggaagcagttaacttgtgcactgtattttgcagatgatggggattcaaattctagtaataggcttttttttttctttttataaccttaaccagtttaaktttttttcctcattgtgggggatgataagaagaaatgatctgggaaaattaagtaacgacatcctagaaaagtgagaacaatctcatttaccrtcatgtatccagtagtgtataattcattttgatggcttctatttttggccaaatgagaactaagccagtgcctgagactgtcagaagctgactggtctacttttgcattggcattaaagagtcataggaaaagaatcatggatatttatgaactaagataagaggcgtggcttttttattttttttcagtcgatgaccaattatagttcagctgttgactgagaaggttgtggtgggaaaacgtttgccatattttctttgcatttgagtaattgtcttgtacttagaaaaaaggcatctatgaatgaccagtgtttttggttgtcaagtattgctgacaaacttaccctaaaactttagtggcttaaaaaatcaccacccccaactgttcttcaatctgagctgggctcagctgggctgttcttctgccagcctgcaggtggcccctcatgtggttagcaggtcagcggagagactgggatggctgggcttatctctctgcctgcagtcctgagtctctccttctccatgtagtctctttcatggagccagtggtggctggcagggtacctagacctctcacatgcagctcagagctcccaagagctcaaaagcacagtagccaggccttctgaagacttaagtgcagaattgtcacagtgttccttttactgccctctattgatgatgatgattttttctaatcagaagagagctggagtatgccctctacttactaaacaagtcacaagcccagcccagattcaagaaaagggtgtgaaatggagttacagctaattggggggccactagtctaacagatggtcacaaccacaaccttggccatggaaaaccaaggatattagcaaaagtagaagttgctagtgaacttgggaagccgaagttgcttacagtagctgggacaagctgaaagtcagactgagaaatgaagaaagggccttcaagaagcttcctgaatgatttctgccaaccctgagcctatttttggaaacagcacatggggaaactgatcttgtgaggatggatgtgtttaggggctcagggcttttgagagcagcaccaccccactggggcacccccagacttgggaaatgtgactctttcttaatgccactggttttcagtcaggccacagtgagaaggaacagccctaacaggcctccagccaggttgaacaagctcatttttgttttagccaactggtaagatttgctaatattctaccttaagtcccttctccaaagacatccctttgcctcatatgttgaatcatcattcaatgcagatatttcaatgaaaacatcattggttgtcttttgtaacggtaataaaatgctatggcatctttgccgtgaagttatggtctccttggattcttctgactgtggctcctgaaaggaaggccgagatccagccctggtagtagttgctttctgaggtctctcagtctcttgacactctaaggtagtttggctgccattctcactgacaaaatacatatcagcccctaccccgccccccaatattcattgaactttgaattgcttcagaacacaggtgtggcctgaaggtattcccttattarggaaatgttgtgactgctgtcttctagtcaaacttgtaaagaaaaagatttcagttcagtatttgcagcaagaagcttgaatcctgttctttttattgcattgttacatatactcactctccattttgctttggttttgtcttgacttgactttgggggtaaagtctttcaccagcacacaagagtttgtgcaaatgtatctcctgcattaacatctctgcctgttgcttaagatcagttgcttttatactcagaatggaaatacctgatcttggctagctttgtttgttacaagatactgatttcatttagatttccctccatgaggtcaacaaactatcacgttcttatgtgaacttaggccagggccagagttatcatagaccctagattgctaaggcttatcatgtgtttggtaaaaggtgatcgcaagttctcagaagagtttactttacacgggatggaatcaggcagagaggctgggatgatggagaaagctctaggtgcaagtttaaaaaaaattgtggaaatgcaagttccaaagaggtggtttctgaggaagtcagagagcccagggccagagcagtcagcaatgggtgaatcaggttatttggaaagtcggtgtgacagacacatggatgccatttacttctaggtttctggtaggtattaaatatgcacaatattccatagctcactgaggattttaaaattataagcataggatattatatttcgyggtgaaagatttatctggcacatggtattggggttaaaaaaagccaaatttcacagtcttagtaactttttcaaaaaaaaagaaaaactaaaaggcacttcgtgtctggtgtgtggcccttctgaaacttatggtcatctctcccactgaaatcaaggtcttttcaaatgtggctaattggggatgagaaaacatgggtaggactttcttggtgtgtgtgcattctttaaagagcccatttgctttggggaagccaagaaaatggtcaatattatttttagaggttattttattggggattttaagaaccaatagcatcttgagtttttttaattcaggatgatgtggaaaggtttgcaattttgaagtgttttgttgtagcttagtatccataagggaaacttagactacagacataactacaaagccagtgcagcttttgttttctgtatgttgttggggaactcaagtttcacatatagcaagcacgtggcctccctgatgtcaggatgcctttgttaggatctgtatttgcccttaattttgttgaaatcttttttccttcttcctcttgaaacattccaaactatagtttatagtatctttcatcactaaaaatttgtttgtttttcactacgggcagttcacacaaggcaaaaaccattgaacagttggttttagtgtgtcgtataactttgctgtgtatcaaactaattttgacaagctttcatcataagcctcaaatcatgtaattaataatttgcctgtttatttaygacctaattgtgattcttttattaataaaagctaatgggaaaaggatccctgattaagctgatgactagacctacaattaattttcctgcaatatatgaagtattgtaccagagtattaaaagatatgtaatatttattgataaatctatcctttaaaaggaatatgttttaggatgtcatcattttgatgtgactcatgtaaatgttgataatatgctgtttatcatacatttagtgtttcaagaaattcacttaattgcttttttgcccaagtatattatgtagtctatttgcaactgttttttaaaaaatgacattaaaagaatagttgatgtagagaaatattagtgaatgctaattttctccccacctatatttatgaatgttagtgcaacagctttgctagttgcaaagctgtattatcacagtaaaagtgtatttgtaaactgtatgggaactaaaaattaggaataaaaccattttcttatatgaaaaaaagaaattagccaagcgtggtggcgggtgcctgtaatcccagctacccgggaggctgaggcaggagaatcacttgaacccaggaggtaggtgttacaatgagccaagatcatgccactgcactccagcctgggtgacagagtgagactccatctcaaaaattttatttccttaacaagtacttatttttttatttttatttttttaagactagtcaagtgcaataatgagaaggaggaaaagagtagaacagaagttcgatctgtgactgtgaacaatcaattgagataatgcgttatctctggacaagcctcttcaagtatttaatgaacacattataatcatattgaactaattttaaaaatatgtaatttatataaacttatatgtaaattgcacatacatatacatctacacagagcttattctcaacaaatgtgtatgtatgggcaagaaacacaataaaactcctaggacaaaatggtacactgctggaatatattactgtattgtgcctacactgtgggattgtgtacatgatttcttatggaagtgacaattgaacaaatgtaaaggtaaatttgccaaatgtaatacataaaattattgttccatctcttcactcccttcttgtaataaaatgatacatcaacacttgccatgtgactgcagttcctccaggagagaacacagaccatccagcatatcacattgatgaaggcttcaccaaattattcttgtggccgataataggatattaggagatgccatgagtttctgcttaaaatgtgcttgtgaagctcttacatttcttctaccatctgccttgaaaagagcataaccaaggctagtgctaattccagaatgaggaactcatggggaatatgtaagcccatgtttctataagtaaaaaagaaaaaaaaaaactttctgtaagccattgagattttgagtttgttatgaagaatttatggcagaattctaataaatacatcaatggtagtatcaatatcagataattctggaatgagaaaattctgaaataagcaatgtgggagaaaaattaaacattgtgaagggtagagaatgaaaaataaacccagacaataacatctcgaggtcaaactcgagatgtaataaaaataattgctatttttttttaatgcaaatcacatgccagcataggttaaagtttctctgtatattggtaagcaaattctattttgataaatgttttcattgtgtttatttttttcatactactctacctaccttatatttactatatggagttttgatagtaataggcagtatatatattttttaaaaccagtgtgacaaacttttaaaaaatatgttgtttaattcatttataattaccctaattactgacgtgtgtttaagtagagtcttttctattttataattttttcattctttcttccattttttggatgtattatatgttttttaatcaatttccgttttctttttggataatttgctagttattattttacttttagttgacaactcatataaaatttataagatacacttaactcattaatgataaaataaaatacaggactaatataagacagagtgtgtttcccagaatatttccagatttcagacaatatcggggtctcagaattcttagaacacctgtctccagttatttccccatgcctttagttttattgtagatatgtgctttaattaaggtgcatgcatatatataatatgtacttaattgtgcataagtattatatacaaagttctacaacatataattatttccttagtcaatttcatttaatccaccttcaaatttgcctgccacattcttccctctgctttctttatccccatgtttctatctgtgattgttttccagtgccaaaaaaatcttcctgtagcattttctttaatcgggacttacacagctgatttcttccagtttttgtttttcagaaattaacaattatcttcatttatgaatgatattttcacaaggtattgaattctggggttctagggtggcacttcaatgatttcagcccattgtctgctggcttctattgtttctttggggaagttttttgaaggttacattcttttttcgggcttctctaattctattttcttgctgcctttataattttcctctttgtctttgtttttggcagttttactgtgatatttctgtttcttttctttctttggtttgctttcagtttgtgtgtgtgtgtgtgtgtgtgtgtgtgtgttgttgttgttgctgctgttattgtgttgctg

SEQ ID NO: 93432 - DNA, 12734 bp, Homo sapiens
taggctgggcgtggtggctcacacctgtaatcccagcactttgggaggccgaggcgggaggatcacctgaggtaaggagtttgagaccagcctgaccaacatggagaaaccctgtgtcctgtctctactaaaattacaaaattagccgggtgtggtggcacatgcctgtaatcccagctactcgggaggctgaggcaggagaatcacttgaacctgggaggcggaggttgcagtgagctgagatcgtgccactgcactccagcctgggcaacaagagcgaaattccatctcaaaaacaaacaaacaaacttactgtaattgtattccatatgttctagaagttaagtggagagtcatggaaaatctgaaaattacccaaattgaatttctgaagatgaaaaccataatgtgtgaggtaaagtttacactgaagggaattacattgaagggcagattaaacactgctaaagaaagagctcaactattcaacatgaaacctggggaaaagagaaccaaacagattttcaaaagcatcattactaggccaggtgtggtggcacacacctgtactccgaccatgtgtgtaatcccagcacacctgtaatcctagcactttgggaggataaagaaggaggatcacttgagcccaggaatctgagaccagcctgggcaacaaagggagacctcatcaaaaaagaaaaaaattgaacaattagccaggcgtggtgtgcatgcctttgattacaactaattgggaggctaaggtgggaggattgcttgagcctgggaggtcaagactgcatgagccatgatcaagccactacactctggtctgggcaacagagtgagaccctgtcaataaataaataaataaatrcatcactatgctatgggacaacttcaggtagcctattatactgataattaaagtcctcaaagaagaggagaaaggagagaaaaaatatttgaagaaatagtggccagaaactttacaagcttggtgaaaactgtaaacccactgctaagaagcttaattaatctcctgcataagaaacatgaagcagtataccaaggcacttcgtaatcaaattgctcaaaatcagtgataaagaaaaaaaaaaccttcaaaccaaccagaggaaaaaagacatactgtgcacacaggaacaaagatatgggcaaagaagttttcttaaaagaaaagtaagtaagaattcagtgaagcaacgtctttatttttttaatttttttttttgagacggtgtctcagtctgtatcccaggctggagcacagtggcacaatctctgctcactgcaaccttcatcttccggattcaagcaattctcctgcctcagccccccaagtagccaggattacaggtgcccgccaccacacccggctgatttttgtatttttagtagatacagagttttaccatgttggccaggccggtcttgaactcctgacctcaggtgatccacccgccccggcttcccaaaatgctgggattacaggtttgagtcactgcgcctggccttgaagcaacatctttgacgctgtcatgccatgtagtaatgtcactcaatatagtaatgtcactcaataacaggtacaccttctgagcaatgtggtgttaggcaagtgcattgtcacgcgaagatcagagtgtatttacacaaacatagatggtacggcctattacacgcctgggctatgtggtaaggcctattgctcctaggctgcaaacctgcacagcatgatactgtactgagtcctgtaggcagttgtgacacaatgttaagtatttgtgtatctacacatagaaaaggtacagtgaaaatacaatataaaagataaaaaacagtacagtatagggcacttaccatgattggagcctgcaggactggaggttgctctgggtgagtcagtgagtgagtggtgagtgaatgtgaaggcttaggacatgaatatacatttttatacaacttgcagtggtttgtttataccacatcaccacaaatgtgagtaatgcttttcactgtgacgctacagccatgacattaggcaataggaattttttagttctattataatcatatgggacaaccattgtataagtggtccactgttggctgaaatgctattatgcagtttgcatgactgtactgaaagaaaaagctatccgtccaaaattcttgaccaggtgaaaataactttttatgttgtcattcctcccaccccaaatatcttcaaaggcaaaatagtgaagttttcagatataaaaaagctgaaagagggccaggtgtggtggctcacgcctgtaatccaaacactttgggaggccaagatggaaggatcacttgagcccaggagttccagtccagcctgggaaacatagccaaactggctatgttttatagactccatctttacgaaaagtcaaagattagctgagcatggtggtgtgcacctgtggtcctagctacttgggaggcaggaggatcacttaaggccaggaggtggagactgcacttaagcgcaggtgacagagtaagatcttgtttcttaaaaaaaaaaaaagaagaggctgagataattcatcatcagcagacccatgctttaagaaatgttaacacccaggtgtgctggctcatacctataatcccagcactttgggagatcaagatggtgggatcgcttgaacccaggaatttggggcttcagagagctatgagcatgccactgcactccagcctaggtgacagagaaagatcccctctctaaaaaaacaacaagtgaaattacaaagtagctcacatggaatgaaaaggaagacacacgtatgccccgaaagcatgcttgaggaaagtgaaaatatagcactgaatgcctatagtaaaaaagaaagatcttcaattgatgactttagctttcacattaaaaatctaggggaccaggcactgtggcttatgcctgcaagcccagcagtttgggagactggggcaggcaggtcacttgagtccaaggagttcgagaccagcttgggatccacagtattttggactacttttttactgtgaggaagggaaatgagaaaataaatgtagagaactggcatgaagctaactttgtataatgattgaaccctgagacagtggcctttctatcaagtttctgagatccttacttggcaaaataaaaacccggcaatattaggtcagtccccattttatagaacattttattagttcatgaaacaaaaatctaggaaccagttctttggggagtgtcaggaagcggggagggttatgttgggaggaatcacttctgaagagagatgaatagggttgaagatgaagcagtcaagatggttactaagcgttttataaccaggtgttttggtttttaaaaaatcaggcatttctgtgcattagagcctgctgctgcctccaggttgtaaacagtgttctaagggccagccacagtgaaatccagtgcagggctaccatcctgatagagcggcttggtaccagtgtcccacaccccaatgtaggcattgcccatggggacgagaggggacatagacactccttgggggccttttgtgtaggaaccgtgaccaccagtccagtgtctcagtctgtggtctctcctttaaagtaggaatcttcctaattagctgatcactctcgttcttcctggactccccagtgtctttcagaaatagcttctggtaagttgcagcttgctcatgatgggagggaaggaagaggaagtagaacagtagaggcagaacaattaaaaataaatggtgaagggcctggtgtgtggctcacacctgtaatcccagtactttgggaggctgaggaaggaggattgcttgagctcaggagtttgagaccagcctaggaaacatggtgaaacctgtctctaccaaaaaaaaaaaaaaaagtcaataaaggcacaagaagaattaataaaaataacattgattgagaactgtgtaccagataccgtttccttaagcgctttacgtgtgtgaattcatggaatgctcacagctgcctcatgagattggtgggtcgccctcttcacagatgaggaagccaaggcatggatggttaagtagcttgcccagggtcgcacacccatccaagtggcagacctgccatctccactactcatgctctaatcgctgtgctctcctgcccctgcttagggctgtctctcttatacatcctgactattacaaggggaaattattatgggttgaaaatattgagccagtgtcacttgagagaaatagtttattcatcagcatattgctttccttctctgacagcattggtgactctgcggctgtgcctgaggggtgggcttctgagggcacagaagtcttttcttggagttggtggcctctgagtcttccacagagccttctcttggagttggtgaccttctctgtggcccccttattgtcttggcaccttcaacctccagtgctttggttgtgactgggaagctctgggtgccagctgagggagtagggaagcaagacctccagggagacctgtgtaccccagtaatcactgggatgcatgagagatctgatgcatcactgtgactcaaggggaccccccacagtcagcgccccaaggcattgaaagctttgaaggatgagtgtgtttgggtccactgtaatcaatttaagtaggaattcccgcagtggttttgtgcatttctttaagaaaataacctggaagcccagtctttccagataggaaaaaacaaagggcaaggacccacttatatctaaaagtgtcctttgttaacaaaaaatctacaaagggctttttttttttttttttttttataacagagacagagaaacagggtcttgctgtgctgcccacactggtctcattctcctggccttaygcaatcctctcgcctcagcccccacagagtgctgcattacagcagagtgctggcattacaggggcgagccaccatgcctggccagagctcctttaaagagcaagtttttccagtgtgaagttataaaatagcttacttaatgtgttgtgcatgcatgtgtagctatttaaacctgtggacacaacatcagtgctcactggcactcctggtttgggatcttaccctcttgaactgagacgcggtctcacaatctgaatggaagtgacgtgtcactycggtaggcagaagtggttaagagcaggtacgtgatccttcgtgccctctgctcctgctgcagcaaaccctaaagccttgtgtggaggtggcagtgtcgcaaagtgatggagtttctgcaagacaggttcctgagtaatgtgtttagtagaactccagctgacctgtgctggacccacagctagaggaagaaataagctgtggttctttaggcctcttagatttggtagctgttgctgcattttaactttatctagaatatatagagaaattttaaaactccgcaacaaaacaccaattcaaaaatgggcctagaactcgaagagacatttctctaaagacggatagatgacttataagcacatgaatagatgcccaacattactaatccattagggaaatggaaatcaaaaccacaatgagataccacctcacaccaattaggatggctaattttttttttttacttttgaaatgtggtccttctctgtcacccaggctggactacagtggtgcaatcatggcttacccttgatctccctggctcaagcggtcttcccacttcagcctcccgagtagctgggactataggtgcatgccactacacctggctaggtttttaatttttgatagaaagagggtctaaatatgttgcccaagctggtcccaaactcatgaattaagcaatcctgccgcagcctcccaaagcactggaattacaggcatgagccactgcgcctgtctgaggatggctaataatttttttaaaagaaagtaggctttgcagatgccaccgccgctgggagccctgtactatcagccatggtcaaccccactgttcttcaacattgctgacgaaggcaagcccttgggcygcgtctccttcaacctgtttgcagacaagattccaaagacagcagaaaactttcatgctctgagcactggcgagaaaggatttggttttaagggtttccgctttcacagaattattccagggtttatgtatcagggtggtgacttcacacccataatggcactggtggcaagtccatttacggggagaaatttggtgatgaaaacttcatcctaaagcatacaggtcctrgcatcttgtccatggcaaatgctggacccracacaaacggttcccagtttttcatctgcactgccaagactgagtggttggatggcaagcatgtggtctgtggcaaggcgaaagaaggcaagaatattgtggaggccatggagcgctgtggttccaggaatggyaagaccagcaagaagatcaccattgctgactgtgaacaactctaataagtttgacttgtgttttatcttaaccaccagaccattccttctgtagctcaggagagcacccctccaccccatttgctctcagtatcctagaatctttgtgctcttgctgcagttccctttgggttccatgttttccttgttcccttccgtgcctagctggattgcagtgttaagtttatgattatgaataaaaacraaataacaaaaaatagtaaatgttggcaatgatatgagaaattggaacccttgcacactgttagtgggaataaaaatggtacagaaactgtggaaaacaatatggctgtctctttaaaaattgaacatagaattactgtataatgcagcagctgcgcttctgggtatctaccaaaaataattgaaaacagggtctctaagagccatttatttgtacacccatgttcatagcagcactattcacaatagctaaaacatggaagcaacccagatgtccacccatggatgaatggataagcaaaatgtggtatatctgtacaatggaaagaatttctgaaatatgctacaacatgaatgaaccttgaagacattatgctaaatgaagtaagccagtcacaaaaagacaagtactgtatgattccacttacgtgaggcactagagtcgtcaaggtactagtagcagaaagtggaagggtggttgccatgggctgggggatggagaatgggagttactgtttaatgggtacagagtttcagctttacagatggaaagagttacagagatggatggtagtggtgattacacaacagtatgaacatatgaacatattaccactgaactgtacacgtgaaaatggttatgatggtaaattttgttacgtgtaaaaaaattggaaaaatgtgtaaaatttcttaaattgctgaagtatatgtggcaaattctctgccccccatttcccctttcttaatatgaatggtccctcctcccacaaaactgtaagccctccctccatgtcaccgtatgaacactcattctttgttttttaatgactacatgtcatctcagtgtatggacacactatcccctattaaagagatgtaaaattagtgtgctgtaatctgtagctttcttgtatacaaacaacagtagttggttgtaagatataaaggaagagaagacaaattcaaaaaacattcctcagattattcatctaacagaatcccaaattttaaaatgcccatccgtttctctcttgttcaatacaagctgattctgaagttcagatgaaaaaatatacagagatctcgtaccaagggtatattcaaaaaagaaaaaaaatgacctacagaagtgccatgagcctctggcaaaagaagagaggtgtgtggggtctggtccatgctacagtgctcagctcaggaataacaggccagtgtgacaggacagagattcccaaatagacccaaatacacttgtgaatttagttttaggtgaagttggaataatagttgagtggagtcaaggttgattttgattgttaataaaggtttttgggacaattgggtagccatttgaaataaaataaatctggatccatatcttactctgtaaacaagaaaccaagaagtactagaagaaaacaggagtgaaattctaaagtcttgaaatggaggagggctttctaactataactcaagagtccaaattctattaagatggctgaaaagaaaaatgggtgcagtggttcatgcctgtaatcccagcactttgggaagctgaggcaggcggatcaactgaggtcgggagttcgagaccagcctgaccaacatggagaaaccccatctctactaaaaatacaaaactagccaggcatgttggcacatgcctgtaatcctagctactagggaggctgaggcaggagaacctgggaggtggaggttgcggtaagccgagatcacaccattgcactccagcctgggcaacaagagtgaaactccttcttaaaaaaaaaaagaaaagaaaagacttagaataaatttgactttgtaatatgaaaaaaatttgcatgatgtaaataatgacaaaatacaaatatttgcaactcataggtaaagaggtgtaataataaagaacttctaggaattgaaaagaaaaaagttcaaggcccaatgaaaaatatgcgaaagatagcataattcattgaaaaggaaatataacccttcaatatgtgaaagaattaacaatatttatttratttttaagggtcttactatgtcagccaggctggagtgcagtggtgcgatctcagctcactacagccttgacctcccgggctcaagcagtcctcccaactcagcctcctgagtagctgggagtataggcacacaccaccatgcttagctaatgtttaaattttttgtagaaacctatgttgtccaggctggtcttgaactcctggcctcaagcaatcctcccacctcagcctctcaaattgctgggattataggtgtgaggccctgcacctggtgaacactttattaattaatgaaagtcaaaactacaccaagatgccatttctcacctatcagattggagaaaatgcatctttgacaaccactttgttagtgagggctgagggaagcaaggatttgggaggataatcttttaataatatagatgcacttactctttgatccagtaatttccattctaagagtgtcctatctgtacatacaaaattaggtatgtacagagtgattcattgtagcactgattgctggaaaccacctgattgtccagcagtgggaaactggcttaataacctatgttatgccaacccagttaggagctgtaaaataggtaagcattgatgtggagaaatttcttggatatcttgttgatagaaaaaaaaatcaaggtgtaaaacagtttacaatactacctttttatgagaaaaaggaatgagaacatgcacctgtatttgtgtaaggaaacactggaaggataaataagtagcaaataaaaatgcttatctgtgggcatgatggggacaggatacatggtgacaagttggcagtgagactttgttttaatttttgaactatgtaaacatatgacctttttcaaaaaagctattgttaagctagaaacaaaaatgagcatgtagagtattaatctttaagaattagttaggataacacttggtgctgtaccagcagccagccacatgaggccttactcacgttgcataggtgagaactacttacctggctacacctgcctccatgttgagctgggaaatgtagcccccagctaggcagccattcccatgcccaactctacactccgtagggaagggacagtacaaggttttggtggtctcctagccatctccacctcaggacttgggcccctgatctgtatggtcacctcttcagagggccagagagcagctcccattggcggtgtgagagtgtttgcccagagttactcttttgatattgtcagtattcttatattcttattctttgccagtgatttaggtgaaaatggaacctcatggtttaatttgcatttctatgtgtcatcttaatttagtgacgtatgttttgggaacaggaaatataacaaaatagctctgtaggccgttaggtatggtttagatatggtttgtttggccctgccaagtctcatgttgaaatttgatctggcaggaggtaggaggtgtctgggtcacccagggggaagattccttatgaatggctgggtccactcttatgggaatgagtgagttctgactctgagttcctgtaaaaggagcctggcaccttccctcccctctgctctgcgatctctgcccaccacatccccttgctttccaccctgagtggaagcaacctgaagccatcaccagatgtggatgtgggcaccatgcttcttgtctagcctgcagaactgtgagccaaataaacctcttttctttataaattacctagcctcaggtattcctaatatagcaacacaaaaatggactaaggcacctttgtcatctgaagataaatttctagaatattgtcttatcatgagtttttgttttgtttgaataaaaagtgaaggcgaatgattttgagagctagtttaggagagtcttagtatggccttgacccggaaggctgaaaggcagggtcctggggcctgtgacctgtcctgatgatcaggcctgtgggatacagtagtggggaggaggttttcctgctccattctcagcacaaggagccttagggcttagagattttcaactggatgaaaatgcagatgcttgtgtttgtttattctaaagcttttttttgcaccttcatttctaattcttcattgataagttgcccacatactgcatttaaaattaatttcttttttttgttgtttttttgagacagagtttctcccttattgcccaggctggagtgcaatggcgcaatctcaactcactgcaacctccgcctcctgggttcaagcgattctgctgcctcagcctcccaagtatctgagattacgggcatgtgccaccatgcccagctaattttgtattttagtggagatggggtttcaccatgttggtcaggctggtctcaaactcctgacctcaggtaatccacctgccttggcctcccaaaacgctgagattacaggaatgagccaccgtgcctgcccccttaaaattaaatattgattaaaggcatccatctcatcaaccaacattataatgaaaagtaaatgtcagccaggtgcggtgactcacgcctgctctcccagcactttgggaggccgaggcgagtggatcacgaggtcaggagatgcacaccatcctggccaacatggtgaaaccccgtctctactaaaaatacaaaaattagctgggcgtgggtgcgtgtacctgtaataccagctactcgggaggctgaggcaggagaatcatttgaacctgggaggcggaggttgtggtgagccaagattgcaccactgcactccagcctggcaacagagcgagactgtctcaaaaaaaaaaaaaaaaaagtaaaatgtcaatcattttatttactgctggcacctggtgaacacttgataaatatttgttaaatgaatggaaattcaaataaataatactttttatttgttctcacctctactataaaatactctgaatgttctagacattattggaagatgagaaatagataacccttataaaaaggaggagtcaaaattgccattgattgcagtgactttctacttgaaaaactccaaaaaaaaaatcaagtaaaaggctgggcacagtggttcacgcctgtaatcccagcactttgggaggccgaggtgggcagatcacctgaggttgggacttcgagagtagcctgaccaacatggagaaacctgtctctagtaaaaatacaaaattagccgggggtggtggtgcacgcctgcaatcccatctactcgggaggctgaggcaggagaattgcttgaacccgggagttggaagttgtggtgagccaagatcgcgccattgcactctagcctgggcaacaagagcgaaactccgtctcaaaaaacaacgacaaaaaaaaaaacaagtaaaaattctcaaaactcatggagtcccctcccctcccctcccctgtccttccctcccctcccctcccctgtcctcccctgcccttctgtctctttttgagacagagtctcgctctgtgacctaggctggagtgcagtggcgcgatctcagctcactgcaacctccatttccggggttcaagcaattctctgcctcagcctcccgagtagataggattataggcacccgccaccacgcccggctgatttttgtatttttagtagacacggggtttcaccatcttggccagactggttttgaactcctgacctcgttatccacccagctgggcctcccaaagtgctgggattgtaagccactgtgcccggccttttctttcttttttgacagagtcttgctctgttgcccaggctggagtgcaatggcacaatgttggctcaccacaacctccgcctgctgggttcaagtgcttctcctgccttagcctcctgagtagctggaattacaggcatgtgccaccacgcccagctaattttttctgtgtatttttagtagagacgggttttcaccatgttggccaggctagtctcaaaatc

SEQ ID NO: 93433 - DNA, 37070 bp, Homo sapiens
agaatggcaaatccatttcatccacgcatgaatgcaaatctccaacataagagatcagtacaattggtacagaacaataaatatttagagttaagattcataagctgttttctacaaaaaagtgcaagattaaaattaaatccctggaccaatgaagactaaaacattacaggacacaatgtttcagtaaattggaaaataaaacagttttatttataatttctgaatcaagagctaattgttataggaattttttaaagctcaaagtgaaactgtaaacattttttcttcctcttcctaagtaagagcatcatatactgagcacatgagagaagttataaatctttcaaaaccatttggggtggttctgaggacttacgtcaagtaatcttcaaggatttcagtcttccctttaaaggaagaaataaacaaaaaaatcacatggccatttggacagtgcctcttgcccaacattatcacttactgcctaagactccaggcaacaatgtgtccagtgtatgcttttagaaagtgattacaaccaactaaaactgggaaccccaaattaaaggaagcattgccgtctgtatgctgggactgtagactcagtgacaaggtagggtggttccagaagagtgattttccctcacctgtgagtgtgaaactaacacctggctgctgacccaacatcgttttcacaaagaacaccctgggagtttcattatcatatcaggtgcttcaggcattctggactgtgactacagttcaggaggaccatcagccagtgtacacacacacacaagttttatgagactaaattcaggcaatacactctgatccccaccctaccccacccgcctaccagactcttgcctttccatcaaagcccactctctgccccacataggccaggtctgtccatcccctcaggatcaggacctttgggcttggtttttcctgttattcttctttttcccaccctacaccccatccctcaacagaaggtcagttattgtgtggaattgctcgcacaccgatgttatcatgaagcgctgcactcttccctgccttcctcctgttcaggctgttcctttaacctttggctagaggcaaggatgaacgtcacctcctggacaagacttctccaagtctttggcaaccaggaccgtgggctgggctccagggccttgcagggcctccttccaaagaaccgagtctttcttcactggttctctcctctctctctctgcctggccacaatgccttctgaggccttatcaccctttgttaacacttgctcatccagactcttctgccagggccatctgggtcttttaaattggcattagagtttaaaaaaagtcaaatcaaactggtatttaacaaaaacattgcaggcggtggctcacgcctgtaatcccagcactttgggaggccgaggcgggcagatgacgaggtcaggagatcgagacaatcctgacaaacatggtgaaaccccgtctctactaaaaatacaaaaaattagctgggcgcgctggggggcacctgtagtcccagctactcgggaggctgaggcaggagaatggcgtgaacccgggaggcggagcttgcagtgagccgagatcgcaccactgcactccagcctgggccacagagcaacactccatctcaaaataaataaataaataaaaataaataaaataaaaaaataaaaacaacaacaaaaaactcctaatcattgttaatgtggaaatggttgccactggaataaatttgaaattatgtatttaaaaaaatctaaccagtatttaagttctgctatgtgtgcctaacactgttaggagcacacagttaagacacaagttcttgcattcaagaatcatattggaagacaagatttaagtaaatgaaagccatttaacggtgacccagaaaataaaatgagtctggaatgattaataaaatcatataatgacattgtgtttcctcatctgtggaatcacagaggatttgatcaggttatccataaagttccctcttttattccaaataaatgacactagatatttcaaattttattattttttatatataacatataatttgtattatactatataatataatataaaacataattatataatatattatataatataggtaattataatatataattataatatataaaatatatataatattatataatatataattatattatatattatataattatatacaatatataatataatatataatttataatatataatataataaaataataatataaattgttatataataaaataatataacagtactatgtgccagacaccatggctgacaactcttccaactttcataaaaccatgaggtggccattataaatcttccatgtggcaggtggggaaacaggcacagagaggttaagaatttgcccgtgggcacacagcattgtggtacagttggcatttgaacccaagggagataaccagtgtgccatggcatctctgtgtagccctaacctcattctttcccatacttacttttcaaagtgtatttccttgcttctttaatgggaaaacaatgtatccttcttgggatgcctatttttctcttttccattaacccacaaacttggccttctcagttcaaacttgtacaatttgcaaccaagtttctaacattgtcttggctgggactcttctctagggatttggtttactggaatctacaaattttactccgattttagccgaaagtcctgtctcattcactgtatcgcttatctttttaaattttctcaaaacgtggtaggcaaaatcttcatcttgtagctcgctttttttctaccccttttaacattttgattccacagcctccctgggaggacctcctcatagtgcttcactgaaacctgagtttcttccatggctgctcctgtctacttcatccctgcagctgctgcacatccacccaagtcctctcaagacactgctgtgggactgagaaataggaaaaggaggaaagccagggacagctgtgccacagtgaattccaacgtagggcaacgaaagctcatcctgacagcgtactgcactttcgaggagcgtggcatttgagctgggaataaagtccgaggacatcaggaggtgaagggagagctaccgccctggctgagagagggagatgagtctggggtctgtgtgtccctcaggccagccatccctgacctctaccctggaacaaactgcctgtggtgttctgtatagtgccaaagcccagaaaacaacaaatcatgatttttttactcagaatattctcctcacctgggttccagctgagtagatctgagccatttcatgtattacatccagttcctcactgaaatgccaattgtttttcacccactcgagaaggcaagtcagcttgctgtgcccacagacatgacctcaaatgggtttgatttatttaggcaggtcagtcatctgaaaaggtcagcccttagcagttcctaggaattaatcagtggtgtgacacaacgcagctgtgattgccacaaaccagcgacaactgggtagtggcaggcacggtactaaattattaacccccagaagtttgtgcccgcccccccttttttttaaacttgccttgaatgccacctaatgagtgcttgctggggcgtgaaacagtcttgaacctacattcttgcattgttttggaaggcgtcctgtgttgatactgagtgggggcctcgtacagaccacattttgtcacaaaataaggtagaaaagagtgaatcatacacctggaaaaagatcagagaactgtgctttgaaagattaatagatgtgtttccctttttatgacgaatgaagattattactgacaattatttaaaatgtttctaataattacaatggttgttctagtttaaaactcatttcacaaaagataaagaattatacagttctaattaaggtttgggagtaatagttaaaactggttttccccaaagtacttttcaactgttcctgcacaaggagatgagtaaagaatttgctcagggtctgtgatgagctggaccctggaatgaagaccagaatccaagctcctgacctcagacccagcttagatgataaggagcgtaaatactcatactggagtttggttgttcttgaagagagatttatgatccccaaaccaggagttcctttttcccctggttgctttcaagaccttgtggtgacccacctactcccaggaggcaatcctgattaattttactgcctccaaaccggtctttgtgtcagcacttctgaattgacttcagtcttttgtttctttgttatttcttaagagtgaatttcctttctccatgtgacctgaaatatcttgaaggcaaaagacgcttctatttataactgtgcttccttgaccttcctctcccacccttctccctccatacccctcttcctgcctccctgccgcccctccccttccacacacaagtggaggcccagtgcaggaaaacctcagcctcctggcgtcaggaaggtttcaaattctcactggtaatggacacacaccgtctggaggagctgggctgaaaaattactggcctggacaaatgctcctgatttaaatgtaaattcagacttaaaaaatagacctggtgatattcagaacttacaatatcgtttaaacagactggctttctctgtgaagatcactctttaggagccctgaaaaggagaggccaggtgggaaacgggaactatgggaactgcttcctcagggaggggagtgcagggctctccaccaagtgccccctggaagctcaatgcccagcagcgccaggcgccttccgattgtatctgcgaacctaaagccctcagatgtttatgcagctctttgcggttttaaaagggttcccacacacatggtttcacctgatcctcatgagtgccttgccaggggtgaaggacagatttcattatcctcgctttatgaagaggaaactggatccctggagtccacggaaatgagaggagccaggatctgagcccacccataaatattcattgaattgcactaatatagaaatatatgattattttaaggtaaacagaatgtttgtccttaagaagctcatatctaattgtggagaaatgttcaaaaattttttttttatttatttttgagatggtgtcttgctgtgtcacccaggctggagtgcagtggcacgtactcgactcactgcaacctccgcctcccaggttcaagcgattctcctgcctcagcctccctactagctgggattacaggtatgcgccaccacgcccggctgatttttgtattkttagtagagatggggttttaccatattggccaggctggtctcaaacttctgacctcaggtgatccgtctgcctcggcctcccaaagtgctgggattacaggcatgagccaccgcacccggctccaaaataaacgtaattaaaataaccatacaaggaataaataaggcaagaccagacatccttcattgtaaaatgaggcgagaaagtgctgtgattttttaggggacttaggtaactgttaccccatgattgaatggaactgaaatttctgtatcttccaccccaactccattccatgttcctgctgaatattctgggttttgctagaattccttatgacacataaaaagtcttcagctctacgccttaggcatggcgatgtctgggtttgtcacgtcatcttcagtcctgtatttacagtgcaactcagggccaaaacaaaaaagaatttttttttttaatttaaaaagtcacagggaacatgaaaaaggggaagagggaaatttgtcttcagtgttgcaggaaagtccaccctctccttctaggggtggaacttagtggatctaatgaatcacacatgaaaagagacgtaaaagaggaaggagtttcaggagggtattggccaggtcaaaggagagggtggaggaaaagagccacgaaataaccgggagacaagctttcggaggcttttgactgactggatgtgggaatgttgtggaagacttctggcctgccatttcctgagaacgggactgctgagagaggagctgggaggagcactgcaaatttcactttggacacgtgagtcagaggtatctgtgaggggactgagttgggagggcaagcagggaattggacatgtgggcctggagcacagagaagggacttgagcatgcatatttgggtgttccctccaaaacttatgttgaaacttaatccccagagtggcagcatggagaggtggggcctttaagaggtgattggatcatgaaggctctattcccactaatgaatggattcatcatgggagaactggcggctttataagagaggaagagagacctgcgctagcaccttagcacgctcagtccccctgccatgtcatgccctgaacccctcaggactctgcagagagttcctaccatcaagagggctctcaccaaatgcagcccctcaactttggacttctcagcctccagagctgtaagaaataaattccctttccttataaattacccagtttcagatattccttgtttttaatttttaatttttttttttttttgagacagagtctcactctgtcgcctaggctggagtgcagtggcgcgatctcagctcactgcaaccaccgcccccccgggttcaagcgattctcctgcctcagcctctggggtagctgggattacaggcacctgccaccacgcctggctaatttttatatttttagtagggatggggtttcaccatcttggtcaggttggtcttcaactcctgacctcatgacccacccgcctcagcctcccaaagtgctgagattacaagcgtgagccactgcacccgaccccagtttcagatattctgtyataagcaatagaaacagactaagtatctttgacatggagtggatactggaagccatgtgacttctgtgggatcatctcgaaagaaagtgtaaaatgagaagacacaagggcccaggaaagagccctagggaactccgcatttgtacagcaagtggtgggtaaagagagaaaagggagaagcctgctaggatgctgaggaggagcagccagaggagggggaaccccrgagagcgtgctggcgtgggagtcaagagaagtgtgtcagaagaagggagcggttgacaatgtcagaagctgccaagaggcacaataagattgagggaacaagtgagtgtggttgtttctttatgggccagaattttaaataccaggatgaagggcacctaacaaatagcaaatacacaaactaacttttgtacctaccagacttcagactaaaatcggtacaaagaatactcgccagggtaaggagaagcccaggaaattacaagagatatctagtttctgaaatgaattacaatgatcatctgaacaaatagtgtgaaaaaatatacacctgaaaaaatgtgtgaaaatggccaacaaaacattgaaaatcagggttactggggaagacttttactgccagttattaaaatttactatcagctgtattgactggaacagctgccagaataggtaattcaacagccaggatgggaagccctgatacataagtttggtggggactgtaggtagcccctctggctaccttctttctagttgaataggttacatatctaactcccttgcaattaggttcacctactcaggtgcccttgagttagacttgaaaggcagaagacagcagaggccattttactgctgcttctgatggagatgcgaggcttccataggaaagaggggtccactggtataaagagcccgacaaccatgttctccagatgttcagtccctcttggccaccccacaccaaatgacagtccgcgagactctgcccatggagactccacctgctggtcctctaggtggagtaactgataacaaaaatctctagcttactcctaagtgtttattctgaaggcagtatgtacagcaagaccagacttttggcccagctagcggtgactactgcaatgtcaaaagagcacataaacagacttaaaaagcaaatgacaaactgggaaaattgctgtaacataggtaacaaagggctgatattctataaagagttcttgcaaatgaataagacaaagatgaatccaagtgggcaaaagatatgctgtaggcaatctgcaaaagtgatgcataaaaacaggttcaacattactagcaattagtggaataaaacttaaaacaacaatgcaaaaccatcgttctatcatattaacaaagatgacaaaaaatggtgtgacagtgcagggtgtggagaaaagttggtgtcaaagctgtgccatctttstgtgtatctttcatatcaaacaaacgccttcaacaatgagcacacctttcgacacgagttcccagactttatcctaaaaaaaaaaaaaatgacgtgcacacagatttagctacaagtaattttgcaaaagtgaaaagttgaaaacaacccaratgtacaaaaataggggagataattatggtacatttgtataatagtatgccacttggtcattaaaaatgccatagaagtatatttttcatarrcttatttctagctgctggttttacaggtggtttttgcttttttattttatcatttatattttcctgtaattattgcatattttttaataattttttaaaaccggcaattatatggtgaaaaggagagaagggcattagtaaattctgaagcaactgaaattaaattgtaattgctcattaataaataaacatcattacatactaacatttaccttaaataaactagatttcatttttctactatgggaggaaagacctaaaatacaaattgactcgaattatagaaaataaagttacaattcaggaatatctgtctttggactgtgaaatttgtacctgttatgtatgtgtgtgtgtgtgtgcctgtgtgtgtgtgcgtgtgtataaaaaatatttggaaagatatccactagtttaaaagtggttcctttcagcagggtgggatgagagggggacaggagacaaatttttatttacacaactctgtaygacttgttataacaagcacgaaaaatcgaaggtcacttaagtaaaaatggttatrattatgaaaatacttagaaataygtaaagtctctatggtatgattagaaatcataatgcaaaatctgtrtactgtgcttatacctatgttcrtatatttccatgtgagagaagcccgaaggggaatactctgcggtgaaagtagcttttcaagttcattcattggttcatttattccacaaatgtgtgctgagctgctaccatgggccagccaactgttgcagccaccgggatatagcaatcaaaaatcaaatgtgcctccactcagggaacttaaattctagtagtgggagacagacaatacatggtaaacccggcgagtatttcaggaagtggtgagcgtcctgggaaaagtggagcaggccaagggagactagcagtgctctgggtcaggggcaggtttaaacaggttggtcaggaaaggcctcactgaggtgacatgggaggaaagatttgaaagagctgaagggttcagtcctggaaatgcctggaaggggtgttttacaaatagacaacagccggtgcagaggccaatgcagctaacagaggaaggggagagcaggtcasacagctaggcaggccagtgggttgtccggctctgcagccattgtaaggactttggcgttttatttcaagtaaactgaggagccgctgtgcagtttggagcacagaaacgacaggatccctgtggctgctgtacggaaacccagcgactgggagggtagggagggcagggagacctaggtgttcaggtgagggatgaaggggggtgtggacatgttgaggtgttgcatcctagacacagattgaaggtagggtcaacaggatttctagtcagattgtgtagagggggtgagagagtgaagctggctcttctggttctggcctgagtaaatggagccgccattaatgcccatgggaaagacaggtgggcggagaaggtttgaaggtgggggaagaaagggtcttattttcttcttccttgcaataatatatcccaagcaatataattaagcaatatgtatttttccctttaaggaaattccaaaaattatatcgttccaaataaaaaaatcatctccagagtcctgacgcagcaaccattacattcccagtaatggaaatgttaagtcagtccgtgctctggagaaatcccacgacagaacacaggccaggagaccgggcctagattccggttttcgaaccgtgggggcaaacacggaggctgcaaatccatccccagtccggcaagattctcgaacatgtcgggagagggctgcataggaacttcaaaaacgagtagcggctcccctggattcagcgtgagggggaaaccgcggggcaggttcgraactcaggagtccgacgtctgaaggagcgggaggctgcttccgaggagcccggggcacgacgggaagggccgcgccggccaggcagccctcctcccggcagcctcgggcaggccgttcacgcgccggcgacggcgggcccggccgcaggtaccaacagcacctgtcagagggcagcgcgggcgcaccctgcaagggcyctgcctcgtcaagagaggcagcgagaaacagcagcgatgaacgaaacaaaaccttcctccaccacggctacacagagctcgcgtccgaggaagcgggaacacacaggccccggtgctttccgaaaggcttctcgccaggacccgcgaccagcgtggggcggagggggggggtcaccctytttgagaarccaggtcaagcaggccgtcgctgggcgacctttgggcggagggagagggcarggctgcaccgcacaggttccgcccctacttcagcgtcctcgcccctcccaagctccgcccagcaccccaagggccaacccccccgcgacgcatgcgtgcttcttcccgcgcggctccacctgccgcgcgcttccgctgctggccagtctcttctgcccctccccctcctgtacggccgctaytctgcgcccggcktccttctcacaacctggttctgcccacacctgttcttcagccctgtgaacagtggctgtagaacagtctcaggccctgcagacccacctccctcgctcccgtggtggcggtggtgacgggctggggacgtkgggtagaaaaatgggcgggatgtggaasgcygcgttgccggggcccacttccggaggacgggcggaagtggctgcggtggatggtgggaggggggaaggagtgcgaggggagggccgggccgctgggggtcgagggggtggggcctgggccrgcgctggggatcgggcctggggcctggattgcgacccgsggcgggccgcggctcctagccgagacggggcgggcgggaaccaggtaacgacccggcgcagttagagcgagggtcgtccgcagggcggacgggtgggggtcrragtccaggaagggtcgcagtgtcaccctcttctcttgtgaacacggggcacggggttccggggagaagggtgggaggagttaaattcttggagggggtggaggtcatgtggacgccacgcccctacaggaaggaaaggagagagagagtgtgtgtggatggatgtgtgttgagagagagaatggatgtgtgtgtgtttacgaataaacttggaggggagggggcaacaggggtgggttttcgggctgagaaatgggaacactgtggggctgctgcaagcaggacttgggccttaaacattccaggagagtgttctcgggagtagccccgggaaggactttaacagaggttgggaattacatctctggcacagttttgcaagcagagggggagcttagttaaaggagcaaagaatgcaagtggaagatgccagcatctcggtctggaaaggatttattaactagttgaagagggctggtggattaaaacactcagcaccctaagaagcttgggagattcgattattatgttgcgctttagacaggagggcaggagaaagggcgttcttttctcgatttcttagaagagtctccggttacttttctgtggtgagaacgggtacgatccatcttttatcctgaatcatgtatgtttgtacatacatataatatgtttatattatatgtgtttatatatgtaaacactattgatgaggtgactgtgttctggcgtgtgatacgtgagttaagtaggtgctttgtataaccttgcggagtgtttaacgaaggtgttttgatgatagagcctagtatggactcttaggtggggagtggaaactagaaggttttaggactctatttgggtatctagattagagagcgttataatgtttaaatgttctgcaggttaacacagaaatctgcctcctgggccatgccgcttctaaggcctgtttcttctcatgagccccagcacaagacagatgggccagttctcacagtggataacttcccctgcctgagcaagagatgggatagtatctgggatctgtccatcaccagactctgagcttaataaggcagctgaatgaagggaggtaacggacccctgagaggggcactgaagtctgcagtggggggggaggggcctggacacaccccttcccccccagactcctccccgtcagggtcagctcagccatggactttggacctggataagaagagagaagctgcactttggtggatctgatttgggattctcagttttgaaaatggagtgctgaatggggatttgatgatctcctggagagcaactgagacaagagaagaaaggtaaggctcctgtctcatttcccacttaatgtcttgctgtgcctgtgcagaaggtgttgagctggcgagttcrcggaggctactattcaggaaatcttatccagatgagtacactggaagctacacctctccattactctgtccrggtatagacttgttcccaacttccccttacccaagctggatgagtgccttgtaagggattgtgagcaatggcagttgtgaggttaggccaaggagaacatgataataattgaagacttctgaagggaggttggattagattacctttaaaggcccttccaacactgagataataggattccaagtcagtctgggttaagactggaatggattacctaggcagaggcagctgctctgttttggggagctaactgaaaaggactgctggtggggggagaaggcgggaatggtctagataacctcctaagttgtctcccttcctacttctataaggggagcttagcccatgaaagctcgggaaaagagcagaggaacagaacacaggtttgggggtcaggaaggagtacttgtgttctagctttgactttttgagtcagtgtacaaccctacacaggccatgttctcttcacctacaaaatgggggaaaactgactttccaggtcccttacaagttgttacgaggagcaaatgaaacaaggattttgaaaagtatccagggccgtgtacacaggaaacaataacatcgatgttgctctacgtgccttaaaagcacagaaacaactctgagtcaggagttctgttttcttcttgaaatagtgtgctggcaacagcctaagaagatgtccttagtgaaaagcctgcccctgaatgtgtttcatcatcttgttggtaaacagtacttgggatcatcaagttgtagaacaggtgaatagatccaaggagaacttggattgaaggagtcttgcagatactgcattggcccttatggctctccagtccaatttcagtgtgcccctttgaggtagctgattaaagagggggtggaaggatgcttaagccttgagggcaggtgtctggctaggcacttttcttggagtgagtggtggtctttaccttcctgtgccatatgctagttatctctcccgctccttaagatgacgtttttttccagacatctcttcgccctttgtattttctcaggctgtattccctataaaagcagccctgtttgtctttatcttctcacttcctgtctgctccctccttcaattccaatttacctgtgccaagatgcctgcttttcccagggacaacacacagcagaaaggaggggtagagcacagtgttgggaattttgagagacagtagggtatggtggcctgggcaaagggcaggaggcctggcttctggcatgtctctgcctctccctagctcagtaacacctaggcctcacatgttccttgaggatgggtgacagtgaggtcatctgcaaactgaaaatcctgtacttatgccttactttccatgttaaatttttttcttccatccccttccccagtctttccttttttgccacaggagttttcctcactccctccagcggcttgagaggtgggcagtggcctgggtggagctgctgctcccgagctgtactttctcctctggtctggtgcctggggcagcccctttgaggccaggctgctcctttataaggtgtgggtctcaagatgggtgtaccaccttccccagcttcacccagcaaatttctgttgccagtctttgcttagacacaggggtcacagtgatccctcggggatacgtgatgccacggtgcctcctcagccatctctggtatcccaggtaccagggagttgcgtatttgcgtaatgcttctatcacgtgatccagtcaatctgttttgtctgttttccctcaccactttgttgtgaggagaacagagcagggattcttttcccagtttgaggggaagctacggaagccctgagtgggaagggtttgcctaagggtagagcggtaggcactgaaatcacctcccagtgctgtgctgtttccacagcatctgacctgaccaggccatctgggttctgctgcaaacctccagggagagaagctctgtgccctgccagacagcctctctggtagaacgtttcctccttagagtgagcaagcattcctctccctgaccttcccaccctcctgccctgcacctgacccttccatgagacagtcccttcaagacaaccattggctttttcacatgggcaccaggatgccaaggcatagcactcagcaggtgtcaggctacttagccaggagcagtgatagacttaaccagactgtgtgtgcattttttttttgagacagagtcttgctctgtcgccaggctggagtgcagtggtgcgatctcggctcactgaaacctccacctcctgggttcaagctattcccctgcctcagcctcccaagtagctgggactacaggcacacgccaccacgcccggctaattttttgtattttagtagagatgaggtttcaccatgttggccaggatggtctcaatctcctgaccttgtgatctgtctgccttagcttcccaaagtgctgggattataggcatgagccacggtgcccggccgtgtgtgtattttaactcaattaattatttatatccttctttattccaaaaagaattgtaggtggctaaccaaaagttacatttcacagacattgtttagtgattattatgttaatctttcctctttgacctggatgagatgaatttctgggtctccattgtggggtgagggagaggggcaagcagagatattaggaggcagggagaagggaaacaaaacactgatttaaaaaatttgcttttactttttttttttgagatggaatctcactctgtcacccaggctggagtgcagtggcatggtctctgctcactgcaacctccgcttcccaggttcaagcaattctcctgcctcagcctcccgagtagctgggactacaggtgcatgccaccacacttggctaatttttgtatttttagtagagacgatgtttcactatgttggccaggctggtctcaaactcctgacctcgtgatccgcctgcgttggtctcctaaagtgctgggattacaggcgtgagccactgcgcccagcctgcttttacttttactgatgttttcaagccaacatatgttttaatttaagggcatgaattctttccaaattgtaaaaagtgtcagggatcttgggcatggtttatgggagggcagtttcctggaacagttttcacttccttttcatcttttcagttctcttttgtcagtggtggagtgggcaggggagagtattgttcctctgcctaatcttgtgactgtttatcctcctggataatctggtctaatcttgtgactgtttatcctcctgttttttccttttgcacataatccaatcccaggcccacccccagaatcctggccccttgtttctatccttcttacyccagtcactgctccccatgtaacctctatcaagagctcagagcctcttttccccaggtcagtttggcactcatttaccctggtttcttgcctctcagaccaagtgcttgcttttgcctccatgaagcccattctgattccctaaccaggccctttctttttgggatggtctcttgcagtccgggaatttctccttttggatcttcctgtgagccttgggatttcagccaagggtggtagagatggggtgtgcgttacagtgcacgaacagccgccatcctgtttccccttcacctgccttagatggagaagtatcagggtcagtggtgggaatctgatcttcccccacctttcagcaccccctgatgtctgtcctttctcctggaaggtgattttggctcctcatgtcttggatctacaaaccagtgtttcccagccttttcacttttaggaaacacaattgttttttcctttacgccttgacacctagtgtgagtgtgcagagcccccaggcccctgactcctccattaggcaaacatagggcagaggtgacagacactggcctctgactggcatatccgcctgggttcgaggctcctgccrcrgtgcgcgcagtcagctaaagtggaagccacgggcttcccgcacatcgcacactgcacacggcggcctcrgtgggcctgcccttctcccactccrcctccaggtctgggctctggccacttaagcggaggcttcacggcagcgcctgagaggagacagagccctctcaaagcactggcgctggaggatgtgtgcgggggtgttggggggcgcacaggagtgcccggtctaaaacctggctatgctccccaccaggtctggtggcttscagcacgttkgcacttaccctgagcctcaaactagttatctgtagaatggggatgataacgctcactccgcagagctgctgaggcttgaaggacaggccgagggagggtttggcccgtgaggcccctcaccatgcctggtgaccccttagcagttttgatttaggtcctcgcctccacgcaggggcctgcgggtgcgcgcggccctttgtttctctagaaccctgcacgattcgtggtttcatgtagaaacaagttagtgagcagtcagtcagtaaccacaggccgcagagttccgrgctgctccgtgctctggaacacgggggaggggttgatgtcaggggcgtgggtcctgatcacatggcagcagcccttcttggggaagtcagctacccagcagmctgtagtcctcggctacccaccctcaccgcctggggtcccatggtgagacagctgggtgggcatcaggcttctgcagagggccaggccggagggagctgggcgagggagtggggctggctcctggcttgcaccggcctcgtggaatccaggcctcagacctgatcgctggcgaaactggctctgtgcgctggagyccctggtcttctgcgtctstcctcctcccggccagactttactcctggctcagcgacaggtatttgctatggaagagctgtccctccctcccctyggtgggcctgggtccacctccacctcctcttcaggtccgcaccttcctcccctttaaaacaccagccgggcgcagacccrttctaggcttttccatggtgcttccgccaaagcttgtgaccgagtccttcccgcctagggctggtgggcctcccctgctggtaggtctctcttcgctttctttactcagaactgamgctctcattccccacccaccaaggaaaaacaaaagggaagaagccacagctggccccggcttgctttggcacaggtgtttccccccggccccccgtcgggcaccctggttcctgttctgtccctgccccacgcgaccctggggctcccacccgggctcctcagcctcccctgggttggggtggggggactggctcccagcccttggcctagggtttggtgaacgcctttcctggactgcgggcccacttcaggcgcggctccaggmtgggcagctgcgctggagggccgagggcaggggtggggtcgggcgtccaccctcagggttgcgccagggagccggaaagccgactcccgaagttggggtcctgggaaaacttgggtcctgggttgactgagaagcggcggggaaaggaggcgggccaggaggagggggcctggcggacgccggccggggggcggggcgcggcggggctgtcggtcacgcccctcagtccgccccgccccgccccgcctgccggggaagggccacgttgcccgcccggccgtccggccccggcgcgccgcagaaagggctggcgagtcgaaaggcgaggcggccgcgrcagcgcttgggacgcgcctgggcaccgggctcgctccctgcgccccggagcaggccaagttcggggccaggacgtcgggaggacctggtgagtaggtgtccggggacggaggtcagaccgggggaggcctcgcgggcgccgagagggagcccaagggacgtcgggtcgccccaaagccccggtgcccatgagtgctagcgagagggggcttggctggggagcggcccggtccgacccggtgccagctgcgcgttagtcccttcccgagccgagaggttggaactccgccttctgctttcggaatcccgggcctccagctgttagaggaagggcgggctccgcggactggggaggatgttgtgaaactcggccccgggcgtccgtgcgtgcggggcagggagggggtgggattggggagtggcctttcccccctaacctcactccagcatcctttccccaagttaatagaggctgattctcctcagcagaaaggaaatgttgattcagtgttgaaatatatatataataagttggcaagaaaacttttcttcctgtttgctaacgtgtgtggagtagagagccccgggacgtgcagtgcccgcgtctgataaactctgaagtagagggactgtggctggccggctccctgaaggctgaagcttcactttggttaacccttgctgctgtagtgggtctgccgttttgttttagaacatcactggctgagatgttgcccagctttattttcagtcatttacggtattttttcaggccgtgtagcctttgctcttacgtgctcacatcatccaggatctgccttccatcagcaatcactgcgtcctggtccttcccaattctggggaccattgagctcacccatttccctgcttctgtgtctcattctcactgttagaagcactgcggtatgcctgacctcagtggcctgtgttaacaagggaaactcattactgttcggggcagtagggaaattgtcactgtcgtcagtatccaggcagtgggaccttgtgatgaaccaaatcaaccctgtcaccttatagatgagagaactaaggtacaagtgggtcaagtgacttgtccaaagttgcctggcttgctggctggatcgcctgaatcccaggcctcatgccttttgtggcacttgtatttagctcttcttttccaggatgaataacctgcatcccttccctcctaggtcttattctctcaactcttgaattatttagtgtatcttctctgactacctttcttttttttccgtcctgaaattatgggcctggtacatgatacaggagtccagccaaggtctaagaacgaacatgaaagcagttcagttagagttccattacctgtgacatgtctatattttctggaatttttacgtagtgctttttaactttaagcaaagcagagatagaagggaaaatctgttaccatttcttccacttctgtacttaattttacagctaaatataacttctcgcttattgctcatgattggaagttgactatctggtgttcacttgctatttaagaaacattttttgccagataaaggaaataggctggagaacaccatggtatcagagtgttagaaaggatctcacagctcctaggcagtccttcaaatgcttcagaaactgagtgagccccataggggcaggtggcgcctacccagagccacctcggttttagctgaagggttttgtactgaaaagactcacttctcatctcccaccatggtgcagatgtctttgtacctggtggtgtggattggctgtgtcacctccctaaaggagttgtgaaaactctagaaagtcaaagccagttttgagtctgtgccttgcatgccagtctcataaatgacatcattaggaactcaggtcaggattaagggcagttgttctatttaaaaaggaaggtgtagcagattgtattttccctcaagggcctcacccgtaagtatccccttccacatgtagttatagtttgacattgtccacttcccacctagtggtggggtttatgattctctccccttgcatgtcaatagggacttgtggttcccttgaccagtgagtaagacagacctgatccaaggctgaatcaggaacaggatacactttcacctggcttgcccgctttcttggaacactcacctttggaatgcagccaccacttccaggacatttccaggccacatagaggggttctagtgagcactcctgctgataaggtctcagctgctgccaacatcatcctacagacatgtgagagaatgtgagagcctctaggggcatctggccctcagcttttgagtctttcagcaaggcctcaggcatagtggagcagagacacgtcatctcctctgtgctgcactgtccacatttctgaccaatagaaactgtgaggagtaagtgataactattgttttaagccactaaatatcgaggtaatttattatgcaggagtagatacctactaaggaaggagacatgagtggagacagggcctcagtgtttggacttggagctgagcacagagggcagggagggcacttgccctgcttgtcaagattatctagagtctgtttctctcattgcttcaggtactgatggctgcataatgagtcaccccagaacttagtggcttacaacaacagaatcattttattaacatctcagctatgtggttcttgcttgtggtctttcacgccattgcagtcagctggggctgggataatctggagggctgtctcctgtgtctagcggttgatgctggctgtcagctgggaccttagctggggtggtcagttggaatacctatgggggtcctgtccatgtagcagtgtcctgtccatatagcagggtcctaggagtcagcatcttaagaggaccaggtggaaactactgccttttatgagttagtctcacaagtcacatagcatctcttcccagaaccaaagggagggaacatagaccctcagctctggaggcaggagtgtctttatcacttgtaagaagagcatatggaatgggatatgtgcggtcatctctggaaaatgtcacacttcackctcttgctgctgcgttggccatctttctccctgatttcggtaatagtgcaagcagtcttccatccagccacttgaacctcatacatgtgccaagcactgtgrtgggcacagaggtcatagagtcttttttcctaaggaggaaggtgggagtcaggtmagcgtggccacagattctgttacagcgtggagagagtgctgtgggagtgtagtcatagggaggcctggctctgtctgtgatgttacagaaggagtcacctgaagtggcctgaaaggatgtgtgggtggctggcaggtggcgctgtgggtcaaattccaggatgagggaccagctggagcagagacacagcagcgtccaggtatatgcttactggggaaaaagcagcctgctgaggccagagtgcagggtccatggggttagtggttggaggtaaggttgaaaargratgtttcagacagtctgtctgaagggctttggatgtcatcataatgagtttgagtttgagtttgtgggcagtgcagcctctgatggtttttaaagcaagttaatgtcgtgaccaggtgtacttgtcaggaaggatgcgctgttgctgttgggaaggtttgtgagagggaagcaagattagtgacaggtggaccagctgggaaactacatcaagagtccagacttaaaacagtgtttcctacgaaggaatgagttcaggttaaagggctggagggcttgacatgggatgctagcagtcaatgagtaactttgtacttccattttcatagttttgaagttcttggtcctagatgtatttcagaattgagaattttttggattttgaaaagatgatctggtgaatttactctgtagtggaagatcagaagcagcatggcataagccaccatgtttatttctgtagcaaaatgtatgaatagccacagcaggagagagaaaagactataaatagccccatattagatcagatcagattttaccaaatgaggctggatgaggttttactgccaattgagtttagaaaacttctgtgttttagtgcttcttggatttggcagttacagttgaggaactgtggatgtttttagatcccaggcacatctgctgaatgttgagagccctagcacagcggcttggcagtgctggtggagccaatccctgtcttcatgtagcttgcagctgagggggcctgagagaagttgagcaagtggttgcgcttgttgctgttggtgaagggtaggtggaccttacatggtcccaggcgtcaaggaaggcatcttggcagagacacgaatcagagtgtgccaggtgaagaagatagggaagagcagagctggcacatgggcacatgcaaagaccccgayggtaggcttggctgttggggtaccagacgggagtgtggtagagtggagcaaagaaaatggggagaaaggagtgaaataacggccgatatttacgttgtcatgccggcactgttctaaacacctaacatggctcatctcatccgatcttcacagcaacccagtttgagtctcagaaatgtggcaaaacgtagggtgatgcctctgggctgtctggcttgcctttgttgctgctgcactctcctgatggtggcctgagcagtgcttcctggagaagcaggtcaccgctgctggccarggtctgggcttgatcatccttttgggcacagccagttgtgagagggtgtatggctcctggttcatgtgtgtgcacacagcactaacttccaggcagagctgaggatcctatcccaggaactacgtggataaacagtaggaaaatagcactggggcccaggctgagcctaaggaggtgggctggaactaggggtgtcatgtcctcttatggcaacaggagcaagtttgaagcacagggctgtggggtggagaacaagggcccagggattgattaaggtggaggccagggcttggccggggcagcttttcctgtgggctctgcagccactccatgtgtgtgcagacttgccaagtaaaaactcagtcagaagactggtttgctctgcatggcttagaagggtggggcaggaggtcctaagcatcaggtagtgggtgtgggccaccaaattctgatgtctggagaagagtaaaaaggcatctaaagggtgcagaagttatctcaagggtcccaggaggctttgccataagggcctgcaggtcattgatgagtcagggacgggctatccctctgggccccccccccctttttttttttttttttttttttggtgggggatggagtcttgcttcatcatccgggctggaaggcagtggtgccatctcagctcactgcaacctccgcctcccaggttcaagggattctcctgtctcagccttctgagtagctgggattacaggcacgcaccaccacacccggctaatttttgaatttttattttagtagagatggggtttcgccatgttggccaggctcctgacctcaggtgatccgcctgccttggcatcccaaagcgctgggattacaggcttgagccaccaagcccagtggggccccacccttctaagccatgcagagcagcacttcactgaatagagttcagtccctcttctccatccccatcctgttatataaagtctttttcttgcacagtcatttaggaggtgggaagttgggagacagggaatcctggccattagattggagggaaagttccaacatggacaacatcctgaggggagagcgaagaagaaactgaaactcttctgggcccagtggctcacacctgtaatcccagcactttgggaggctgaggagggtggatcacttgaggtcaggagttcaacaccagcctggccaacatggtgaaagcccgtctctattaaaaatacaaaaattagctgggcgtggtggcaggcacctgtaatcccagatactcgggaggctgaggcaagagagtcgcttgagcctgggaggcagaggttgcagtgagctgagatcatgccactgtactccagcctgggcaacagacagagtgagactctgtctcaaaaaaaaagaaaaaaaactgaaactcttttgtgcatcactcttttcttccacataaactttcttaaaaatcaaatatggggatatggcccacagctctgagtagcttcatccatctgtatggccccagctgggcacagcagtaaggccaactgaaacgacgtttgccctgaatttctcggtcacttgacaacatgtatctaattgatacataatatttgagccctgatataatagaatttaattgcacagttacatggaaacagacttgacgtttctgagaagactgatgtcctggcgtggtgggggtggttggtttctaggaagaagacaagtggttggtggtgaatgctggcaggggctggtgaagtctccccaggagggagacagaatccatgtctctttagaggcccttcaggatcagcccttttataccagatctgctggtttgagagcccagagcctcagaggttagatctgaggcccaaggttttggccaggattagagagtagcctgtgaggcagagggcaactggcagagctgttggtgtaagagggtgcacgcctgaagctttggggtgtaaagggtagaccagaggcaggacagtcaaggagttatggtctggagtggcagctggctgggaattggggagtgtttcagatcctttcaagtaatgtggtctggtagagcttggaggattggtgggaccatgcctttttctcactggtttgtgtcctggttccttcccagagcctggcagagagcaggtgtgtgatacacgtcgtcaggtgactgaccgaggaattcagggcaaacagatcatctcaatttgccttgctgatgtgccagctgggattacgctgatggatgaagctcttcagagctatgggcaatatctacatatttgattgtcaagaaacttcgtgtggaaatagcttcaaacttacacaaattgcaagaataaaaaatagtataaggatattcgtacacactctctttactcagattcacctgttaatattttgctccatttgctctctatgtgtgcagagtatgtttttgttctgaaccatttgagaagttgcatctatcctggtcctctacttctcaatacttcagtgtgtattacctaagaattggaattaatcagttatcactgatactttaacctactgtccatattccacctttgtcattttacccaataacgtctttttaaaaaaagttttttgaggtttcattgacatacaattgatatcaatatgtgcaaagaactgcatataaagtgtacaatttgataagttttgacatatatgtgtgtgtgtgtatatatatatatatatatatacctgtaaaagtatcaccacaatcaagataataaacatatccacccttctagaagcttcctaatgcccctgtgtagtaactaccctactgcccttctctgcctccatccccaggcaacaactgatctgctttctgtaatatagattastttctattttcggcagttttatgtcaatggaatcacagtgtatgtgctcttttttgtttttcccaaaaagacccatattgtgtaattatttggagattgtgttgtgtatgtcagtggtttattcagttttattgctgaatattattccattctatgagtaaaccacaatttgtttatctgtatttccctgttgatgggcctttgggttatttccagttttgagtgattatgaataaagttaccatcaacactsctgtgtaggtttttgtagggacatggctgaaagtagaaagaaatggggcatgcaggagagactgggcttggttataacagcctgttatccctggggaactagctcactcaccagaggacgttaggarggatctgcccctgccccccttgtgatccaaacacctaccactagaccccacctccggcagcaccaccacacaggggatcaaatcccaacatgtgtttcagagaacaaaccatattcaagctatagcatagctacgtaattattataacactattaataagaccatctttgccttgggaattttaagtagcacctttattacatattagatttttttgtgtaatgagtctgtttctggagcttaaattctatttcactggatggtctgtttatttatgtaccagtaccacgcagttgtaattatggaggttttgtagtatgccatatatatatatatataataaaaaaaaawttttttgagacagagtctcactctcttgcccaggctggagtgcartggcacaatccaatcacagctcactacagcctcagcctcccagactcaggtgatcccatctcagcctcctgagtagctgggaccacaggtgcgtgccaccatgcccagctttttttttttttttttttaattrttacttgtagagacaggrtctccstgtgctkcccaggctattcttgaactcctgggctcaagtgatcctcctgtattggcctcccaragtgctgggattgcaggtaggagctactgcatctggccagtatgcagtattttcatatctggtagggctgagtccctcctcacagcttatttttattgttttcctagtttttcatgtgaactttactgtcagttcgtctagctccataaaaaggtatttttattgggatttttgatgatgctgaaatgtcctgaccaagaacaagggatattcagatgttcttttgtgtctttcaggaatgatagttttgttcacataagttttgaatgtttaagtttatttaagtttatttctaaatattttctcatttctctggcttttgtaagtagggttttctcatccatgttttcttctcatgagttatttgtggatatgaaggctatccattagtatatgttgatttttatattacacttccttgctcagttcattattgattctttttgagttttccaggcatattctcacaagtaaagataatagaaatagtttgcttcctttccacttctgctttgaatttttttttcttggttcatttgcattggctgcttcctccagcaaaatgttaaataaccctggagatgatgggcaacttcgttttgctcctgacattcgtggggtgcctctggtgcttccctgttggtaaggggttaactgtagccctgaggtgggacatttgattttaaaaatcagtcatcttggggcgcttaggttagaggaatggtaggcagatgctgtcactccttgcccctcccctcctccttcccacctggaggggaaatgaaatctgacaggtagaaagaggggagttggggttctttttctctctccctccaccagcatcactctctgcctctccctcaaaaatacgttsctgggtcaggatatatgttgactccctagagagctctggagtcaacctcctggccttcctccaccctcactcttggccttttcctgcccccatttcctctacctgtggggcatggagccacragcctttgtgtgacggtttgctttctctctcctgtctttaggtgcatggctgcctcctaatcccatagtccagaggaggcatccctaggactgcgggcaagggagccgggcaagcccagggcagccttgaaccgtsccctggcctgccctccccrgtgggggccaggatgctgaagaagcagtctgcagggcttgtgctgtggggcgctatcctctttgtggcctggaatgccctgctgctcctcttcttctggacgcgcccagcacctggcaggccaccctcagtcagcgctctcratgrcgaccccgccagcctcacccgggaagtgattcgcctggcccaagacgccgaggtggagctggagcggcagcgtgrgctgctgcagcagatcggggatgccctgtcgagccagcgggggagggtgcccaccgcggcccctcccgcccagccgcgtgtgcctgtgacccccgcgccggcggtgattcccatcctggtcatcgcctgtgaccgcagcactgttcggcgctgcctggacaagctgctgcattatcggccctcggctgagctcttccccatcatcgttagccaggactgcgggcacgaggagacggcccaggccatcgcctcctacggcagcgcggtcacgcacatccggcagcccgacctgagcagcattgcggtgccgccggaccaccgcaagttccagggctactacaagatcgcgcgccactaccgctgggcgctgggccaggtcttccggcagtttcgcttccccgcggccgtggtggtggaggatgacctggaggtggccccggacttcttcgagtactttcrggccacctatccgctgctgaaggccgacccctccctgtggtgcgtctcggcctggaatgacaacggcaaggagcagatggtggacgccagcaggcctgagctgctctaccgcaccgactttttccctggcctgggctggctgctgttggccgagctctgggctgagctggagcccaagtggccaaaggcyttctgggacgactggatgcggcggccggagcagcggcaggggcgggcctgcatacgccctgagatctcaagaacgatgacctttggccgcaagggtgtgagccacgggcagttctttgaccagcacctcaagtttatcaagctgaaccagcagtttgtgcacttcacccagctggacctgtcttacctgcagcgggaggcctatgaccgagatttcctcgcccgcgtctacggtgctccccagctgcaggtggagaaagtgaggaccaatgaccggaaggagytgggggaggtkcgggtgcagtatacgggcagggacagcttcaaggctttcgccaaggctctgggtgtcatggatgaccttaagtcgggggttccgagagctggctaccggggtattgtcaccttccagttccggggccgccgtgtccacctggcgcccccacygacgtgggagggctatgatcctagctggaattagcacctgcctgtccttcctgggcccctccttgccacatcatgagctgaggtgggaccacagtccccaggctgcatcggcctgcctgtgtttccctcttaggtgcatttatctttttgatttttccgagtggcatttaagtgcacaaatgataacaagaggattattctcccgttctcaagggagtcagatcaggggaactattctagggtatgttgcggggtattaagcaggaaaccactgtgtggtggggggcactgggcttgttggggccagaaatgtccacgtcctgagctttctcctggagcatgtgcagagagtttggcaacgttcgctctcttgaccagaccccttctccctgacctggctcttccagccagggcacgagccctccttctatacctgctccccttcccccagtggggactgagttatgggagaaggggacatatttgtggccaaaatgatactaaccaaaggggcttccttgtcagggcctggtggagttggtgggtcatcggggctcactgcctcctgcccttctctcctgtctgacccccacttagcccttctctccttgcagcctagcagtttatagttctgagatggaaagttgaagggggcaagcaagacctctcctcagcccatgcccagctgtcaggagagaggtgcagggaggaaggccttgtgctgggacaacctctctcttgccttacctcagagagggactatgccctgacccctcctttytgaaaatcagtgccctccctgttgctctaggaggctcctgctggcttggtagaagacagaattcgatctgcctgtccctttttcccctggggtttgacacacaggctcctctcagcatgaggtggagcagtgaccaggtggagcagtgaccaggacgcctctggcccagtgctgcccagcctccccgcccgctcccaggcgccccatgtcctcacaggccaggacgccatggcaggatggagaggacttggtggatttttktttcttkcctgacctcagtttcatgaaagaaagtggaagctacagaattattttctaaaataaaggctgaattgtctgaaaaatatttatgtgtgtgtgtcctggaaaaggaggtggcaggcagggaaagaaaggaaaagggagaatgaagagttaaggagagggctagacgggtgggaggaagcaaagttgaggaaagaaagcagatgagtgggagggaagagccagggacagcccaggggatgggggccaggtgggaaaggaagtccaggccacaaggtggagaggagccccggactgtgctcctgctgatcgtcctgtagagccaggaggccgcagcaggaaagctggtgagtgtctcctgcttctgcctcctgctggctgggcaggcctggtctggggaagaaccaggtcctctgatcagggtggtccctgagtggtgctttgtgcccggtgccctctgctggcccaggcagtgcttattgagtgccctttatgacgtgccggggagcctcagggtacacagctgataccagggttggcctcacagtggcgcttggactcccaaacgcaaccccagtgagagtgcctgttttgctaatacccagaacacagacagactgttacctctgcatatcacgtgcaacattctgagagtttctgttctccactaattcatttaaaagaacaaaacgcggccgggcgcagtggcttacacatgtaatcccagcactttgggaggctgaggcggacggatcacgaagtcaggagttcgggaccatcctggccaacatggtgaaacctaaaaatactctactaaaaatacaaaaacttgctgggcatggtggcacacacctgtaatcccagctactcaggaagctgaggctggagaatcacttgaacccgggaggcagaggttgcagtaatccaagatcataccactgcactccagcctgggcgacagagcaagactctgtctcggaaaaacaaaacgctttttgtgactcacgaacttgatttcatgagtgggtttgaaaaccctgggctagtccaggcgcggtggctcacgcctgtaatcccagtactttgggaggctgaggcgggtggatcacttcaggagtttgagaccagcctggctaacatggtgaaaccccatctctactaaaaatacaaaaattagctgggtgtggtggcacatgcctgtaattccagctacttgggaggctgaggcaggagaattgcttgaacccgggacggggtggttgcagtgacctgagatcgcaccactgcactccagcctgggcggtaagagcgaaactgcgtctcaaaacaaaacaaaccaaaaaccctgggctaggcaactttcttggcagaaactactttggagctcgacaccagatggtggcagagttgtctggggagctgtgtcgagggccgtggccttgggagcagctccaacctcccatctgggctcagaaaccagtgtcagacattggttttattttaacctttgagatttgtgtggagcgggttttgccttcccctgttgcttagatggattatttagccatattttttgttaaataaggggaggtggtcattatccgtgatttcagacgtggaatcggcccggcgatagctgcattgtgccctttccggtggagccaggaggagtttggccgccacgctccatgcgcatagcatgtcatgcagctagccaagtgcattgttctgagtgctccaggataagtaccaacttacttagtgctccaggataagtaccaacttagtgctccaggataagtaccaacttacttagtgctccaggataagtaccaacttacttagtgctccaggataagtaccaacttacttagtgctccaggataagtaccaacttacttagtgctccaggataagtaccaacttacttagtgctccaggataagtaccaacttacttagtgctccaggataagtaccaacttacttgatcctcagagcaagcctaggcggtgggtactgttttgctcctgttttaccagtgaggaagcaggcacacagaggtgaagttgcccaaggtcacacagatggttgagggagagccggattggaatgaactctgtgctgttagccactgtgtgaggctggactgttccattccagcctttacggcctcttccaggccattccccagctgcacttggattctcaggccaggcaccggcggtctcctgtgagggtggagaggaagagggggctgcgtggctcggggaggtccaggagagatggcgggaggagtagagtttggggcctgcggtgccagaggacccccttacaagacgaaagactgggttctcaggctcctgaagcaaggagcaccttcaggggtctcctggtattcacccatcaaggcttgctcaggtggcatgcgtgtgtgcgtggcggctgcccccgggcccggaagcgcctgtggataccaaagcaagtggaaatgccagatggaaaagccccgtgttagtcaatgctgtagagttcagccagcctcgagtttgcaggtttacagagctgccttgcgcctggctgctgctgctgctgcattcctgcttctgcctccagctgtgaccacctcctgccactcctgctctcactgtgggttcctgctcactctgtctccaggacagactgccttccgggcagccttccctcctcaagcctcttggcctttgcaatcctcttacctgggtcactggtgggatctcatttgtggatcaagtcgcccccagtggagacaaatgtctgatggagtctggccaaggccctcctgagccttcactgggccctgcatgagaagcctgccaaggctgaggggccagggaaacggagacgaagccctcagagcaggccaagagggtgggaggtggggggcatttagagggttagatacagagcacccctttacaaataccagctactggcttttcgtattacatgttcattttagatacaacatactgcacacgctcccttaacgtgtgtttacgcgtgggtggtgtatccttccagacgtcttcctcacatctatacataatatgcatagataaaacatttaccaccaaaacccatagtgttatgtacatatttgtctggctgtgtaactttaaataacatacaaatgtatagaacagaagcttgccctctttctgaaatatctaacgtgggatttcaggctttctgatgagacctctgtagaggtcagtgttttgccaccagaggtccttcagcctccatctgttctcccacctacccacattctggcccctggcaattcacagggagtttaggaagtagacaccagggccctatttcctggagaccagcctggtggccgatgtcatagagtgcggtgggcctgggccggccctgctctgggcccgtgacctgcgtgtctgactcgggtccagctgttcttcctgccagagcctcttcctgtgaggcgggggtaacacaaccttctgtggtggctgtgggattaatccgtatggctgcattgtgagtaaagcctggtggaaatctctgtctccactgctttccttttcctgctgttcaccttggctccctcgacacttaatccccctccacatgtgtctggagcgggcagagcgggggcagttgatagaaagggggccgggtagtgccaaggctgttactttcccccactgcctcccttggctaacttgaagtctgaccctttataccagaactgtaagacagtgtgtcagaatggattcagttgcagagcaggaagcctggatcccagcgccggacggaaatgagaggtcgatggtgcaggctggtgtggggattcctccaccgtcagggcccaggctccttctcaggtctcagtctcactcttcttagcacgaggtcaggtctcattccttggctgcgggagctccagccagcacacgttttaggaagaaggaggaaggaagaaggtaaagggtggatggcagctgcctcctcctctcttggaagctcacagagcgctgggtcacaattccctgggtagaactggatcacacaggcacccctgtcagcaaaagaggctggaaaaagtatttctgaagctgaatcaaattaagattcctgttactaagaagggagtgattgtatgggcgactacagggaccacggccatacacggtgcctggaagaccaagcttgtgacagtgacgaggatttggagagggcagggtgatggggagctttggggggagtgcattaggaaccctgacctggagaggggcagaatgaaacctgcgggcccctaaccctagtgggttgtttgagaaacctgtcctactgtggcagggggctgagtcttctcagggtcatgcatgaaaactgaaattcctgaaggccacacacagccccggaagtgctgactgacaagggcacatgccagtgatgcagttttcttttttgtcttcacttttgttgttccgccgtcttcaacacatggctcccagctcacagcaaatgctgccctggttcagctaccaggaagcaggagaggggaagggagggcaagcctcattctttatggaacaaaagcagtgggcagacagccttccctcacgttccactcactggaatgtggtctggctgccttccctgcaggaggtgggatgcaccctcagtgcagcagccctgccccagccaaaaacgtctcagcacagctgtaagaagaggaagatggctagagacaggcagccttccctgcaagggcaatgaggcaagcctgccaaaagcctcctttggaaatactgtttgattacttttcagagtttctatttaggaaaagggcaaaacctttcaggatcaggagtaggtgagcggcgatcaggcctcactcttcaccgagggccttccctgaggaggggcctgcaggacgctggcagcggaatggggctgtgtggctgctagattaggtcatggcagggagacagcctcttcctggttcttgctagaacaggcacacttggggccttgagctccagggagttcatggaagacatctgactaccctgagccccttgctggagggttctggggagtggcccacggccaccgtcacccatggccaccgtcacccacaggggccgtgaggacatccctggccagcatctaacacaaccacatgggatgccctaagcaactactgcccagccgagggctgcctgaatttctgactcacaaatggtgggcaatgtgaaacgggtattttaagctgctgagttctgcgggagtttgctgagcaacagtagaaaccagaactctcggatactgtgttctgtccttgaaacggtggaagattttatgtgaccagaatggaatgtttgaacaaatattttgagaatagaattttaaaacatttactcatcagcatccaagggtggggagcagtgtcatctaggagactggttctattatttacgtagatgttcttgaattaaaggatgggaatattttttccttccaaaactttttttcaattttatattctgtttttcaagtttttattatgaaaatattcaaactcacagggaagttgaaagactaatacaaagaagaaccatactctttccactgacatgatccaacgaggaatattttgccacacggcaaatatataccgtataattttctgtaccacttgatagaaaggtaaagaatgaatattgttttttaaataacttttttcktatataagtaatatgtgcttatcgtgtaactacctaaaaacattgaaaaataaaaggaaaataaaattcatacataaccgccctgcccagattaactatctttggttcttggcttgctgagcaagcttctgacctgaacttggtcttcattgggcacggctgccctctactgacagctgggagtcctcggcctccttatgaatgaatcaagccagttggttctgaaactgcagaacagagcctgatggcctcatacctgggtttttaaaaatcaaaatctggccgggtgcggtggctctcgcctgtaatcccagcactttgggag

SEQ ID NO: 93434 - DNA, 28593 bp, Homo sapiens
tactgtcctgatttctttcttacgtgtttcactattggtgcatgtgtgtgctactcatttttgtatgttgatattgtatcttgcaactttactaaatttattatttctagtaggtttttttgtggaatctttagggtgctctctctatgtatatatgatcatgtcaccctgcaaacagaaacaatttgacttttttttcccccaatttggatgggttttattgcattctcctgtctaattgctctagctaggacttccagtaccaygatgaataaaagtggtaaaagtagccacttgttccttacaggaagagcttttaacttttccccattgattacgatgttagttgttggtttgtcatatatggcctttcttgtgctgtgttccttctgtactccttttgagttgttatcatgaaggaatgttgaattttatttttttcagcatctgctgaaatgattatatggtttttattcttgattcgctgaatgtgatgtatgacatttatttatttgtgttgaatcattctcatattcctctggtgaatccccaagtattttgttaggattttttgcatctgtgttcatcagcgatatttgcctgtggttttctttctgtgttgtgtcctagtctagtttttgtagcaggctaatgctgacctcatagaacaagtttggaagtactccttcctcttcattttttggggaatattttgaattaaattagtattacctttttaaaaaatgtttggtagaattcagcaataaaaccataatttttctgtttttctttgatgggagatttttattactgctttaattacattgctcattattagtctgttcaggttttttattattctagcttgtgaaattgctgcgttcccagaaatttattcatttctcctagatttttcaatttgtttgtatataggtgtttttagtaatctcttacgatcctttgtgtttctgtgttatcaattgtaatgtctcctttttcatctatgattttactgcagttttctttctttttttcctagtctcgttatagcttgtcaattttttttttcaaaaaccgcagctttgttcctttgtttttttgtatttttttgtttctatttttaaaatttcttctctaatcttcatgatttatttctttctactaattttagcatttgatttttcttggttttctcatgacttgaagtgtactgtcaggttggctatttgagatctttctacttttctgattaggcatttatagctatgcacttcacctcttacaactgcttttgccgcatcccacagattttatgttgtgtttctaatcttatttgtttcaatgaatttttaatttcccttattcatttcaatgaattttttttttttttttttttttgaaacagagtctcgctctgtggcccaggctggagtgcagtggcgcgacctccgctcactgcaagctccgcctcccgggttcaagccattctcctgcctcagcctcctgagtagctgggactgcaggtgccagccaccactcccggctaattttttgtatttttagtagagacggggtttcaccatgttagccaggatggtctcaatctcctgaccgtgtgatccgcccgcctcggcctcatttcaatgaatttttaattttttcatttattggtggtttgtgagcatgttttaattttcatatatttgtacagtttttaaagttcctgctgttactgattgctagtagtattccactgtgatcagaaaagatacttgatatgatttcagtttttaaaaatgtgccgttacttgcttttcggcctaacacatagcctatcctggaggataatccatgtgctactgagtagaatgtgcattgtgcagtcgtggagtcgtgcaaagctgtgtacatttctgttcggtccatttggtatagagtacagcttaactgatgattttttgttgtctggatgatctgcccattgacgatagtggagtgttgattatagtggagtgtggaggtactctactattattactaatttttttttaagatggaatttttctcttgttgcccaggctggagtgcaatggcgcaatctcagctcactgtaacctccgcctcccaggttcaagggattctcgtgcctcagcctcccgagtaactgggattacaggcatgtgccacctcaccctgctaattttttgtatttttagtagacactgggtttctccatgttggtcaggctggtctggaactcccgacctcaggtgatccaccggcctcgacctcccaaaatgctgggattacaggcgtgagctaccgcgcccggcgggaatcttaaaaagtttaataaatggaagcagggtagaattgtgcttaccagggacagggaggtgggagaaaaggggacctgttggcccaagagtacaaagttgcagttatgtgattatagttaataatactgtatactggaaatttgtgaagagagtgtatttcaggtgctgtcatctaactatgtgagaagatgagttcattagtttgactgtagtaattatttaactgtgtatatgtatgtatatatacaaatacatatagattttcatatatatgaatcaaaacaggctgtccacttaaatatattcaattttattttaaacattaaaatatgaaacaaagaaaaaaaagcatgcatagtctcacactcaattaccgacatatataagtgcactgctaatcagaacagtgaattaaatgtcagttatatttgtttgtttatattgtaacctttccttttattttcatttattttctatttataattatgcaaatatttaaagagttcacaatgaaactatgtattaaataccctccacatattttagaagtgatgaatgttgctagttttacgtcatagtcactgtaagaatgttcccttgggaagtgttatcttctgttggtttgtattttaataacattcaccactaccaagagagagcctgggtttttctaatctttacccaccataaataatgttatgatgaatgcctctgagcatatatcactatgggcaattaagcatacttctgacagcttctcagatttggaattgccgatccaaaaatcaatgaacatgttaaaatatgacaattacttttcaccctcaaatatgctggtaaaaatcgcgttttcattaattttatgtaatagtaccagtatcaattttcccacacgtcacactacaattaaatactataaattttattaattcctatctatattacaggcaataaaatcatctcattgctctttcaacttgaagtttctgattactgtaattccaaatgtaccgtgacatatttattatacggtttatattatattttgtgaactctattttcagtctcctttactacaaaagggagtatgtgtggaaacaaaattggtgttatacaagagtatcttttccttgtctaagatctgtttgaaataggcaagaaaaaaaatgacatattcattcaaacagtacaatatctgtgtccgtttcacagtagcaatacaatgtaaatagaatcacactcatatctcccatgacaaaactaatgccttatttacaacattcattttgcattgaaaaatcattttttattttttcagctacgtatggtcaatttctctttgtatgttgcatagcttccaattgcatgtagaagtcttttatttttcagtcgttttgggatacaggtgttttttgcttacacgagtaagttctgtagtggtgatttctgaaattttggtgcacccgtacctgagtggtgtacattgcacccaatatgtactcttttattcctcaccccctcctacctttctctccgagtccccaaagtccattatatcattcttaaatgcatttgcatcctcatagcttagcttccacttacaagtgagaacatatgatacttggttttccactcctgagttacttagaataatggcctctggctgcctccaggttgctgcaaaggccattatttcatcccattttatggctgagtagtataccactgtgtatatataccatattttcttcatccattcgttggctgatgggcatttagttgatgggtatggttgatgggcttcctatttttgcaattgcgaattgtgctactatgaaaacatgcatatgcatctgtcttccatgtaatgacctcttttcctctgggtagatacccagtagtgtgattgttggatcgaatggtagttctactttgagttctttgagaaatctaggagtcattttaatatagataattgaattgcagttaattctccatccagttttccacactggttacttactaccaccgatttgaggccatttttcatttatattactcgatcattttattcagtcacatttctaacagtatatgctgtttccaaagcatatcatgtgaacagtttaaaattctcaaagtataattctttgttgaagcatttgtaagttttacacaagcccttatatgatctgttttgatttttaaatcatcatctcttctattttacttatatttacttttcttcttgtgagatgtaatctcatacaaactttatagataggaagatgttgggaaactatcacatggtctgttatgttgtgttattttaataggccaaattatttgatgaaaagagaaatcttgatagttttttaattatgtgggacacggcattattttatcagaaaactgtatgttgaaaatattgcattgttgtgtatagatagagtggcatggattcaattttgtatgcataaattaaatttgtaatgtttaagcagtggattagaattttaacatgctttcacttcatttggtcctgttaggtaagcaagggatcttgtgtgttggaaaaagaattactttggtgcagccgcccaagaggagcttggggaggacgctggcccgcgaggctcgtcgcagacaaggtggcggcgatgtccgcgagccaggccagtgccgcggcggcagcgtcggggcctttcgcgcggcagggcggcctgggcttcggcctcccgccggttccctggaagcgggcccgcggctagcgcgggagcagcagcagagatggaggctccagcgcctctctctcttccccgtccgcctgagccaggggaggccaggcggcccgggtgtctggagccgggggtctgctgtccgagaatgagaattttcttcccccagaacgtggagactgttcgatcaccaggagcacaaagttatcattgttgggctggataatgcagggaaaactaccattctttaccagttttctatgaatgaggttgtacatacatctcctataataggaagtaatgtagaagagatagtgattaataatacgcgtttcctaatgtgggatattggtggccaagaatcttttcgttcttcctggaacacttactatactaacacagagttgataatagttgtggacagtacagacacatgatttctgtaactagagaagaactctataaaacgttagcgcatgaggacctaaggaaagctggattgctgagttttgttaataaacgagacgttaaagaatgcctgactgtagcggaaatctcccagtttttgaagctaccttctattaaagataacagttagtggcatatccaggcatgctgtgctctaactggcaagggattgtgccaaagacttgaatggacgatgtcacgactttagattacatgatctcttctaacctcatagactttgtataaatgaagtgctggactttacctgaaagctgcaaaaattaatggtttagatatatttataataaactgatttaaactttttctataagaagaaaaattaagaccacttatttgaaaagaaagatggagagggaggaggaagaagagaaaacggccgggcggcggcggctgtaggttgtgcagcggtagcggctctcccccgcggcggacgatggacagccaggacaggaaggtggtggtgtacaacaacagcaccgggcttgtgaagtgtggttatatgcaggctctaactttccagaagacatcttcccagctttggttggaagacctattatcagatcaaccaccaaagtgggaaacattgaacaaggatcttatggttggtgatgaggcaggtgaattacgatcaatgttggaagttaattaccctatggaaaatggcatagtaagaaattaggatgacgtgaaamacctgtgggactacacgtttggaccagagaaacttaatatagataccagaaattgtaaaatcttactcacagaacctcctatgaacccaaccaaaaacacagagaagactgtagaggtaatgtttgaaacttagcagttttccggtgtatatgtagccatccagacggttctgactttgtacgctcaaggtttattgactggtgtagcggtagactctggagatagtgtgagtcatatttgcccagtatatgaaggcttttctctccctcatcttaccaggagactggatattgctgagagggatrtaactagataccaggttgcttctattgcgaggatatgccttcaaccaccctgctgattttgaaacggtttgcatgattaaagaaaaactgttacgtgggatataatattgagcaagagcagaaactggccttagaaaccaaagtattagttgaatcttatacattcccagatggacatatcatcaaagttggaggggagagatttgaagcaccagaarttttatttcagcctcacttgatcartgttgaaggagttggtgttgctgaattgcttttgaacacaattcaggcagctgacattgatacctgatctgaatcctacaaacacattgtgctttctggagggtctactatgtatcctggcctgtcatcaaggttggaacgagaacttaaacagctttacttagaacgagttttaaagggtgatgtggaaaaactttttaaatttaagatccgcatygaagacctacccctcagaaagcacatgggtggtgcagttctagcagataccatgaaagacaaagacaacttttggatgacccgacaagagtaccaagaaaggggtgtccgtgtgctagagaaacttggtgtgactgttcgataaactccaaagcttkttcccatcacacccgtaatgctttcttttttcctttattgccaatcttttgaactcattcaacgcctggacatggaagaggcctctgtgtgccttttgactggaaaggtcaagttttattctggtgtcttgaggaagctttgttaaatttttgttaatgtgggtaaatctgaatttagttcaactgcttccctacatagacaagcgggctaagggtcctgtctgctgctttgtttcttctaagtaggcatttagatcattcctgtaggcttcctattttcactttgctgctctaatgccgctagttgtagtctttagcacgctaggtggtatgcctttattagcataatgaaaagactttaacaggagcttttacgtattactgggatggggggtggttcgggatgggtgggcagctgctgaacccttcagggcatttcctctgtagtatggcactttcatctgtagctttaagtaccttaaagcgtctcctgtgaacatcttagggaaatgttaggttcagaactaaagtgttttgggtggtttttgttggggtggtggtgggggtaacagtgggcggtcttctgatttttatttttgaggttttctcactggagtacgtagaggaactttatttacagtactttgatttggcaggttttcttctacttgtgctctgcctggagctgttttcatatgatataaaaagcacaagtgtagtattccattactatggggcttagggatttatttgttttttaaaatcaactatgttagctgggactagactccctacaatctrtcaatggaaaagtaacatttaaaamcccttttggtaattcaaattacagatttaaaagtgcttaagatctggtgttttgttaatgcttctgtttattccagaagcattaaggtaacccattgccaagtatcattcttgcaaattattcttttatataactgaccagtgcttaataaaacaagcaggtacttacaaataattactagcagtaggttataattggtttaaaaataacattggaataccatacttgttgctaattgggtaattttcattagtttttttgtttgtttgttttgatttgaaaactggaagtagagtaacatttgactgtattaaaatgttgaccaaaaaatcaagatttaaaatttttatttgtactaaaaaactaatcataactgttaattctcagccatctttgaagtttgaaagaagagtctttggtattttctaaatgttagcggactttcctgccagtgtcagaaaatcctatttatgaaycctgtcggtattccttggtatctgaaaaaaatatcaaatagtacccatagatgatttatttctaagttygaaaaataaaaagaaattgtatcacactaattacaaaatacaggttctggaaaaaatatttttcttcattttaaaacttttgttaactaataatggctttgaaagaagaggcttaatttgggggtgactaaaatcaaagaaattattgacttgagggtctctgttttgtaggaatacataattagcttaaataaacagcaaaaggttagttttaattatgtagcttctgttaatattgtgttttttgtctgtcttacctcaatttgaacagataagtttgcctgcatgttggacatgcctcagaacacatgaatagcctgtactagatcttgggaatgtggattttagagtcactttgcaataagttcttacataaatacctccaaccttttgaaaatggagcttgttaaaggacgcctatgtaaggccagtgcctactggcagttgggttcggggaaatgggattgacttggcctttggtcctttgatcataattttaaaatatgggagtagaaaacaacaaagaatggaatggactcttaaaacaatgaaagagcatttatcatttgtctcttgaatgtagaatttgttgttttaataattctgctggtaaatgtgacrgttaaaatggtgtattatgtatacatattgtaatttagaaattccattttataatgttactattccaaggtgaaataatgcatttaaatttgatatttgggtggagtattacatttaactggagttgttgtcaagtatgaatccctcaggaaaaaaaaaatctgttttaaaaagcaatctgattcttagctcttgaaactattgttacttaaatttccagtaattaaaaattataaatttttaaattagacttgccaatactttgatctttgagaagggtttcttagaaatacatttagtaatgtccccaagaattagtcttacattgaaacttttttctttaaaacatggtattggttgttcacttttacacagttctgagtactgttaatatctggaaagtatcttgagatagtggaaagctaaacagtctaaatttaacatgaaatacttctttttgattcagaaaataaaatcagattttttcaaagtcaaagaaaaagaaaacaaagatgaagtctcaccttccaatttgctttctcattagttttatccaaagtaagttattaaagctgtgattgacatttttctcttaatgaatcctctcaggacattgtgtagcctgtggtaagtacaaagggagaggaagacattttgaattttaagaattytattatcagcataactctcccgagttgaatgttgttttcttcttgttccattaagtcaaaatacaaatcagcagagatactcagttttcaatattttaaaatgtgatgttacttatgaaaagtatattagttaaggttgtgcgtgtattttgtatgtacctcaagttcaagttaatggcattgatttatgttctaaagaaaaacaaataacaaatattaataatatccttcattataaccataatgagataagaattggcattggtgttcagtgccattttatattttctccctatgttctctgtattgtactaactttcatgcgcgtccgtgtgaagagaccaccaaacaggctttgtgtgagcaacatggctgtttatttcacctgggtgcagacgggctgagtccgaaaagagagtcagccaagggmgataagtttggggccgttttataggatttgggtaggtaaaggaaaattacagtcaaagggggtttgttctctggcgggtaggagtgggggtygcaaggtgctcrgtgggggtgctttttgagccaggatgagccaggaaaaggactttcacaaggtaatgtcatcagttaaggcaagggccggccatttgcacttcttttgtggtggaatgtcatcagttaaggtggggcagggcatagtcacttcttttgtgattcttcagttacttcaggccttctgggcgtatacgtgcaagtcacaggggatgcgatggcttggcttgggctcagaggcctgacactaaccaacctcccaaatcattgagctgtttgttaaaaagaaaaaaaaggaaaaggaaaaagcatgacattgtgtatcgatttttttgttgttgaccaaaatcacacacatggaaacatgtaattcaacagagtgggatagcgatcagattcttggcttagtattactaaygggcaggattttacaacgagcaactatcagattattcctttcagtgattcttatggyatctaaattactgaataaattattaatcagtgaatcaaattgattaaaattattaaatgaatgctcagcattagttgaaaactgttgtgtgaaacatgtctacccagaaaagtaacattctataaatactattaaacaacttagctatattatttttaggtattaagttatatgtcaagcagttaaagtgaatttcagagtaaaagtaaggcatgtttctgagcaacattgataattccttaatttgcaaatttcttctttcttacttggatgcttggaatatagtgtgagattttttatttctaaattttgttgtatcttctattacataactgcattgtttgacaattataaaatgcaagtgttttttgaatgattttaagaatttggcttaaaaactgattgatacaatgtattatttgtactaagaagtaacttgacccaaaacaccctttatgtttgcttagggtatttttcttcaatgcctgaaagttaaaggtattcctgtcacaactgtaaacaaacttaccctaaatgtgttaaaacatattcttgggtactctatttgtgtatctttcgtgccttgaaaatctgaaggttaatccaaactcacatgttttagcgtatttgagaaaaaaaaaactacttttaatatcagccttttaaatttcatgaagattttggtgaggaataatagtatatactttattgacaaaacttggaaagtttctttctataaaatgggaaatactcaatatctaaaaccaggtcagtcatgggagatcagtatttatttaacgttggatgttttgtgttttatatttataatgttcaaaaatgcaagcataacatttaatctttgtccacatggttttacaaaagtaaatcttaaattaccwcgcttttctcatatgttctcatactttctcaaatcactataaagaattacttgttatctattaaaaatccccttcactcaagtctgtattatggtttcaccaaatattctgtgatgtagcccagaaaatccacaccttttgtactttttaatttgaataatcatgtgcttagtcccttggattgctgccacatcagtttaacatgaagcacattcccatgtcatcaaggtgttggctcagatttattcttaattggatggttaaagcatacactaccttgttacagttggtttagtgtagtggattattgacatgacaccatgagaacatgtggaattttataccacatttataaaacatgattttgttttctacccttcaaggtaaacatgaaaagtaaggtggtatctgtgtacttgtacataaatccaaaattatagttgggaaaaaaatttatatatgaaaatgtcaaaaaaattactttgttgcaagaaagaaggttaattgattattaggacttttgataagttagcaaatcggatactgttttcaaatcttagattcagtattgggctaacaatagttctgttttaaggtttctatgaggactaaatgagagaacttactaaaaatgcattcaatatgtgtttattatgtcattatctcgttactccctttttagggtttatgaatcaagtctcatagaagtttaaatcacttgtcaaatgtaacctatttcagaatcaccaaggacttaacgctttttattctaaaaactgttttgtaaaatgtggaataaatgaccagtgccattattcagtccaatttgtttattttacatcaaagaaatctgagtcacagaaggcttactgtatcagcccatggccaggccattaggttttgagtaggacggaaattgtgatgatacatactttcatattttgagatgtattgatattgtgagtacaaaaatgatgatttgataacagcatagagtgtggtaatccagcaaaatacattatattttgaaatgtgaagaatattactgattttgagtttgtgttttgttttaatctatgagaaatattgcatctcacatttgacatgtttaaaaatgtacrcatatctsgctgggtgcrgtgrctcaggcctgtaatcccagcactttgggaggctgaggcgggcagatcacgaggtcaggagatcgagaccatcctgactaacatggtgaaaccccgtctctactaaaartacaaaaaaaacaaattagcttggtgtcctccatgcaaagcctgtggtgggtcttgctctgggactagttgagcagcattgcactcgtgttggatgcgggagtttcatggtttgttctttcggtrtgtctttggccttctattaagagttccttgacttgagaatgattgagaagtgtacttttcagtttcccaagtacatatttttgggggagaggactgtgttgcatttggccagagaatatgtgacctttcggttgttgagggactggtgtgtacccctgrgggctcggtatccacttggaggttgggtgtccgtgtggaacctgatgtacctgtggacctggttgcccacatgggtcctggtgtccacctggagcctgatgtttcccaggggcctgggtatccactggggtcccgatgttcatctaggagctggtgttcacctaggccctgatagtcacctgggggctgggtatgtacctgaggyctcatgtccacctgtgctgtaggtatctatgcatgggctgtgtgccaacctggtgcctcatgtcctcctatggattagatacccaactagggtttggtgtttacctggaacctgatatccaatggggcccaaattctccacctggggactggtgtctggatggagtcttacagctaccctggggtgtggtgtcctcttgaggtgtggctgtgaacatggggcctaaagtctacttagagttcagtgtctacctggagcctaatgtgacctggggccctatgtcaacctggggcttggtatttaggtcgggttcgggcgaccacccagggattgatctcasctggggcctgatgttttcttagcgcctggtgttcacctgaggcctgggtgtcaacttrggactggatagccaactgaggcctgagtgtttcttggtgactgaggacttcctgggacccatatttcctggacccggattttcacatggagcctgatgtctkgagttctgagttctaggtgtttacttgggacccagatgtgcaccttggcagagcctccgtaacaaaggcctagggccaccaggaggctgtgaaaaagaagcagggcgtctctttycccrgacacttgwgagtttgtcagagccttcagcgacagagcaggtgccctggacataggaacccaggcacctgggcactgacatcacctcaagggccacttgtgccccaggctatagagtctcctgagccaccagggggtgcgcggagtggggagggcatttgttcacgtgcagcggcctcttgccactgccatctgtctccacagctaagttgcgggacctgtgggaaggagggggagggcaaaggtcattgtcacaccacctgggccgcaggtgacaggcaagytcccactgaggctgcatggaagtccccacaaccctggtggagggtaggttccaaggtgcagccccagccctacccctagcctggggtgaacacctgggcctgggaggggcagcagtttatggcgctgctgtgtcccaaggtctcaggaagcctggggctccttgtaggtggagaaatcaaaacgatatgcttgagttttcagaatagcccagggcttgccccaagttctcgaataaaggtagttaccccgttccaagacagagctaatcagggctgagaggaatggaggcgggaaggcaccagcacgcagaggcccccaaatccccagcaaggcccccttactcaggcctctgccccagagccagggtctcccagccacctccgatgtaagcgcaggctcctgacccagcgcaggctcctgccctcgccctgcagtcccaccccgtcctccaggccggccctcctgcaccattcttgcccctgacatttcttttccaagcaacaaccagaaatattcctttaaagtgaaagcagatcttaccatctcatcttgtttcacgccacctcaccctgggttcccatcatttcccagtaatgcccaaagtcctgggcccctggcttgggcacctcgagaccagtgagtgtaggatgctggctgccctcggctaggctggccatgctctgctcagccaagcccctgtccttcctgcaggtgccagtccgtccctgcctggccagcacccccgtgcccacgggcccctccctccctctggggtgcctgactcccctccccaaccagctttgcagccctgccagagccactactaacaccctcctcctcctcttcctcctccttcccattcctcctcctcctcccccacccctttctcctcctccacccccttctctccctcctccccctcttccccctccccccggcttcctggcatttggtttcagtgccgtgtcatttagagtagcaagagttgctgcagctgttaagtctactgtgataaagtcaccatggtctccctggtcctgggagcagctctgtgggtcattcctgacttcatattcaaagcctgattaagtcagtgaccatggagagagctcggcttcatggccaacaacatccagagcctccttggggcttcccagaggtgctcagaccctcaggggcagctctttgaagcctgactcacaggaaagggcagggtcccctcaggtcccgggaaggggaaaggcagagcagtggtcagtgagccgcatcccagaggcctccgcatcaaggggcctcagctgccctctttccacctggcggctcaaggagcaagccctgggccaggagcccctgccaggaggccttccctcccacccactcctgggcagccccacatgggccagggactccacacgtgctgccagggcccctgaggcccagggataggagctggcaggcagatatgctctggccaccttgtgctgacacagagatgtgacrgaggaggttgggatgtcattgtgtgactagggaacaggcgggcagcacgtgaccccctgcctgggacagggagctcctgggcctctggcttgggcatatgaagagcagtcatgaagtcagccccaggaccttcatgccgaggctcggctacagccaggcaaaagccatccccaagggggacccactctctatgctaaggcaggggcagcagccagggccctgcccagggcagaaaccctcatggcaaggaacagcaggcagtggggaccgggcctcctccaggctcccacctcctccrttctcgggagcactgctgggactggcttcgccatgcactcagacgcctccgtcctccctgggcctctcacggttaggccagcaccactccccatggccttcatttggggtggtggcctcagcgtctctccccagagtagagcccatggcccttgtgacaggaaggtaagttaggaaggcagatctctaagcagttccctgcactagagtctgcgtgactggtcactcccagccaggcaggccattctgcagcrtggacatcagaccggggcttgcaagcccagctctatcctcctggctcaggcccctctgaaggcacagagcagcagagctgggtgggtgtcttcattacacaaccctgtgaggacaggagggaaccctgcttacttcccagagctggagcagggcccctgcagacagcagccgccagcagttaagagaggtgcagcctttgcagggcaagggactcaggctcctaaggacacaggtgcccaagaccactttgggaaaggaatttttttcataccagaggcacctgagaggaaagccccattgtgaaaccaagtccccacccaaaccccttctgaggacacacaggccattggttrttcaactggcagctcaggaaaggctgcagccaagggcccaggtggctgtgaggcccacagggcccgctgggaacacgggggtgctgggsctggagcaccccaccttcaaaacagccaatcgcaaggcaggggctgggctcccctggccattcctccccgggcagctggcatgctgagacaaggcatgaacatttctttcctggagctggaggcctcatgtgactgcctttccttccccttcctcatgtgactgccttttccttcccccagccacctggggaggggcagagcaaacaccaaggcctggcaagctccacagaaggactgtcccaagcatcacgtgggtcaggcccagctgctgtcagggtgcaggggacccaaatacatagggagacatagggagatcccatctttacaaaaaaacttgaaaattagccagatatagtggtgcatgcctgtagtcccagctacttaggaggctgagatgggaggatcacttgagcccggaaggttgaggctgcagtgaaccatggcaccactgcactccagcctgggcaacagagcaaaaccctacttaaaaaaaatgtttgaaggaaatcaagcactgagcacagaggggttagtcactttgtcactttcccagggtcacacagcttctaggtaggatctgagcccaggccatcaagcacctgtcccttctctcagtcactgagctcagctgtcctcctgaattgtcttctctcattggagtaacgtcctgacacaatcagcctgttgtgtattttaagtgctcaccacactgcagacccctccatcctaagcccaactttgactcagttgctcccctaggcagctggtgaatcgaagtgtggcctgggaagattgttaacacttgttcatggtctcctgccatcaacatgtcaagagtggtctctattttgattcctttcctttcctttttcctttcccctttcctttttccgttcctttttcctttcctttcctctctccctccttccctgcctccctccctccttccttccctccctccctttttcccctccctccctctttccctcctttctctctctcaatctttctttttctcttttctctctctctctctttttttttttgagtttcactttttttacccaggytggaatgcaatggcatgatttcagctcactgcaacctctgcctcctgggttccagcaattctcctgcctcagcctcctgagtagctgggattacaggtgccccgccaccacacctggctaatttttgtatttttagtagagatgaggtttcaccatatttgccaggctggtcttgaactcctgacctcaggtgatccacctgcctgagcctcctaaagtgctgggattacaggcatgagccaccatgccagtccttgaatatattttcttaagattatggttcaaagatacaacaagatcatgaaggtttaaatacgggatatgccagaaaagtgatctagggtcaaggaaatctcctgcccattcccagaggcatcccagtcggcacctggacagacagcaggtttagccccgacgtcaccccctgacattggagatgtcagtggggcctgcctattagcattatgttctgaagcttactctaagcagatccatattaagcctgaagaaaaatgactggcacttcataagtgctataaaagtgttcaaatgtgaagcatctgcaggattaaggcagacacatagcagtggttgcctccagagaggaaacytggttggctacmagacgcggaaggtggaaggtctctttgcagcctttatatgagcaggatgccttatagttcctcaaggggatctgctgtcatctcctgtgaccttcacatgagcccyvhkgggyssswsgagcagagctgtgacccacattttacaattgaaaactgaaatttagaggggctgagtgactttcccaaagccacaacactgaggagggatgggctggagctagcaatgtagttggttccctggagctggagatccctgaagcagaggccctctaggtctcaccctgggcccctgaaccagggcttccctcactccatttcccaaatcctcttgttccaggattgctttgggaagagctgatgtcctgtgggaggtgcctgacccagccttccgccactgcattttaatccctgacccaaaatatgatgcagctgatcccaaacaaaggccccttgaaggatcagggtgtccagtctgtgtcactcctcccccagcaccgtcacacagtgagctgcctcaaggtgaggtgtccagtgctccagcgaccaccctgaataattagtgactgcttgactcccaactgcctcagagctcacgacaagtggaggaactggtttctttcttaaagacagatgtggctgcaagccagccacaaccttaagacagcatcacaaaacattagtttcaccaaaactcacaaactgttatgagcagggcaggygaattaactagggaggatgcctgctgggctgatgctcggggggtttggtgagtgaagcccacaagctcccagggtctcatggactgaagagctaagcagctgtccgagcagcctgggctcaggcctggctgagaaggggcagtgactgctccagcacagagcctgcaccttcctgctcacatccttccttaccaagaatcagtctctacaaactcctcctccctcccctagacttctgaaaagacaggggcagagtccatctcctcttacacggtatgtcgatagctgcagcctggagacccccagcccaggatccttcctgaggaccacccagggcctccttccctctgtcaccaaatgtgcattccactaacccaatggcactgttctttctactcagaatcaggtgctcacattagacaatataaacaggccatatctacagaatgttagaggtgaaaccctcatggcctcctctacgtatggtggcatcctcccagattctgactagaatgacgcagcccagcaacaaktataaaccagacggatttagggttctgaaaggccttttcacccaaaaaacatgggggaaaatatgtggactctggctggggagagattaaaggagccctggggctcatrcttcttataattcccaccagaaggctgacatccagggacttccgctgcaagaggcaaatagtcagtaagttctgtaaatggagatttaggtcccttgcaaaggggacagtttatttcaagagaggagacatgggttgaatgctggtatgttttaactctgcagtrcaaacagttgcaacaagtgtggtgaactaatcacccaacagccctttgctgccttgtcattgtgccttaagtgtaagtgaatatattcaatgccactgcgtgcacactttggttaaaaggttcaaattacaaatattgtgttatgtatattttcccacaatggaaaacacgcacagccaagcccagatgccagtcttgctagcagccttcctttagcttcaagagtaggccgaggctcatctgatcgctccaggtatcttggtagtttakgatcgaagtcgtctgccttggaagagaaattaatggaaagaggagaaaacttgagaatccacactactcactccacagggccaagaactctccctcccgtgcgttgctgatccatctcagtatttcctgtgaccaccttctttttcagctgaagactttgcaccttaaggggttcccaggcttttcaccttggctcttgtcaggactgatcctctcagctactgtccatttcacctccattcatgtccgtgccacatcaggctgtgttgtccagatggaatgaatccaccccaaatgtccctttctggaggaagccaccattatgctctacctccaacacatccacacacaccgaggcacctcgctcacacaaggtgtgtgtcctccaacaaagtttcacactgtaaacccagataacttttgaaacccaagttctgttgatcccctacttcaggtgctccacagatgctcatttgtctacaaaacactgccccagacaactaaatagtccaacgtgaccagcagaatttttatgctaattctgatattgtgttgagagtacaagtgtttttccccttaaaatttctgactttgttactgacaaaagtatgtaactaatgctttttttagctatgctgccaagcacatttacataaaaatatacttttagattgttttgacaatttgacaaagatgataggaacaatgataatcttatttgttttatggtaatctttacatgttactttcatcatttcttacatgttggggcctaccatacgttgtacagtgaaattagtgctatgcatcatggttggaatataaattggcaaaggaaatttagaaaatagttctcttatttcttaaaaaaaattagaccaggtggctgggcgcggtggctcacacctgtaatcccagcactttgggaggctgaggcgggcggatcacgaggtcaggagatcgagaccatcctggctaacacggtgaaacccccatctctactaaaaatacaaaaaattagccaggcacagtggcgggcgcctgtagtcccagctactcgggaggctgaggcaggagaatggcgtgaacccaggaggcggagcttgcagtgagccaagatcgygccactgcactccggcctgggcaatgagcaagactccgtctcaaaaaaaaaaaaaaaaaaattagacttggaacagtggctcacacctataatcccagcactttgggaggcagaggtgggtraatcacccgaacctaggaatttgagattagcctggccaacacagcaaaaccctgtctctactgaaaatacaaaaattatccgggtgtggtggtgtgtgcctgttgtcccagctactcggaaggttgaggcacgagaattgcttaaacctaggaggcggaggttccagtgagccgagattgtgccactgcactccagactgggtctcaaaaataaaaataataataatgaccaaatgtcattatgcattacatgactgtgtatgaatgctcaaagctacattactcatcacagaaaaaaataattaactgtccattaactgataaatgaataaacactctctgtatgaataaacacagcagactatgaaggaaaacacatgaccggcatgtgctaaagtgttgattaacttcaaacatagtatgctaaatgaaggaagtcagattccaaatatatatatgtgttcatttctattaaagaaggaggaaatttatggagatggaatatcatagcagtgttgcttagggctagagatgggaggggggattaactgccagtgggcaagagagaacttgcacacagtatcaatctaataaagcatcaaattgtatacttttccagtgggtgaactttatgatgagttcacacccaataaagggcatatctcttgcaccctgccctctgcgggtggacgccagttcccagaggctatcagtgactgaaggtccttgtgatttccacgtggtagcttctgtgaagagcccggtgggcagaggccctggctgagtcaacaaggctgacaaggctcatggctgtgttctggatgcaggcccagcagatgtttgagggggaggtggcgagcctggaggccctccagagcacgggcctggtgcaggcgccgaggcccatgaaggtcatcgatttgccgagaggtgtggccgcctttgtgatggagcatttgaagatgaggagcttgagcaggtgagcatgtgtgagagacccataggcacacatgtgtacaggcagagagagactcagaggagacagagtgacacagagagagacagagatagggatgggcagagggagacagagaaatggagtaggctctggctgagccatccacacaactgcccagttatcagaggcaggaccaagagttccaccctgccattcttaatggagattaaaagttactgctttctgatatatgacttttttttaagattagtttgctataatgaggctgcataaagtaactatatattatatatatatatttttaaaacacagtcttactctgttgcccaggctagagtgcagtggtgcaatctcggctcactgcaacctctgtctccagggttcaagtgattctcccacctcagccccctgggtagctgggactacgggtgcccgccaccacaactggctaatttttgtatttttagtagagatggggtttcatcatgttggccaggctagtctcaaactcctgacttcaggtgatccacccacctcagcctctcaaagtgctgggattacaggcatgagccaccgtgcccggcctgctttgtactttatagtacattaatgccagtgcactttgggcagaatgaagctgatctatgaattatctggagtccttatatttttttattttttcttttcttttctttttttttgagatagagtatcacgctgttgcccaggctggagtgcagtggcatgatctcagctcactgcaacctccacctcctgggttcaagcaactctcctgcgtcagcctcccaagtagctgggactacaggcacccaccaccacgcccagctaatttttgtatttttggtagagacgggggtttcaccatgttagccaggctgttctcgaactcctgacctcgtgatccacctgcatcggcctcccaaagtgttgggattacgggcatgagccactgcacccagcctctacatttttctctagttattaaagtcatacatagtcattgtatgaaatgtggaaaatacaaactcgtgtgaatacataaagccaccttaattccatcagcaaagaataatcactgtgaacattctgacacatgattgccatcccagtgttttgttttgttttgtttgtttgtttttgagatggagtctcactctcttgcccacgctggagtgcaatggcgtgatcttggctcactgcaagctccgcctcctgggttcacgccattctcctgcctcagcctcccgagtagctgggactacaggcacctgccaccacgcctggctaattttttgtatttttagtagagacagggtttcaccgtgttagccaggatggtctggatcttctgacctcatgatccgcccacctcggcctcccaaagtgctgggattgcaggcatgagccaccaagcccagctggcaattgaaaaattcttagccccaggagaaagaagtacaggtgctgaggacaggccctctcccagacagtttgtttataagctgaggctgccattcatgtttgacactgtcttgtccggaaacggtatgtatcacattacgtatattgccagattttcatacatgaaccaatttgaaatgaaataaaacaacaaagcatcatgtctattttggacaaaaacaggcaatctttccttactgtgactcttcctccagcagcctctcagggaggccaggaggacagagtgtctggctggcagtgtattggcagtgttgcttatggatgactcggggccctagcttgagatggacgcagcactggcgtgcacaggtgtggtaggtttgccgcatgggctcagctgctgctgggccatcctcctgggtgggagaggcttggaaaagaggagcaggactgggatgaggttcagagtcctcagctgtggagctagaggccacctaaaccaacaggaaatgggccaggcatggtggctcaagcctgtaatcccagcactttgggagaccgaggcgggcagatcacgaggtcaggagatcgagaccatcctggctaacacggtgaaaccccgtctctactaaaaatacaaaaaattagccgggcgtggtggcgggtgcctgtagtcccaggtactagggaggctgaggcaggagaatggtgtgaacccgggaggcgaagcttgcagtgagctgagatcgcgccactgcactccagcctgggcgacagagcgagactccacctcaaaaaaaaaaaaatcgacaggaaatgctcagtctcccctgtgcccaactctacactgtgatgcaacaagagcgtccctcacctctcccgccacgttgaacttgccgctgaattgccactatctccctgacctctccctagaccacctcagcctccagggacctacatatgccgccggtgcatttctcctttgtcacataaggttttgtgattgacgaaaagcaatcttactttgggagcctgggtctatacaaaatattgtattatatttattcactaagcctatttcttaaagataatcagttacagatattttgaaaatacaacgtcaggtcacttaaaaatacccgctgtttcccatgtggtaggtctgctcgcaggcttgcatttctatcccacgtctgtgctccttggtcagaggcgctcctgctcacacaggcaggaagggcggctcctcatagagggaggtgtgggccgggagctgatgctctaactctgctgcaccagggagcttcaacgaggctgacaggcctcactgaccaccaggggtcctgctggttctaattcatcagtgtccatgggtagctcacagaatttgagtatttctgaggattttttcctggctttattgaggcataattgaaaaattttaaaatgtgtatatataaagtgtacaatgtgaagttttgatatatgcaaactatgaaatgaccaccatcaagctaatgaacgtatccatcgcttcacattgttgccatttgtgtgtgtggtgaggatattcgaggtgcactttctcatagatctcgagcgtgcaattaatcactatgaactacggtcaccatgctgcgtgtcaggtctccagaacgtactcatcgcatcactgaaactttgtgccctttcaccgtcttccccatctttttcattctccgacaccacccttctactctgtttccatgacttggacattttaggctaatggctgggcaaaaatctgtggtatgtacacagagagatgacatcagctatgtgagcacgggggccgccttttaaccatgagtggtgtcttggaactccgtatgcccaggtacttccaggcatatacatgggggtgggtcacccctgcactgcgaccagtgagcctgccgctgagtgatgaatgccacccagtagtcttgagcttccacatgccccgccccccaccactcaccctgcagctctctcacagagaagctcaggagcctgggtcattctctgtacctcattttccgaggcgtggggctggaaagcccgtgggcaaggctgtggtgagccatgaatgcgtcaatgtgtggaaagcccacagcggcggtggggttcccttggagaatgtagatgaggcacctgtgctgtgtaggtgggacacatcccctgaggagacacactcccacacacattcacagtcacaccacacgacacccacgcagaccccccagagccccatgcacaaaaacccacccacctagagggacatggctgctccagggactgtacgatgaggccacggttctttacctgcaaaaaccgctccttccaccacccctgcctggtggccagcaggaagctggagtcagatctccagactgaagccagcaggaaagccccgcctttcttttcatctggatttttcagcagcaagtcagtgattgcagaatacagactcctttcctgaggccacctacaattacaggagagaagagaccatgaagaccaagtcacgtacgtggtgtttctcaggccttttgttccccctgtgaacacagaatcccagatggaaagcagtggtcaaaggctccagaagccagcacagacgacaccttgtgggaggtgcaggctctccctggcagacgcgtctctctagttcactgtggctgccaatcacaaaactcttaatccagagagaacttgctgctgagcaaaacttcccctttcacacagcttgaagcctgatgttgcccctcctgactgtcctctctaaccagtgtcttctgcaagagtcggccagagtcagtgcaggctgctagaacaatactggctgggcgtggtggctcctggctcttatcccagcacttcgggaggctgaggcaggtggatcacctgaggtcaggtgtttgagaccagcctggtgaacatggtgaaaccccgacccttctaaaaatacaaaaattaagccaggcatggtggctggcgcctgtaatcccagcattttgggaggctgaggcgggcagatcgcttgagcccaggagttggagaccagcctgggcaacacggcaaaacccatctctagttttttttaaaaaaggaaaaaaaatcaaagaggagaaaacacttcctaactcattatataaggccctccttaccctgatgccaaaagagacaaagactctacaagaacataaaactacagtatcctttatcaatattaatgcaaaaatcaacgaaatactagcaaaccttataccataatgaatggattatataccaggagcacatggaattttttctcagagtggaaggatcgttcaacataggaaaatcagtcaaagtaatacaccacattaatagaatgaaggagagaaaagcacatggtagagaaaaagctttgacaaaattcaactcatttttgataaaaacaaggaatggccgaaaactcccttaacataagacatagatgagaaacccacagctaacaccatactcaatgctgaaaaactcaaagcttttcccctaaggctatgaactagacaatgatatcggctttcatgaccttaataaattattgtggtaagaaaacccatgagacataccctcttaactactttttgttttcgtgggggtattttttgttttttgttttttgttttgttttttgttttgagacagaatctcactttgttgcccagactggagtgcagtggtgcgatatcagttcaccacaacctctgccttcgggttcaagcaattctcctgcctcagcctcccgagtagctgggattgcaagcgccagccaccatgcctggctaattgttgtatttttagtagagacagggtttcaccatgttggccaggctggtctgaaactcctgacctcaggtaatccgcccacctcggcctcccaaagtgttgggattacaggagtgagccaccgtgcccagcctactttttttttttaagtgtagagaatagtactgttaattacaggtacgttggtatacagcagatctctggcacttaattcatcttgcttaactgaaacttcatgcctgcttattagatattttccctttcccccagtccctcgcaaccaccaatccactcattgattctatgtatttgatcatctcagatacctaatataattggaattatgcagtatttgtccttctgtaactggcttacttcacctagggtaatgtcctcaaggttcatccacattgtcgcatattgcagaatttcttgattttaaaaggctgagtagtattctgttggatgtgtataccatgttgtctttatctatgcatccactgagaacattaggttttttctgtatcttaactattgtgaatagaacttatgaacatggaagtgcaggtatctgagatgctgatttcaattttggataaatacccagaaatagaattgctagatcattttgtagttctatttttaactttttaaagaagctccatactgttttacatagcagctgcaccattttgcatcctcaccag

SEQ ID NO: 93435 - DNA, 14096 bp, Homo sapiens
cattttcgtttttccaggactgattttccatctggcctaaccagagtctgaagttgctgaatcaaacagagccaataggtcggacttgagctgactggagcatgcacagagctgggaagcacaagtatgttccttttgtaaagggctatcaaccagatgcctcctcctccctcctcccagcctgcctcagatcatggccctgaaagagaagacatcctgtttttccaactcaagagacaccactgcagggggagcagtagcaggcttggggacgttttccactcaagaagctggctatgggaagaggtgggatgacagtattaaatgcaaggacattgtcagacagacctggttcctatgccagattcccaggttggtggggggcgggtgggaagggtcagggaaggccagggttttctactcatctctagcaaccccagagaaaacgtggaagagcagtgcaaagtttccacacactcgagaagagttcaagagtagcagagcactgataaacccaggtatccggcagaagtgaaaaagtacattataagagaaagccgcaagaccaggtgaggtaatgaacattgctggagtgctagtaaccagaggtgggatacatctcaggagaggcaggctttgccagaataccatgtaggctaccccacacaggtgccatctaaaggagatggaagacaatagagaaaatccagaattaactgaattttaacatgaaaagattgagaaaacagagaagttttctataaataattaacattgcatgttataatgttaagtaaattaagttacattatacaaaataatattatcaattttgcacactcaagtttgtggcttaagaaaattcaaacctgcttatcaatgtaccattctctattgttcctacagcttaccctgtatttcatgcaatacaaaggaagatggctgtttggggttgccgtgtctcttagcaattaaggagatggctacagccaagcagtgtgaagtgacagcaccagaaagttttctacaccagaggttagaaaatattttctttaaagagccaagtaatgaatattttaggctttgccaactatacagtctctgttgcaattcttcaactctgcccttatagcacaatacataaatgaatgggccaggctatgttcccattaaattttatttatggaaactgaaatatgaattttatattatttttctgtttcaccaaatattattattcttttgattcctttaaagtaatataaaaatgtaaaaactattcttagctcataggccatgcaaacacaggaggtaggctggatttgactaccggaagtagtttactagcccttgtttttggctggtcactgatctccacaccatggaaggaattaatgtattcaggctcatggccctgggtaaaaaggtccacctgcttaggaaagtgctcaggagataaaatcctcctgggaatcacataatctttttttttttttttagcatctttttcttttcctttgtcctgtggcttttcacgtggtttcaagacaagtgtcaaactttacatttgacttagaaaagccacaactcatattcagactccttctgcagtggcagaagactgctgggctctaagccccaggaagacggggactgtgtgtctttttccttgctactatattgctggggtctaatgtagcatctgacagagtaaggcactaaataaatgtttgttgattgaatgactaagtgattaaaaagtccctttaaagcactttttttttggtgttttttgttttttgtttttgagatggagtctcgctctcttgcccaggctggagtgcagtggcacgatcttggctcattagaacctctgcctccgaggttcaagtgattctcctgcctcagcctaccgagtagctggtattacaggcgcctgccaccacatctggctaatttttgtattttttagtagagacggggttttcccatgttggccaggctggtcttgaactcctgacctcaggtgatctgcccgcctcagcctctcaaagtgcagggattacaggcgtgagccaccgtgcccagcccaagcacttttaaaaactgttttgttactccatcttacatgtgttacacaactctcactttaaaaatgtctgtaacagtgatttagaattcagaagactcatcacgcataaatagatttccttcaaaagctggacaaaaattttatgtcagtgtgaaactgcaaaatcattgttagctatgtttaaaagaaaacctgtttgcaccaagaagtgaaagaaaagtaactgcaaatatcagagactggtcttagtaaggaagcagccacctgggcctctctcctgacattaatgttgtgcctgccatttggcctatggaggtggtttctaccattatgcccatgatatgaaaaagctacctgggtaacaaaagactgggaaacttaccagagacccacgacatgggaggagctgatgctgaaaatccttctgctctgttctaagctggcagcttctctccccattaagccacacaacatctaggcagaacagagcaaactcggagaaaaccacacagattttggctgtatggattcagcattttatctgaacaatcatcttagctctccttttaaagttttcttttctttttaaaatctcaagtgaatttgcaaagggaggtatgagaatgtgggggaattggggatgaaaactrgtgtgtggtaccaagaagaggcaaaagaaaaagatcaaagattagctttcctaaactgggtggcaccttggcactgaatcctgggaacagatgctggctgatttgaattaaaaaagagcaaaagtaaccaaagataagaaataattggctaaaaaatacaaaaccatacttctgactagggacaataaaatgttccaagcagatgttagaataactgacttttaaaaaccaagctcaaagaaaatagggaaagagactcattgctaaatatttttccctcaattgtgaattaagacatggtcagaggagaagagaccctttccagaatctcagcaggataaatcaaccttgtggaggcctttgtgttcctggagaatgatgtcagaacccaccccaggaagaagaaagaaatgtttgcactaaaggtcacttgagaactataaagaaaaatgctatttgtgatgacctagaaatccttccaggaagaagaggagtcaactcactgttttggaatcagtggggaaaaaaacaacaaaacttttctggtgaaaaacattccgagggtcatttagacattctaagaaagtcaatgaaactttgagagaaaagaatcccggagtaggattatgggaaaattatgtttttcttaactgtttaaagcatgttgtgcatttacatatgtgttggtcatacaaagataattggaaaggtttctggcagtaagcagaaggcagggactgacggcctctctaccctatttaytgttgaccctgagaatccttggggtaatcagatatgcgtggctcacagagatatccaggggtttagaagaaagaacactagcctgtgaatcagaagacctggcgtcacatttcagctctatggccttctaacaggagaactgctgcatgccatttaacctttcaaagctttagtctccttatcagttaagtgaagataatgtgtgttccttgtgggaatattgttaaatgcagtccctatacagaatagacacatagtcggagctcagtagtagtagacttgaatctgttgcctgcctcagaattaacttactagctatctatattgagcactcgctatgtgtaagtctgttattcacaccgtcttggttttcccaacagccctatgactaggggcaattgttatcccctttatacagataaagtcactgaggctggagaggttaagaaacttgctagtggtaagtggtcaagtcaggcagcctggctccaagcccctgctsttatctgaccaaatatgaggggaagatttactgaacttataccaccttcttcctctttgtttctgttatgacccagggaacaagatgaagaggttttcctctctcagaagcataaaaagctactgacctcatcccaataacaaaagttaaaaagaatgactttaaatacaaaagatacggtaataatgacgctttatggtccaggcagtattctaggtgcttttttatataggctaattaattaatttaacaaccttcttaggtaggtgctaccatctccaccatgttatgcggggactcaagcaaatgtgcagagcccttggagctccaaagactgctttcaaccatcgtactatacaggctgtccaacactgggctctcagaggcaagccaacaggcaattatggatgctgccttggctaggtatcaggggtggaaggcatatggtcagcaatgtagtctcagggcaaactgtgaattgaagttaaaagaaaagtgatatttattgacagcttayaatttaagtgagtaggaatattttaagttaataatgccctaactggggatccaagtccttggacttcaccraagaaaataacaggggttcaggagctatttttaatatttcaaaatgcctrttagtatgtcactaatcatataaaatatagtctttgtgtatggtaacagagtcttaaaggagaaaacttttagggaaaaattcatagacttgagcaaattttcaagtattcctaattctggaaacaagcgaatttctctcctgtcagagttgaaataatccttatgcatgtcaaatttaccctaatagagaagatactcattatcaaagcaaatgcaacaagactcaaagacttcaggaaagaagttgccggcagacattaaaggcaattttagccatttacttagaattgccagtcactgtaggagcagaagaggcatttttctgccaactggttgaagcttgtgccagaatgatcctgctgtttcttaattgtcctaaaagctcgtagccrgcaatttccctgccaagcctgacctcactttcatgttttttgtaatatgcagatcacgaagtgtcccattcagagtgggaaaacaagaaattacttcctcatccttactcttggagctcatcacataatctgtatgatgtctctgtaaaataatacatcaatggccatctcaaagccttctgtgccattttttagtaccactgtccttgcctatgtttgaacatatgattaatcctcatggcaaacttgtaagagaggggacaacagtgttgttcccatttatgagtgataaaccaacagaattatgactgatggacatacgaatctatgtgtggtgtattaagttgaaagctgcataatgaaatttagagcatgctttctttttttatataaaagaaaaggcatgtaactgtgtatgtctgtgcatgcatatgcaggtgtgtacagaggtgagatataaaagctcagaaaagattttgtgatatacaatctagttacttcctaaggtggtaatgttacctcctaacagttacctcctaaaatgggagtaagtgaaagaagctaccgagaatgttcacttttatatctatgcacctctgtattgttttaatgttttgcaataagcatatattgtttttataatgtcaaaaagaatttttaaaaagagaaaaggtataaagttagtgatagatgttctccacaatcaacagccctatctagtttattccattggatccagattttcagagcaattttaaatagacattagaaaaaccttcctcaactctggaagaaaatatttgcttggtattcgagtcttggggaagcaaccttctacttaatgctttttggaggcccttgctcctagatggaatggagactcagttgggatgaccagaggcttccgtcaaccagctccttgggttcatggagttctttgaggagcaaaatcaatatgtaaaaaatgggaatgcagagccgtactgtggcaccgcggtctaggcacttcttggacagcatgtctcacctgctgatgaaactcctgagcaaggaaatggagaagcagaacctcaaattgtggcagtggaacctaaagttgcagggggmctcaaatmtgaccctaccagaaactcaaaatggagatgtgtctgaagaaacaatgggaggtagaaaggttaaaaaatcaaaacattctataaatgtggccttatcagaasctcaaaatggagacgtgtctcaagaaacagtggaaaatgtaaaagttaaaaaatctccccagaaatccaccatattaaccaatggagatgcagaaatgcagtctcccaagtcagaatcaaaaaagaaaaagaagaagaaaaagagaaaaatggcgaatgaygctgggcctgataaaaaaaaagcaaaaactgaaaacaaaggagaatctgaagaataaagtgccgagacttctaaagaaacagaaaataatgtggagaagctagataatgatgaagatgacagtgaggtgcccagcctgctcctgggactgacaggagcttttgaggatacttcatttgcttctctatgtaatcttgtcaatgaaaacactctgaaggaaataaaagaaatgggctttaccaacatggctgaaattcagcataaaactatcagaccacttctggaaggcagggatcttctagcagctgtaaaaacaggcagtggtaaaaccttggctgttctcatccctgcwattgaactcgttgttaagttaaagttcatgcccaggaatggaacaggggtccttattctctcacctactagacaactagccrtgcaaacttttggtgttcttaaagagctaatgactcaccatgtgcacacctatgggttgataataggtggcagtaacagatmygctgaagcacagaaacttgctaatgggatcaacatcattgtggtcacaccaggccgtctgctggaccatacgcagaataccccagggtttatgtataaaaacctgcagggtctggctattgatgaagctgattgtatcttggacrttgggtttgaagataaattaaagcaaattattaaacttttgccaacacrcaggcagactatgctcttttctgccacctaaactcgaaaagttgaggacctggcaaggatttctccgaaaaaggagccattgtatgttggtgttgatgaagataaagctaatgcaactgtggatggtcttgagcagggacactttgtttgtccctctgaaaagagataccttctgctctttacattccttaagaagaaccaaaagaagaagctcatggtcttcttttcagcttgtatgtctgtgaaatacccctacgggttgctgaagtacattgatttgctgtcttggccattcatggaaagcaaaagcaaaataagcatacaaccacattcttctagtactgcaacgcagattcaggaacactattgtgtaaggatgtggcagcaagaggactggacattcctgaagtcaactggattgttcagtatgaccctccagatgaccctaaggaatgtattcattgtgtgaggagaacagccagaggcctaaatgggggaaggcatgccttgctcattttgcacccagaagaactgggtttccttcactacttgaaacaatccaaggttccattaagtgaatttgacttttcctgatctaaaatttctgacattcagtctcagcttgagaaactgattgaaaagaactattttcttcataagtcagcacaggaaacatataagtcatacatacgagcttatgattcctattctctgaaacagatctttaacattaataacttaaatttgcctcacattgctctgtcatttggcttcaagttgcctccctttgttgatctgaacatgaacagcaatgaaggcaagcagaaaaagcaaggaggatttggctaccagaaaaccaagaaagttgagaagtccataatctttaaacacattagcaaaaagtcatctgcagcaggcagttccctcactcaagagatgcctgtctttatcttgaataactttgtcctgacatgaaattttcccccttgatctaacaggatttttgtagcctttagaatttggactggtctaacaagagtataaactgacttgggttgcaagcactgagcactgttacttctatcaagtctcttttatttttgggatataaaacaggctttaattttcttggttgcccaagggcagagcaaggaatgtctgctctttcttgtgatgatataatattttaaatttttaaatatccctccttcatacacacaaatgtacgttattgttttaatataattctttttgtacctttccttcttggtttgtgaagatttttgtggcatgggttgctttgcttactgctgtaaaaggtgacctagtgtgctgggaagctggtggtaatgcagaaaagagtctcaggttattttttgtttttagttatttcttggaccttgggagtacctaatgactcctcctgaaaatgctgtagtataaaagagcaaagagctttggaaaatacctaagaagcaccttaggattggggtggcattgcttttacagattcttgattttttttttttttttttttttgagacggagtctcgctctgtcgcccaggccggactgcggactgcagtggcgcaatctcggctcactgcaagctccgcttcccgggttcacgccattctcctgcctcagcctccccagtagctgggactacaggcgcccgccaccgcgcccggctaattttttgtatttttagtagagacggggtttcaccttgttagccaggatggtctcgatctcctgacctcatgatccacccgcctcggcctcccaaagtgctgggattacaggcgtgagccaccgcgcccggcccagattcttgattttaaagcaatgagcctttctcaggtgttttgttttttagagcaaaaactatggtttgtaatttgaataaagtgtcactagcagtcataacatttgatgagtgtggggtaggaagagggtggaattgagatgtttgaggctcgtttacatcaatagaggtataatatactgcatttcttcattcagtaacacagcaaagactttaaaaacacacatacaaagaatggtgccgctcctcattcagatttctttaattcaaggtggtttggattttggtaagccttttcgctctgtacagtacttagaagacaagggcaactgccctggacttagagccaagccatcagacagtgcccaacacatattaatgtttgcttctttctgagaaaaattacctcttccagtccctgaaacaaaaaatacatttgttgtgaagattgaaaatgaacagtcagaaaaaaacagcgaagtcagatggtttttttgttgtaggagcatttgatttctagtgtgttttgtataatgtgtaactacaaaataatagattttgtagcaattcaaaacaaaagttgctagcatcatttttctgttgtgccagttaatcatagcatcccattaaatgtaagtgtgctaatatctaatgtagaggaaactgtttggtaaagaatattccagtaggaaaagaaaagaacaatcttcgatttctgggcttggccattatcaccctggtcacacttgtcctgggcttccaaccttgactgctgggctcctggtttggcttcttggattcctaattcctcatgtttagtaactctctccaggatcatgttttccttttttttttttgtttcagaagtaatgttttttaaaagacaaaagcgaagggaagaatatttaattactgagcagaagtaaatactgttggtattttgtacctaatctaatttttatatgcatgttcatgctttttaatttttttatcaaaaatggagtcatctacctactacttgtaaccagcttgtttcataacatattattttcctgtgtcatttaataataacctcaaaaaaaaaaccaaaaatgagaatgcagtcttagttatttatttagatttttgtacaagttttttataaggttccataataaaggcaatttggggatgaatagtctacatagcaaactccttccatccaactaggaatgtgacctaggaatggtggtatagtagaaacagcaaaaatttgaattttgatagacttttattcacatcctaactgctatttaagagaggtttggcctcagacaatctacttagtgtctctgaaactctgctccctcagctataaaatagaataatagagacatgaaaggttatatgtaaagggcatcacataatacctggctcatggaaggtggtcaaaaattcctaggctaataaaaaggtgtaaatgatttttaatctatattgacatttgtagtgaacaaataagaaaacttagaattgtggaagattgtcaggagatagtgatgattctgtccatggtatagtcactccatcatattgtctatcaggccaggtcattccatcatactgcacaaaaactacttgagatgtatatcttactgaggaagagccaatagtgtcaactctgcatatgaaacacccaacatgcaaaaactagaaagtgatccatttgtagatttagttgtaattgggccgtgtttgcaattggaggtgtctagctctggcatcttctcagacattctgcatcaaacagagatgacaaaatctattaaatttcttagaaacatttctctgatgactagacttggccgtggagagtgaaaaccaaccaaaggaaaatttcttggtacttgctgaataacaggcacacactggtgactgaggagttccaatgtggcaaatccaaagaagacacttgagaagaactaaaccaaactgtatttgtaggaagataggttttaggttctccaacatacccctggaaagacacctggatgtctgtctttcattcacctcatatttgtaagcaagacaccacattaggccctataggaggtttaaagactcatagtccaaaaactcatagtctcataaaattacagaagacaatgactcactaggtcatctaagattcaaatgcactgattgtaatgatcattaaatagcttccctggaaagtgttccctgtaatgcttctaccattagctgatatcaaatgctacgttttcacatggaagagccctaagtcttgcaataaaccatcaaaaagatacaaaagaggaccatgaagaccctctttgagaccatggtcttggtactgaagttcttgctctataatttttcatctccctgtctactggttgaccaccagcagcactactttcaggtcattgatgaagagaagtgactttacaagagtgtgaggagtactgggacatgtttaaagaatgcctgtcttataggatgagggcagtttttagagtccagccccttcctttttctgtctggctttctaaatctgaatttttcttcttaatcccacttgctgctgtatctcttcaaatactgacgacttcccctcggctgtccttgtcctgaagcaataagactctctgatctgcccttcagaattcccactccccagatcctaggaaaatgggaaccttgggtactatgaggagttgctaattggatgatgatactcccttgtcaacacaccccaaaattttcccatagactagcttctcacagacatcatcttccataccttctgctgtttttcatgattctctctttcccaaatggctgctagcaaccaaagcctgcactccatctcaaagctgttgcccagccagtgtgaaactccaacacaaattacgctttattcatttagactgttaattggtggattgtgttctcatgatgcctccatggccacgattgagtcagttcacttctccgagctccaggtgactagatgaggaaaactccatccttgacaaagccatgttcattgggcactcacatgcaaacacatgtacatacatgtaatttcagaatgagttatgaaggtagtttgcatttccagcttcattgtttactagaatgtataatcgtgggcaagttagttctctgagtctcagtttcttcacctgtgaagtggagaagatgatacccatttctatgttctatgagtagagaatgaaattatatgggagaagaacttagaagggcccaggctcagagaaaggatgattcacaaatattaatggtgaataaacatctaaaagtattttagcatcactaataatcaaagaggaagaaggagcaggaatgtagggcaggcaatatcaacaaaattgtaaacaaccaaaatggcccacaataggcagctggttatatctgaatacagtggaatatcttggaaatttcaggttacaaaacacagggaaagatttagtaaatgtttgtttccatcattgcttttctctcattcataggatcttgcaagtgtcgcatgctctccaaaggccccagcccaccctgccccccaccacccttattttcttccttcttttctatcatattaactaaatgattcttcaattttcctctatttttctccatttgcagtgaaagtgatagagggctgcaaagagaatggatttgcgccctttaaatgtgccacttcccactaactaaggaattatagcagttgtacttatacttctttagccttggtagccagtaaaaacaatatgattaaactgtagagctgaccctgaatttcactgagaccagtctaaccatttaaatcataactttatgaacaactttttattgccatcacatcatattcttgtgaggaaaagccaacagcaatattagatgacttcctgaaaatattttctcaaacattttttctgtgaaaattatactataggaaaaatttgtgtataattttaatatctcttttattttttcttataatttattttgatttggctttcctgtttcatgtttattctagaaaattggaaattacagaaaaatatttggaagaattaaaattattcatagttatacttccaaaaataaatattgttgatatttggagagtattctttttaaatgcttttattttgaaagctaagaacatatttgcatatatagtttgtgacctgatttcttgatattttatgatgccaatacaatttttttattaacagaaatttccaagatattccatagtatccagatttaaccaattgcctgttgggggccattttggttgttttcaactttattgcttttgcctgccctacattgcttctccttcttcctctttgataattagcgatgctaaaatacttttctgtgtttattcaccattaacatgtgtgaatcatcagttctgagcattttaagtatctcttttatttatttttataatgatggtggtggccataatcactgtcttcattgtggcacttgggaccaggaattatcaaggccaggttagctcagagacccagatgaagaaaagaattgcagacaggaacagatttgctctcattcccagcattgaccttcccgaaactggcattccctggcaccaggtggttttgaaaagagttgtttttgatgccacagaaatctattggaaagtggacttccaagcacacccagtcctggtgtgtattctgcagctggatgagaagctgagcaagtcatgggtcttctgaagacagctttaagttcagctagaggaatgaaatcctaggaaatagtgaaataaaacacaaaacatattttaaaatttataaacagaaattgttcctcaagggaggaattaattttcttctaaattattccttttttgcctggattgttaccttaaggcccaggtcaactctctacatggaaatcttcagaggacagagaatagaaaataaacactcatgctccaaatttgggcttgtacaccaaccaggaccttttcacggccaccttcctgccaggctcactgataaccaggtttcacaagtcagggaaggcaagtctaacgtggaggacaattagagatgttggttctttctccaaggat

SEQ ID NO: 93436 - DNA, 13080 bp, Homo sapiens
gcactgactgtcctaagtctaatagaatctgtgtcctcagaaagcaggttctatatagtcctgagagggatcactctctaaatgactgattaaatggatgacaaattctctaacatgggattcaaagaccaagattttggtaacatacttggaagtgctgtctgagggagatggttctgtgttccttgctcttgataggcttgtccccatcggggacagatctcaatgtcaccacacccaagagcatctgagtggactccacctcgtgctgtgggtctggttcaatgaaccattctaggattccattttaggattaccttcagcatttctatgaatattttccacatagtgagaaactggctaatattgcaagtgatctcctggggaggggtgacatgtctgagcttcaacttagaaaactggaatgttaaggaaatatatttgccaatctagtctgtgtatttttatttctcttcctgtcaaggatccctaattgtccaggacggtgattctagcggcagcatcagtatcactagggagcttgttagaaacgcaagttctcaggccctatcccagacctaatggatcagaaactgtggtggggccctgtggctcatgcctgtaatcctagcactttggaaggctgaggagggaggggatccctcgaagctgggagtttgagatcagcctgggtgacaaagtgagatggcatctctacaaaaacttaagaaaaatctccaaaaaattaaaaaaaaaagttggctggatgtggtggcacatgcctgtagtcccagctaatcaggaggctaaggtaggaggatcacttgagcacaggaggtcaaggctgcagtgagttatgatcgagccagccctggatgttttaacaagccctccaaatgatttgatttaagttagtttgagaaccattaatttaaagctatagttttcttgccacatgtatcttcacccccataaggcatattcagtatatttttaagttaaagggtcatcctgtttaatgctgtatattatgaggagatataccatgagaggacagcgtatgcaggaattgttacttctaggctgtaaataaatgtgatattacatttcttgctggtttctaagtcagtaaaatttggtaagaaaaatagttttgaaaaaaatctaaaaaaatagaagcaatggaggctgttttttgggttttgagtctccttagcccacctcacacaaacctcactgctgagtcccactcctgggtttcctggaattccaccctggaagcggccatggctgcgagcagccaatctgtccatgctctacttgctagctctggtggccactccctcttcccatctgcttacagcctctgctcctcatctctccacttcctgtcctgattcctatctctgagtggcattctctaaactgtactcaatttcacttttagtcatcgtgggcagtttcctgctgcagggccttacccattcctaatctcttaagtctgtcctcaactccacagatattcaaactttgttctccttccaaggcacagattctgtaactccgctcttgaaatttgatatgtcatgacaggttcagccagtagcagcagcagcagcagcaggggaaatgtctggcaccatccatcactaaacacttgggaacacagatggcaggtgcaaacaatggccgatatccctgcttgctgaccagccacccctcaagcccaccctgggggactgacctttgccccagaaactcttagtgttcttgagtttcttgagctgctgatggaaagtgctgcctccccagccctcctgccagcaagccttcttgccctttgggacagggattaggtaggatgggtggggtagggatgggatattagtggatctgaaaacggatgccatggcttttccagctctttcgtgacaggcatcaacaatgtgtgcggcattttagagtttacaaaccaccttcaggtagcatcatttacaaagcctgtcagccactctaagcgggtagccaggagttaccatcatcactgttttacagatgagacagtggagaaccggaaggttgccgtctttccccgagggggctcaaacaataaaagcaaagttgggcttgtatccaggtttatgtcaacttgacctttagtttaccaactccaccttgctaagtggataaaatctcacactaatgaattccaaagggcctctcaacggctttgttcagtgaagatttgacatagtaaatgcatttatggcaatcacatttgtattcagtttacgaatagcagtcaaatccatgactttaggtaatctctacaatgaccttatgtagaagcgtttttattcttgttttacacatgagaaaactcacactcaggaaggatgaataacttgctcaagattacacagctactgagtatcacagatgagtgtcaattttcctcacaatagaacctctatccactatgtacagctcccctctgctatgaattctaaactgaaaaaaaagggagatgaacatagtgaggcaggtttcccaaacctttctgtttagaaacatagatgcttgggtttctcccgtatccttccacaaagtctcccacgctctaggagtggtagcaggtaacccaagtgatgcttctgattggctgaggctgggagcttctgattggctgaggctgggaaacgctgctataggggaaagctgcacgcagaacactgcaatttagtttcctccaaacaactcaagtttttcatatggagtgcttcctttggatgggttttttgggtaggcctttggggaggaaatcatcgggaggactgtgaccattagatcttttcaggcctgtaatcccagcactttgggaggtggaggtaggaggactgcttgagcccaggaatttgagaccagcctgggcaacagggcaagaccctgtctctacaaataataatcataaaaatagccggatgtggtggtgcccgtctgtgatcccagctactcaggaggttgaggtggggggatcatttgagcccaggagtttgaggctgcagtgagctgggttcatgccactgcactctagcctggatgacgaagaaagactctgtctcaaaaatttatttttaactttatttttagagatgaggtctcgctctctcacccaggctagactggaactcctgggctcaagtgatgctcctaccttggtcttccagttagctggggctacaggtgtgctaccrctcctgaatccttttctttattctttatgcacaatttcttattcatcagatgtttggcttccctgtatagcaacatgactctactgaaatttcatctggtgaaacactgaccttgttaagataatgttagattcaaattgcrtcctctaagggctagccacatctttcatcttgcaaattccatgtagtaccacgagttacaactgttctgaaaacagacatcacttgttaaattggttattaaatttttttgtcaaggattctcattgtcagaagactctagaatcttcaaccagcatcagcatcatctgagagcttgttagaaaggaagcagctcaggtgctgcttcaggtgtcctgaatgacaaactgcatttaacaagatccccaggtgattcacatgcacctttaacatttgggaagcagtgttttagaacaccttttcatttggttacatacagttacaacttgctatctctcaagggaggttcttaaaatttgttttaatttgaaattcagggggttacatgtgcaggttataaggatatattgcatgatgcgaggtttgggctttcgatcccatcacccataacgtgaacataatgccgaataggaagtttttcagtccttctccgacttcctccctccctctcccacttttggagttcctagtgtctattgttcccatctttatgtccctgtgtacccaatctttagctcccacttatcggtgagaacatgcatatttggttttctgttcttgtgttaattcacttaggataggccgggtgcagtggctcacgcctataattccagcactttgggaggcagaggcaggcagatctcttgagatcaggagttcaagaccaggctgcccgacatggtgaaaacccgtctctactaaaaatacaaaaattagccaggtgtgttggcgggtgcctgtaatcccagctacttgggaggctgaggcaggagaatcgtttgaacctgggaggcagaggttgcagtgagctgagatcgtgccattgcactccagcctgggcaataagagtgaaactctgtctcaaaaaacaaacaaaaaaattcacataggataatggcctccagttattatggttgtgtagtattcacagccaccatcgacaaccactcttccgccttcaatgctggggctgtgaatggtttatggtttgtagtattccatggtgtatatgtaacacattttctttatccaattcactgttgatggtcacctagattgagtccatatcttgctattgtgactagtgctgcgaaaaacaaatgagtacaggtgtctttttggtagagcaatttattttcttttgggcatatacccagcaatgggattgctgagtaaaatggtaattctacttttagttctttgagaaatctccaaactgctttctacaggggctgagctaatttacattcccacctacagtgcaaaagcattcccagagaggtactttacatttgttttatgtggtcctcacaacaacacttcagggaaagtattattatccccaatccccaaagaggaaactggttttgagagatttaatcactcgaccaattagtagttaatggctgaaatggaattaaaactagatctgtctactccttaaaacatttgccttaatacgttttctttcttttgtttctcaagcctctttattaagtcagtttccaacccccggcaatgtctccaggtctctttgaaggtggcatggtaaaaaagcaaacaataaataagaaacaaaattttatatcaaagtattgtgaataaaaattgtaatttgtttgtgggaatgtaaattggtacaactattatggaaaacagtatggaggttcctaaagtagttaaaaatagaactactgtatgattcagcaacccctctactgggtatgtatccaagggatatgaaatcagtatggtgaagagatatctgcactcccgtgttcattgcagtactattcacaatagccaagatatggaatcaacttaagtgcccatcaatggattaatggataaagaaaatgtaacatatrtaaacaatggaataccattagccttaaaaaaaaaaggaaatcctgttttttttttttttttctgtgacaactggatgaacctggaggacattatgttaagtgaaataaaccaggcatagaaagacaaatgttacattttctcacttacagtggagtgtaaaaaaggtgacttaatagaagcagagagtaaaatggtagaggcaaaggaaggcggattgaggagatgttggtcatatgacacaaaattttagttaggaggaatgaattcaagagatctaagtgcatcatgatgaaaaaagtgtattaaaattaaaaatctgaaacaaatatattttttgtgtatgcatttgtaacacatatgacaaaaatgctaacaaccctaatatataaagagtgtttatacaccaataaaagcactttcatagaaaagataaaagaccgattaacatgaagagcctcactagcaatcaaaaatataaaggagagatatctttttcgttccctaaattggcaaagatttaaaagaaaagataaaacccaatgtaggtgagaatgagggcaatagatccccaaattttctattattaaaaatggtgttttagaagaatacttaatgaaaaggaaagatgcttgccatatattagtaagaaaggcatgtagaaaatgtatacaattactctctgctcctcccgtaagacagacagctgcatcttgtcatgcagcaccagctgtatccctgagacaccayggtgaaggtgaagaccaaagtaaatggatttggccatgttgggtgtctggtcaccagggctgcttttaactttggcaaagtggatactgtcaccatcaatgaccccttcgttgacttcaactacatgatccacatggtccagtatgattccacccatggcaagttccatggcaccattaaagctgagaataggaagcttgtcatcaatggaaatcccattaccatcttctaagagcgagatcccaccaaaatcaaatggtgtgatgctggtgctgattatgttgtgtagtccactggcatcttcaataccatgagaaggctggagatgtcttagaagagggagccaaaagggtcatcatctctgccctttctgctgacacccccttgttcatgataggcatgaatcatgagaagtacaaaaacagcctcaagatcatcagcaaagcctcctgtaccaccaacttcttagcccccctggccaaggtcatccgtgacaactttggcatcatagaagaacttataaccacagtccatgccatcactgccacagaagaccctggatggctcctctgggaaactgtggcatgatggccatgtggctctccaggacatcatccctacatctactagtggtgccaaggctgtgggccaggttactcccgagctgaatgggaagctcattggcatggccttccatgtctccactgccaamktgttggtcatggacctgacttgccatctggagaaagctgccaaatatgatgacatcaagaaggtggtaaagcaggaattggaggccccctcatgggcatcctgggccacacgagcaccaggttgtctcctctgactttaacagcaacttccactcttctgccttcaatgctggggctggcattgccctcaacaatcactttgtcaacctcatttcctggtatgacaatgaatttggctacagcaacagggtggtggacctcatggcccacaaagcctccaaggagtaagaccccagaccaccagccgcagtgagagcatgagaggaagagagaggccctcagctgctagggagtccctgccacactcagttccccaccacactgagaatctcccctccccacaatttccacacagacctccctgaagaaggaggggcctgggaagcccactttgtcatgtactatcaataaagttccctgtactcaaamaattaattaactrattaatcaaaatgtattgaatactaacattatgctaaggagagtcaattcctgcttgtttttaaaaatataattcttcatcattcaacttgaaattactgcccttgaagagctaaactcaaataggagaaactggcattttcctcctcaatattttaatatgaaaaatttcaaacatacagaagagttaaaagaatttatacaccacctaaattctacaattaacatgttgccacatttactttatcacatatccacccyctatctctccatcaagccacttttttttttttactttgcagaatttccaagtaagttgcaactatctgtatacctcacccctaaatgcttcagtatgaatatcattaacatgagttcaatctttgtttatggttcttttaaatttttgggttagttgtcatatagtgaaatgcacaaatattaaatgtgtcattggagggatttttgttgttgttagagatgtgatctcactatgttggccaggctggactctgactcctaagctcaaggagatcctcctgcctcatcctcccaagtagctgtgactatttggcaccatgccaggctttggaggaattttaacaaatgtagacatcagtgtaatctaaatttctatcaagacatagaacattatgaaacattatgagaacttctctcttcttccttcccagttaatccctgtccatctgcccctctacccagaggtagcttaccactgttgactttttaaagagatacataaattatttttggctgttctagaacttaaaacaagtggaatgatacaattacaatatgtgcttctaaatataaggctttgttaatttaacataatgtttttgagattcatctatgttattttgtgtatcattagtgaattcttttttattgctgggtagtcttctgttgtgcaagtacactataggttgttcatccattttcctgttgacaatacttagtctgtttccagttttggaacattttgaataaggctatatgtatattattttctttttgtgggcacaggctttcatttttcttgggtaaacatttaggagtgaaattgctgaatcataaggtaggggctacatttaattttaaatgaaactgccagactatttcccaaagttattgtgccattttatactcccaacaagataagagacttccagtagctccctatcttcatcaacatttggtatttttggtctttttacttttagccattctaatgggtgtcttttagtatcccactgtgattttattttgcatttctctgttgacttaatgttgaatgcttttttatgtgcttatcagtcatttgtatatctttgtgaaatgtccattcaaaaccttttgcctaattaaaaaattagattatttttattattgagatgtaagttgtattactgagatgtaaatgtaagtaagtgcttttgtctgatatgtcttgtcaatatgagaaattgattttaaggtagtgaaaaagatttcaggtaatgtgggagaggagaatattgcttagaaaatcagcttttccctgaagcttagggaaaagtgatttctacagaaatcactgctgaactttgcttttacctaatcagttagtctttgtttcccaaattggtttgttacctctaatttggagataaatagtagtttttctttgatatcgaacatgccattaaacctggattgttggttgtccacctgactgattcattcagtttgcggtctctcttctggccactatagtagtgtctgcctgatctcttcatttgcctctaaatatccctcacagtctactttccatatagcaactatcatgccacattttaaaaaatgctcaaaattccccagtggccttccatagctctgagtttatttcccatcctctttggctaactcactgacttactcagcttgccgtctttggaaattccaagcatgcccctgtcccagggtctttgctgttagtccaaactgcatcattttgtaagcttcccactattttgcagaccttggtcaaagtgaaacatttcacaggggtttgggccttgagaaacatcatgcctaaccacctgaccacaaggcagacaaaggcccaaatcccaggccaggtgtggtggctcacgcctataatcccagtacttttagaggccaagatgggcggatcacctgaggtcaggagttcaagaccagcctggccaacatggcgaaaccccatctctactaaaaatacaaaaattagccagatgtggtggtgggcgcctataatcccagctacatgggaggctgaggcaggagaatcacttgaacccgggaggtggaggttgcagtgagctgaaatcatgccattgtactccagcctgggtgacaagagcgaaactctgtcaaaaaaaaaaaaaaaaagaaagaaagaaagaaagaaagaaagaaagaaacatcccaatcatagcttgctggacaaaggtccaaggaatatcacgatgacatcccacctgaacaagggccagaaccacctcatcacgagaacatcttatcagtatcctgccaggaagcaagccctactgcccagacccctccctactcatacctataaattgtcccagcttgtaagcagcaatgggctctggcattaggctggtcccccacttctgtaggttttatgctggacgtaaagtctgaatttgctgttgagctgccctcttactgtgtgcgtgtctttctttaaccctcgccttcccttcaaaacctaacatttgcactagcttttcctccacagcatgcgtctaatcccatatacaaatgtatttccatggcacacccctcacttcattcagctatcttcaaatattacctctttggagagatcttcactaactactcataaactagcaaagagaaacgttcttccaaagtctttttatctccttactctactttacttttttcatagcactcatttccatctttacctgaatattatcattgaaaaattatatttgtttatccccccaccctactagaatataagctccttgaggacagggactttgttcactttattcttcactctgtcttcagaatctagaattgtgactgacacatagtagatactctacataaatagttgttgaatgaataagaaaaaaactagatctgaatatcattcaaaccaagaattccataacttagggtatggtgggtggctttggaaatccagcattgaagacaatgaggtgctattagacaacgcacttctacctgaaggaagccccaaacttagttgccaagcaaccactattagcatataaacaaatattaaagcacacatcataaataaaatagctaacaaggcagtttttctatacccaaccaggcattttcttgttattgttcaatatacttgagtcaaaaagagagatgcaactagttatttcttgctataaaagaaaaaaaggccacaagttgtttattgccaagaagaataactcaattgcaatttagtatttggaaagtgtccatctaagcaagccagaattttcattgatttttcttttcctttttagtttttcttttaattaaagactatttttcagaactggtttaggtttacagaaagtacagagagttcccatataccccattccactttcagttccccctattatcaacatcttgcattggtgtggtacatttgttacaaatgaaaatcaatagagatatgttattattaactaaaatccatagtttacattaggatttgctctgtgtgatgtacagttctatgggttttactaagtgacaatgtaattcactgccctaaaaatctgctgtgctctaactccctttccttctgtacacccctggcaaccactgatctttttatcacctctatactgtagtttggttttcattttactaattaaaaaagtggtcctcgtaaatgggagaggagttgaagagaagtaaatgacaaaaaactgaaggcgttctgtccatgtaattctccattgtatcttctgtatctagaatagtgactcagggataactcaatataacctgtttacattttaacgtatatccttacatatgtgattacatatatgtatatatatacacacacacatatatgatcatatatattcttatatgaggggtctttaaaaaatcatggaaaatgtatattatgaaaaaaccatggatgcatttcaaaatgtttttgcactaaaataaaatcacagtaaattgttgcagtatgtctgaacagcatctagcttgaggcattaagaaggataagacattaatttgaaatgattccctatcagaacagatgatttctacaaaaattgaagcaagaacaaacgccaaatttatagtgaagcttgggtggaaaaatggtgaaattactgatgctttatgaaaaattaatgggaacaatgcccaaaacaaattattagtttacaaatggataattcattttaagaaggaatgagactgttgaagtcacgtgaagcccacgtgactgaccatccatatcaatttgtgagaaaaagattaatattgttcatgcagtaattgaagaggactgatgattaacaccagaaaatagccaataccataggcatttcaactggttcagcttaaacacttctgactcaagaattaaagttgggcaaacttccgctcaatggtgccaaaaccactgtccccagatcagctgcagacaagaacagacctttcaatggaaattttaaacaagtgggatcaagatcccgacgcatttcttcaaagaattgtaacaggagatgaaatatggctttaccagtatgatcctgaagacaaagcacaattgaaacaatggctaccaagaggtggaagttgtccagtcaaagcacaagtggatcagtcaagagcataggtcatggcagaagttttttgggatactcaaggcatttttcttgttgactttctggagggccaaagaatgataacatttgcttattatgagattgttctgagaaagccaaagacttggcagaaaaacacctggaaaggtttcaccggagagtctttctccaccatgacaatgctcttgctcatttctctcatcaaacaagggcaattttttgggagtttttgtgggaaatcattaggcatccaccttacagtactgatttgactccttctgacttatttatgttttctaatcttggaaagatctttaaagggcacccacttttcttcagttaattatttaaaaaaaaaacacattgacattgttaaattcccagttctttaaggatggactatatggctggtatcattgcttatagagtatcttaaccttgatggagcttatgttgagaaatacagtttatattttctatttttatcttttaatttcattttccactaacattttcttttcttttcttttttaagagacagggtctcactatgttgcccaggctggtctcaaatgatccacccacctctgcctctccagtagctgggattacaggtacacaccactgcacccagattccgtgaactttttggagtcccctcatgcatacagtctaatatgtatgaaaagataatccacttataccaagatttttaaaatgttaaatatattttggacatcctgctaggcacttcatacataccgttttcaaatcttcaccctgtcccctaaaccctgtcaaaactgagaaattacagttaagctcaaggtactttttaacttcctgttggaatttataatc

SEQ ID NO: 93437 - DNA, 13549 bp, Homo sapiens
ttttaaaacatgcctcatgtgaaaccatcacctacatcctacactgaggcttaccaagcttcttcaggagacaaaacagcatctccctggaggaaagtaaatctccgtttttttgtttctctggttttctaaagtgggcaaatgttggtttttacaagaaaatatccttggtcctcgacttctgtggcatcccatgagcatcagaacacaaactgcccaacacacacaaaaattgcatgctctattcagatcaataaagcaagatggaaaattaactaaatgcagggctttctagggccattaaaataattcatcagggcaaggtgtgatggctcatgcctataatcccagcactttaggaggccgaggcaggcggatcacctgaggtcaggagttcaagaccagcctggccaacatagcgaaaccccgtcgctactaaaaatacaaaaattagccatgcatggtggtgggcagctgtaatcctagctactcaggagctgaggtgggagaattgcttgaacctgggaggcagaagttgcagtgagccaagatcgtgccactgcactccagcctgggtgacagagcaagactccatcttactttaaaatataataacaataataattcatcataatatgctgagttaaacaagaggcaaacctgaataaacaaagtttctatgtacacccaggtcataggatagaattcatgttgaatattccagcatttcttaacaggcaattaggaatttgttctaattgttttactgtgctctctgtggacatattgtctatatgattagcgtgtgagacaccaaaaagcagcaactcctactcatcttttcattgttttacttagaaaattggttaaattagggaatagttaaataacgttgccaggattccatttgtagccagttctagtctcttttatcagtagtttgctttgcctttcagttagttgttcatggaaaaaatatataaattacttattctacaagtaaacatcaacacatacaatgggataccactcatcctttaaaagaaatgagatctactatatggatgaactttgacaacattatgctaaatgtaatcagccaggcagaaatgtacaaatattgtacgattccacatgtatgaggaacctagaataggcaccgtcagaaacagagagttgatagagattcctatgggatgagagttaggaggattgcggagttattgtttaatggacacaaagttttggtttggtacaataacaaatttctggaaatgaataatgtgaatagacttactatcactgagttgtatacttcaaatacttaatatggtaaatttaatgttattatcttttatcacaatttttaaatggcccaaataagtacaaatcaacataacattatttatttgctcactagataggaaatcatattattaaatttctttataaaaagctcaaatgtgaaatctttttgtccaaaaaatgtatgtccaaaaaatagatcaaagtagctctggaaacccttcagacattaagaataagatagctgggaaagaaatagtgaaggccagctctgattgccagacagaactgtgggcagcctgaggagacctatcactgacatgtcctcaataactccaccacaggatagatattcagcaaccatttggctttgctttcaattaaaaagattaccttttcatttaacttaaaaagttgaaattccatgggatcacttgctgattgccatgacttaaaaaatagacatatttaagttttaacttggcttttaattttataggaagagtgtgaaagtgtaaaggaggagagaaagtgtcaccttttcttttcgcgcgagaaagcgtgacttcaagattggcaaaggcataaaatatggaatccttatgggatgcatctgggtgggctgatgctggcaattctacccctagaaatacccaagagaaataaaagctaacgtatatgtcaaaacttttacatagatgttcaaagaggtattattcatgatagccaaaaaccccagaatcaatccaaatatctacctaccgatgaacaaataaacaaacgtagtatatctataaatgaaatattattcagcatttaaaaagtaatgaggtactgacacatgctataccattgatgagatatatacataatgttattcagtcttattaaaaaaaggaaatccagctatttgtggcagcgtggatgaacataaaagacattatgctaaattaaataagaccagaaagacaaatactgcatactctcactgatacatggaatccaaagacgttgaactcaaagaaacagagagtagaagggaggttgcgaggggctgaggaatgggaaattgggggatttagccaaagggtaaaaactttcaagtgtaagatgaataagttttggggatcaaatacacagtacagtaactatacttaataatactaatactgtatagttatggtaactatgcttaataatacttcacatttgctgagagagtaataatgttaaatgttaacacacacacacgcacgcacacacacacacacacaccaagtaactatataaggcgatggatatgttaatcagcttaattatgataatcatttcactatatatatatatcaaagcatcagacttcacatattaaatatatacaatttttatttgtcaaaaaattgtgaaagatccatattaactccatgattttttcagttactgcagcaaaagtagataagagcagttttagaattctgcaattctgcatttcatgatatattgacataatttatttctgttccttttccagaagatcaggtctttctgtgcattgtaaatcaccaggcatgctcacttctctgaaaaacatatatttaggccatcttatcattaaataaattgtttaatgaataaaacaccactgatttatagccacaccaagctttatgcattcacatagttattgttttataagtaaaatcctgttgttaaactttagttccacaaaatctaatattctgaaagacctaccttctaacagcaacatgaacctctccaacgtgtataaatctcatacctggagctgaccaagaggaaagagagcctcagagaccatcagagccattcctgcagtggttgaaggtcttctgaagtctctgctggtgtgtgtggggggcagcagagctggcttcctgcccccaattaactggcaaataatattacaatctgggctgctctgagcccaaatcagatggttttagagtgctgcttctcagagaggatatagaaaggtagtcagaattgtcagcataatcctccctgctcagtgtcagaaaaggaggcttgtttatttcaagttactctgctcaagaaatgttattttaacatgatttaccagaaacaaaggtgaacctacaaccagtagtaagaaaatctcaagacagtatcaaattgctcaatatggttcagttctgtttagattttttgagctcctactattttaaaagcacgggcctggaatctggagatagtaagtggagtaagaccctgtccactctctcaaggcagagattggtgacactgggcaagacacaccatttctctgggttctggctgcctcatttatgaaaagcaacaatgtgagtagttaatttctaaagttccatttgtgttaaaaggaatttttacaaaaaagcaaaaaactttcttattctagaaatccttagatagcagagtaaattttaccttaagatccatgtttttaaatgacagtgtcatgagcataaaagaagggaatatatctggccgcagtatttaaattactctttgttaccggtatcagaatattgcagtctctattttatgtcatcaagttttcttattccaagaagcaagacaaataaacccacaattttctactaatttttcagaagttgggaattattttctagtaagaaagcatgaaaccacttttcttacttacacatttgtagacatctgaactcccatgccaagaggggatgccagaagaggtgaggtgagggggtagctttggctagtgaggrctcccagrgtcagcatgctgggggcgtcttccaactggagttgggataatgctgcaatccaagtcaagtgcagaaccagaaacaagaggatggcaggggagccagagaagggagatccaatgggctccccagagaagggagatccagaaaagggagatccaagggaggtcagaggtgacccccaagacccagagtgaagtaacacagagtaggccaatgaaggaggccaatgtaagcagagaaggcaaaacaagagcgtgattctgggaaatacctgggaccaagtaggtccaggctggtggttgcagtgggaaggcagtcgggattaaaggatctggtaggttgtcaagatgcgtgtttatgatgacttcatatctgggctgtctaggaaagtcctaatttcaaataccgtagtatttttgtcagatgttgcaaccaaagtgccttcattcagctgtacatggcacctctgctcggccaggtgctgggctaaaaatctgcgacatagtcgggaccaaggtgtagactctgctttcaggtcgcccactgtcctgtgcagggggctaaggattatagcaagtatggtagaaagcacagctaccaggttattgtaataaaacctaatctctccctcaaaattattataaccactggtcattactctgatctgatcctcttttaagaaataaaggatttttggggaggctgaggcaggaggatcacctgaggttaagagttcacgaccagcctggccaacatggtaaaaccccgtctctactaaaaatgcaaaaattagcctggcatggtggcacatgcttgtaatacaagctactcgggaggctgaggcaggagaatcacttgaacccacaaggcagaggttgcagtgagctgggatcgtgccactgcactccagcctgggcaacagagtgagactctgtcaagaaagaaaggaaagaaagagagaaagagagaaggaaaggaaaggaaaggaagaaaggaagaaaagaaaggaagaaggaaggaaggaaagaaagaaaagaaagaaaaacaaagaaagaaagaaaaggagggagggaaggaggaaggaaggaaggtaggaaagaaggaaagaaagaaggaaggaaagaagaaagaaagaaagaaagaaagaaagaaagaaagaaagaaagaaagaaagaaagaaagagaaaaggagggaggaggaaggaaggtaggaaggaaagaaggaaggatttttgcaaagttcgcacacagacactgagttctttggggatagcagacaatgtatactagactttggctatgctaaccatgagatgtccactttctcacacttgtggctgagacctcctgctgatcgcctgtattctgtcctcccttgtttccattatattctcaccatcccataagcagatcacttgctaccaaaagattcctatcacaaagaagtaacatgattaccagatatctttagtgcattacatctaatagtcaaaagatattttatatagacagatgtttatagatggaggaaggagagatgaatctggatgcaaatcctgaggatggacaaataattttacaagtttgcacgcatcacaaggtgtatctcccagtaactggattgtcttatatttgtttcttgtgtggaattttcactggcttcccatttaaattgaaaaataaaagcaaataaatatttctttacaaattctctaggattaggcccatggcctgggcttgcagggcgtgcagctgagcggtgctgggagggcagcagaggtggcaacagagccaccagatccagttccggcaccaaaccgaacacgaagtcaggaggtccaagactagcctgggattggacacggtgaatggatatcagacctgaggcatgccaaggaaatattttcaaagttggaaaagtatgttgatatagatgctggaaagtataccattggcttgggccaggccaagatgggctcctgcacacatggagaagagatcaactctctttgcatgcctgtggttcagaatcttatggagagaaaaaatctttcctacgattgcactggscgactggaagttggaacagagacaatcaaggacaaatcaaagtcagtgaagactaatttgatgcagctgtttgaggagtctggggatatagatatagaaggaaccracacaactcatgcatgctatggagccccagctgctgtcttcagtgctgttaactggattgagtccagctcctgggatggacagtttgccctggagtttgtaggagatattgctgtatatcccacaggaaaagttagactgacaggtagagtcrgagcagtagctctgctaattgagccaaatgcaactttaatttttgaacgagggcttcgtgggacacatatgcaacgtgcctatgrctyttatgagcctgatatgctctctgaatgtcctatagtagatggaaaaccctccacacagtgctgcttcagtgcattagatcactgctattctgtcgactgcaaaacgatccgtgcccagtggcagaaagacggaaatgataaagattttaccttgaataattttggcttcttgatccttcactcaccatattgtaaactggtgagtttatctctagctcggatgttgcrgaatgacttccttaatgatcagaacagagataaaaatagtgtttagaatgtcctsraagcctttgggaatgttaaattagaagacatctattttgatacagatgtggagatggcatttatgaaggatagtyccgaactctcccatcagaaaacaaaggcatctttgctgtatccagtgaaaatggaaatacgtacacatcgtcagtatatggttccccgcaactgtcccagcgcagtactcacctcagcaatgatcagggaagagactggagtgttctcgtacggttctggttcagccgccaccctgtactctcttaaagttmcaccagatgccacaccatggtctgctgttgataaaataacagcaagcttatgggatcttaaatcaaggtgtagctcaagaacttgtgtggtaccagatgtctttgttgaaaacatgaagctcagagaggacacccatcacttggtcaactctgttccccggggcccaagagattcactctttgaagaaacatggtacttagctatggtgggtgaaaagcacagaagaagttacactccgtgtccttctccaaataatgacacttgggatgaaggagtcagacttgtgcattcaaacacagtaactgatcatattccaagccctgctaagacagtgccaagactccctgccacagcagcagaaacgggagcagctgtcattagtaatggggaacattaagatattctgtgaggtgcaaggctttggtgtgagggtggggatgggattacatgttgctcagatttttatgtgagtgacatggagcctggatgaccatcgtgtacttgggaaagtctcttttcctcaatttgctgacatgtttcccactgtggtctggccaatgccaagtgcgcttgagtgatgttaagggctctataaaacttcagacctctctagccattcgtatacatgaagtttagttttcaaccatggtataatgaatcctgtccttctgtcagaggaaagcagaggtactaatcttcaattaaatttttttaaaacagataagaattttgtactttgaacaacaagcttactgaaagttctagcttgggaaatgtggtcttaaaatgtgatatgcacagattctttgacaacggcaagacaaggccaggtgctctggctcatgcctgtaatcacagcactttgagaggccgaggcgggcggattgcctgggcccaggaacttgagaccagcctgggcaacatggcgaaaccctgtctctactaaaaatacaaaaattagccgatgggtggcatgtgcttgtggtcccagctactcgggaggctgaggtgggaagacctcttgagcccaggaggcagaggttgtagtgagcaaagaaagaaggaaggaaggaaggaaggaaggaaggacggaaggaaggaaggaagaaagaaagaggaaagaggaaagaaagaaagaaagaaagaaagaaagaaagaaagaaagaaagatagaaagaaaggaaggaaggaaggaaggaaggaaggaaggaaggaaggaaggaaggaaggaaagaaagaaagaaagaaagaaagaaagaaagaaagaaagaaggaaggaaggaaaagagggaaagagggaaagaaagagagagggaaggaaggaagggagggagggagggagggaaggaaggaaggaaggaaggaaagaaagaaagagagtaagaggaaagaaagaaaggaaggaaggaaaagagggaaagaacgagagagggaaggaagggagggagggagggaaggaaggaaggaaagaaagaaagaaagagaaagaggcaagacaaagaaagaaagaggcgagagaaagaaaagaaagaaagaaagaaagaaaggagaaagaaagaagaaagaaaggaaagaaagaaagaaggaaggaaggaaaagagggaaagaaagagagagggaaggaagaacgggagggagggaaggaaggaaggaaggaaagaaagaaagaaagaaagagaaagaggtgagacaaagaaagaaagaggcaagagaaagaaagaaagaaagaaagaaagaaagaaagaaagaaagaaagaaagaaagaaagaaagaaagaggcaagacaaatatacacccttttttctaaaattgataaatcctgaagaggaagaaaacagctgagacaataaaactagttctggaatctggaatgttgctttaaatccaggccagccgtgacaaaagttgttatggcctctgaacagagagacgctgacattgggcaggcttctggtataggaaacatggtacattcggaagccgtgaataaagctctgggtggctcctgaatcggttcatggcagattatggtgagcaacattgagatgttattggaagtgtgaatgaggacattcactgttgcgatccttctttgcaacttattttgaagaatgaatgaaacatttttttggttgcctttttaaaaattataaatggaaaggaaggacggagcaggacattattaggttgcttctgatgcttcagtgttataaattcaatatatagactgacagcctaaattcaggatgtagaacagttcttttcatttttactttctcctttttttttcttttgctatctgttcaatgaaaataacaaggtacaacccaagtttttacatagtgtaactagaagtattccacttcaaggtctgaaagtaggatttatgaagcattttcttagacttttacctttaaaaaagaacaaacaaaacctgtcacacaggatgggtaagaagattggttacacagctttgtggtgctgacaatgagccttatagactgtaaaatacagatagtttgaactaaggtacagaactaaattttctaaactttatttgctgttaaagaaataattccttattttaaagaaaaaaacaaattctcgaagtttataaaacatttattttctcaagaaggctcacttgcaaacattttgaagtaaacaatgtcatagcagtcatgcactgccctctggtggtcacatgagagccctgcatgacaaatgctgcagggctctgcatttggcgtcagcaaaagacaacattcaaatttagacattgctatgggcttgcagttagatcatatcccaattttgtaagaatcaatgtttggaagataacttcgagaggaagtcattgtttcttcatttcacattgtaaaaaggaggtctctttccaagtgtggtatttcagggagtatttattgagcacatagattccagggcagaaaatagagaccaggtcaccgtctcatagcagggtagggggtcggggaaaaggggcagcagtgttaggaaatgttgagaatgactggccaacatcacaactatgtatatctggcttacagaaaatagtatatcaaaccaaagcccattgatggaatccttctgattacttaaacagtatattttataaaatttaagaactattacccaacatgtctgtatactttcatctaatcttagacacacagtttttccaaacatgggatcaacttacatccccagttacttttctcacttgatatgagccctaatccatgctattcaattgtttttgaaaatctgatttaattgctgcatagtgttccttaatacatcttgtacacaaattacatgcttccatagcttctgctgctgtctccctccaccaaccaaatctgctttatttctaaaagtggacctcaatcactatcttctgcagacagcttccccttctagaataattcatgggacttctaggactttcactttatccttctgtctcttaggatagcaggcactccataccatgtcttatctccctttatatactgagagcttcttctagcgcaaggtgctgctaaattagctctctgtccagctcttagcacagtgctcagaatacagcagacactccataaaaattggagaaacacaataaatccaaacacgttgtttactgttgcagagaactctagtcgtccatcaaaatccattctccccttctccgcacacacagttggactacatttcccaggctctcttgtgttatgcgtggtcacatggccagttcttgccaatggaagaggagtgggatygatgtgagccactgccagtccaggcccataaaatcctcctgtggacatttcttcgtgctctttcttcttctgctgatgcatgcaagtagggatgaggccccagatatcaaagtcaaaataaaatatattggtgaatgggtaaatttaaatgttttatttgggaaagcacaaattgcagttcagggaatacacatagtccaagtgctcttcagaatgtccaagaacaaagagaaggttggaggttttataaaaagagctatgttatgttttgttttgaaaataaggtcattggcataagtaaaattttagggaattggcatcctctaattggtgagtggtgatggtgggtaaaactagtcttagcttcctggcaggtcattgtagaaactaatagaaaactggtttcaggttacagcaggcagtttcagcagctgggcttgccgagaattacattctcaaaacaatgttatattccccgagtgctttttccccctggtctctggactctgttttagctgggtatgacaagaatgacccaatttgcatgatcaccattcacaggaatggtgaaggcacaagaaggaaacactctgggttcctggatgaccacagggaggaaagctgcctctccaacctgggcacccatctagccatgccaggggggtgcaaaatacagtgttatgccactgaaattgtttattcaatgtaacctcattaatacagctgcttacaaattcgatcacaggataacttacatagtcatctctgtgtcacatttaaaatgacagaagtcagtcagaccttgccaatgctgcccttccattgaccctgctattctgacccagccactttacctcatagaacttccgtccctcataatattttaaatctctgcttcataaacgttgacgtcagaattataccaatattttaaaagttgaggagcaactttgagagtaaacttcaatagtacttttaattatttaatactttttaaatatagcacatgatatggtttcctgtgtccccacccaaatctcatcttaaattcccatgtgttatgggagggacctggtaggaggtaattggatcatgggggcaggtctttcccatgctgttcttgtgacagtgaataagtctcatgagatctgatggtattataaggtggagttcccttgcacaagctctctctttgcctaccgccatccacgaaagatgtgacttgctcttccttgcattgcaccatgattgtgaggcctccccagccatgtggaactgtaagtccatcaaacctctttcttttgtaaattgcccattctcatgtatgtctttaccagcatcgtgaaaacagactaataccgtaatcagtatcagtagagtggtgcactgctgaaaagatacccaaaaatgtggaagtgactttggaactgggtaacggacagaggttggaacagtttggagggctcagaagaaggcaggaaaatgtgggaaagtttggaactccctagagccttattaaatggctttgcccaaaatgctgataatgatatggacaatgaaatctaggctgaggtggtctcagatggagatgaggaacttgttgggaactggagcaaaggttactcttgttatgttttagcaaagagactggcagcatttttcccccaccctagagatttgtggaactttgaacttgagagagatggtttagggtatctggcagaagaaatttctaagcagcaaagcattcaagaggtgacttgggtgctgtttaaggcattcagttttaaaaggaaaatagagcataaaattttggaaaatttgcagcctcacaatatgatagaaaagaaaagctcattttctgaggagaaattcaagcaggctgcaggaatttgcataagtaatgaggagttgaatgttaatcaccaagacaatggggtaaacgtctccagggcatgtcacagaccttggcagcagacccttccatcacaggcccagaggcttgggaggataaaatggttttgtaggcaggccccagggtccccctgttgtgtgcagcctagggacttggtgctctgcatccagctgctctagccatagctaaaagggtccaaggtataaatcgggctgtggctctagaaggtgcaagtgccaagtcttggcagcttccacgtgatgttgagcttccagcacacagaaggaagaattgaggtttgggaacctccgcctagatttcagaggatatatggaaatgcctggatctctaggaagaagtttgccacaggggcagggtcctcatagagaacctctgctagggcagtgcagaagggaaatatgggtttggagcccccacacagagtccctactggggcactgcctagtggagctgtgaaaagaaggccactgtcctccagccccagaatagtagatccactgatagcttgcaccatgcacctggaaaagccatagacactcaatgccagcccatgaaagcagctgggagggaggctgtaccctgcaaagccacaggggcagagctgctcaagaccatgggaaccacctcttgcatcagcataacctggatgtgagacatggagtcaaaggagatcatttttttggaactttaagatttgactgccccactggatttcagacttgcagggggcctgtagcccctttgttttgg

SEQ ID NO: 93438 - DNA, 13482 bp, Homo sapiens
tctctaaattgttttatataaataatatttttataatggtaatttaaagtctttacaaatttctacacttcagcatctctgggccttcttctactgactgatttttgtcttggttatgtgccacagtctccttctttacgtatctagtaattttttattatattattaacattgtagatagaatactatgtagattctggattatttcatcttccttcaataagggctatattttgtctaacagacaataaattacggtgaatcactttgatcctataggtatctgattttaggttttttgaggatttggtttagttttgaaggtagtcctaaatacctaaggacctccatgtttgttaacagccattattcctaggatgtggcacctactctgaaaactatttccctgaggtcttaaatttgatcaggatgtacactaagatctccctactctagctccaatacctccttagcattatgcaatctctcttctaccccaacagcaattctctgctagccctataggccttgttcagcagtcttatcctgcctatgcacgatttaggatttggtcaagaacctaagaggaacccctacacaaatttctgaatgttctttgcagctgtttttctctggtactgtgtctttcaattcagctgctgttttagcaaccacaaactcccatctctaattcctctgcccagagaggctaagattctctgcctgaatggcatatcaccaytaaactctaggaaatgcccataatagcaaacttgagtgaatgtagatcttaccttgtatgcttcactcaaagattgcaactccatgcaccgtgcaatgcctgaaactcttgtttcatgtgtattttccagtttatagttgtttattacaggagattaaatccaatactagcactccattgtgactggaaccaaaagtgcctgtaatcaattgttcaaaatccagactagtattataatattgcttatttctataattatgctttttaacaattttttaacatttgtattttgctttgttacactaaagtattttttattctaagctctatatttatactgcttcaaaattcacccaatggcttatctattctttaaaataatacggttttgaattattaatctctcaattcactaaagaatgcctttgagtaattatttttttcataccgtttaaataacagacatattctaaagctttgcatttttaaaaaaaatctagctgttgccttaatatcttaacatgaatggtagctccactgggtattttctgttcatgttgtctcattttttattggcattcatattttaatagtgtgaagtcaacccacttggcatccatttgaacaaaaactacatcttactttctaccttgttgctcatgaatttttattatccttgaagtttaaaatgtcttccatgatgcctacagatgtattaccattaatatcacctagaatacagtgaccctttatattaataatttatagacttagccagaaactttatatctattttactgaatattaatgcttctgatatatatcagaatataaatatgtcagaagcatcaatagccagtaaaatatattctgatatatataaaacatatataagtatatatcagaatatattgcttacttctgtagttatgctttttaagaatatattaatatgtcctgctatatctgatatatatcatcagatatagcagaacatattaaaatatatacatatatattctggtatatatcagaagcattaaaatacagtaaaatagatatagaatatacatatcaagagcattttatatatataataagaattatatatatatcaggggaatttttatagacacaaaattttgatcttatttaggaacactaaaaattcataggttggctctccatttctcaatacttgctattgttttgctttcttgctttttctttacattctttttctctttaagtctctgaaacttttgaatgtttttcttcatctccatggtaaattttctagagagccaattttgcttcctatagataatttagttgcgcccttacgtattgaaattctttccattctttaccacatgacaactaccttctgtcatgctgttctttatcccataccattttctctttattagttgctcatgcttcataaaggtcatgccttcatatcttttactgagagcactaaacagatattatctagctattctgatacttcttgtcgcaaataatttttagaggcatatttttcctttgagtcttcagattaacataactttttggtgctatagaatattttatagaaccaattttgcttttcattgcttatttgtttatatttatgcctgactgagttgagatctctttaggtctagcattgccaacagacatggtaaattgtgtgtcgttaagcatctctttattggacatttggggcattagatggcttctctcaaatctaaacttagaaacatagtaatgagtatatccttaatccaatttatggtgtgcagcaagtatttatgccttgtggctctgctgaaatatgttaaaatattctgtttttgttgttgaattctccatgttagacaataaaaatgcatatcctgggatgcaaggaattaacgcacatcctcttttcccctgtttttgtgtactaaaagctaaaatcagtgtaagaagagacgacttgttttcatggtttagagcaggaggtgaaacgctgggacactggtataagacatttactacttcagaaaatatttcctgtgcagtatgggggtgacctgcttgacatgtacagcctttttgttcctgggctggaagaaggtagataaaatgagtcaaacccttctcatgcaaaggagtcagcatgcatagcctagggaagtgtttctcaatctaatccagtcagtttttcaattcctgggaactcctctcaaatgttaatttatagtacactcttattcattcccagtactgtcaaaaattttatatatcctaagtattttttttaaagaaaaatctggagaagacagcatgccactacattgcctcagaattttcagtgatctcttgtaacagactttgtatgtgtttccatttttttacttcctccaactgacagtcactacatataatttccccacctgtcttgcctttaagtttaaaaatctaataccatatattaagagtaaatagaagattattgagagagtcccttacttatcaaattaaaatcctaattctcagtgatggagcgcaatctctgaaaatagtaaacattgtagtgtatgcacaaaccagtccctttgcacagaatcctctgcctatctgcagactagtcggcaacagagaacaaaaaagtgcagaactgtagacattttttaacctgaaaataaaatctcttttaagaaacatttaacttttttttttttatcttgcacagaccaacttcaagccatctccttcaagaaatacttcccttctgattcttccttcctgtgcttagcaacaaggtcagacagtttaacttgaaaaagcaaaattgagtaaagtacttgttaatagtatgttgctatgttggatttggaatacactgagacattttatcttgtttttttaaaaataaaattctaaaatattattttattactttttcagataaaatgattaaaatcattaaaattgaattgtgttctttgttcctcaaactctggaatcaaccaataaaataaggataaagtagtgtcttcttcagagtgctactgtgaagactaagacaagatatgtaatgtacttaaataaaaataaaactatcaatattactgatgagaagtgctaactataagcacagaaccacaaatttatttgtgtatactacagagaattataaagaaaaaggaaagcaataagtatagtttttgacccaataattataattttttaacattgtggctgtattgttttttctctattccacaaaatacaaagcatgatattcaacccagaggaaaaacactgttgtcttgataggtacaatggtaatttcaaacctgcttcgttagactataaattcttaaaaagtagagattacacctagttaattctgcctataaccaagtccaaaaccatgcatatgggcaactcaatgagccacgttctatcctgattggacattacctaggtaatcccttagttatattttcagttcctacttttcagttgaattttgcaatttgtgaaattgatgtgtccactatgcccagatgattaaatattcatccaatatttattgagcacattctaggagtcagccaatgtggtaattgcctgggagacaatcccaagtcaccacttctatcttcaaagatctcacagcctagcagagggaatagactattttaaaaaatcacaactcagtatgacaagtgccgtggatactatggaataaaatttgggaatcccctagctgaactgatggggtcatggttaacctgaaaagcaagtaggagttagctatggaatgaggagtcccacctgcagccaaccttatactgcagaggggttgatgccttgacactggcaacagacgcttgggtttggattccccctcagccaattctgagcttagtgagctttaacaaatcccttaaccccttggagatttttctgcaaaatgaggattataatagtttctaattaatggagtcgtggggaccaaattggttaagtagagcttttaccaggccctgctacacagcaagccctagctcagcgtgaacttttattatcattattattggtttgctgctttctcccggtggccttccctgaagtttccaatcaagttataagtttccttgtatgtgctcacatctcaggcacagtaggacagcagcatcaaggccattcagcaaaggttccgatcagagctcataagatctcacttaagccttatctgaataatgtgctagaggaactttcctgttgaaaaaggaaggagcttacctcttcagagtgccactagatgattagaggcaaaatgtcacgttgatgtaaatatgagaatttagttatggaaggtgggagtgtttgcttaaaatgacagtaaagctgaatttttatgaatggctttttattatacaagacatctatgttcagtgaagaaacttagaaagtatagacaatcaataatttatacaaattataatcagctgtaatcccactgcccattaaaaaaagtactatggcattttgatgcaaatgtttctacacatgcatactctgagaaaaatgcatgtacccttctgcttctctccttactaaccccacacatacactcacttgaacatctcttaggaagagatcatttgtcatttgattggccagagttcatagttaaccagtggaccaagttattattccttaaagaccccaagtcctcctttggctcacttttttctatgactcggtgataagaaaaaccaaggaatacaaagagggttgttcgtgtgtgtgtcccatctgctatgtaactataattaaataggcaggggtagactctgtttacccatccatcctagacgcaggaggcttcacttaaagtaaaggtctctggatgtaaccatgttctcctatccatcttttaacagaaaactcacaaggtgaactaggtgcttatccagttactaataaacaatatcatcttctaccattccttgagtatcacttgcttggttggcaacaccctgagaaagacacatgatcagcacaacagaatcttcacagccctgcatccctgaccataataccattacagcaataccaaattctcacctctaatctttaaaaatacacacaaataaataaacccattcatttttataaaaatgaaattatcctgctctgtcgcctgccatggctgccccagcccgagtggttcattgcactgtggagtcagattccggacggtatgtccagcaaaggctctatagttctggcctgcagtggcagcctggacaccttctgcatcctcgtgtggctgaaggaacaaggctatgacgtcattgcctacctggccagcattggccagaaggaagacttccaggaagccaggaagaaggcactgaagcctggggccaaaaagatgttaattgaggatgtcaacagggagtttgtggaggagttcatctggccggccatgcagtccagcacactgtatgaggaccgctacctcctgggaacctctctcgccaggccctgcatcacccacaaacaagtggaagtcgcccagcgggagggggccaaatatgtgtcccacggcrccacgggaaaggggaatgatcaggtctggtttgagctcacctgctactcgctggcccccacagataaaggtcattgctccctgaagtatgcccgaattctacaaccggttcaagggccacagtgacctgacggaatatgcaaagcaacgcgggattcccaccccggtcactcccaagaacccgtggagcatggacgagaacctcatgcacatcagctgcgaggctggaatcctggagaatcccgagaaccaagcgcctccagctctctacacgaagacccaggacccggccaaaacccccaacacccctgacattctcgagatcgagttcaaaaaaggggtccccgtgaaggtgaccaacgtcaaggatagtgccacccaccagacctccttggagctcttcatgtacctgaacgaagtcgcgggcaagcacagcgtgggcaatattgccatcgtggagaaccgtttcattggaacgaagtcccgaggtatctaccgggccccagcaggcaccatcctttgctacgctcatttagacatcgaggccttcaccatgtaccgggaagtgcacaaaatcaaacaatgccggggcttgaaatttgctgagctggtgtatactggtttctggctttcyggcacagccctgagtgtgaatttgtccgccactgcatcgccgagtcccaggagtgagtggaagggaaagtgcaggtgtctgtccttaaaggccaggtgtacatccttggctgggagtgccccactgtctacaacgaggagccggtgagcatgaacgtgcagggtgattatgagccaattgatgccaccgggttcatcaacatcaattccctcaggctgaaggaatatcatcgtctccagagcaaggtcactgcaaaatagacccccgtacaaggaggagctggggcctcctcaatttgcagatcgcccaagtaaaggcgctaattgttgtgataatttgtacttgtgactagttctccccggctggcagcatagtggggctgccaggccccagctttgttccctggtccccttgaagcctgcaaacgtcgtcatcgaagggaaggatggggggcagctgcggtggagagctgtaaaatgacaaaagatacactagtcaaaaaaatgaaattataccgtacatatcaacttattaactaagttaataataacccaatcatgtatttttatattgatgaatacatacataaacatgtctgcttcctcattttttatttttttacttacattaatgattttgttgtgtgaatactaccacagtttattgaaccaatcttctctcattggagagttaaattgtttttaagctttgactattaaaaacaatgtctcagtgaaaatccctccctctacatgtacccttgtgattgtgactgactatacccaaagaccatattcttccctgcaccatggcaaatatacgtaatatcctaccatcatttctaccaaagcttgacttccccaggtctgtatctaggtagctagaagcagctcataactacttcacttcagatgaaaccgcatgtaaatggcctgagcagcctggagctccacaattagattaattgggcccccaggtgactaatcttgaatttctaatgagttcattggaatagaaggaactgcaaatctgaattcagatgtcagagtcaggactaacaatatgaagcacaggcccagtgcagtggcttactcctgtaagcccagcgctttgggaggccaaggcaggcagatcacttgaggccaggagttggagaccagcctggccaaaatggagaaaccctgtgtctaccaaaaaatagaaaaattagccaggtgtggtggtgggcacctgcagtcccagctactcgggagactgaggtgggaggatggcttgaacccacgaggcagaggttgcagtgagacgagatcatgccactgcactccagcctgggtgacagagcaagactttttcaaatacatatagcacaatcaacacgcagagaggcaaaaacctaactgtggctaatttatcctacctgctgaagctcttactgtctgagctactggactggggggcaggtatgagaggtaacacttactggaccttacagtcatagcaggccaggctgggataattaagagaatattttagaaagttttcaggatatggctagagccacaaatcaaaggtgtttttttcaaacgtatactatctttctcataagtgtagatgactcaagagacaattttaggtccataaaattttagggacaccacaaaactagagttttccaactcaatgaaacactgccattgatgtgtttaaaatagaaactcaaatttataaataataatagtaatgataatactcatcatcttttaaaataatttttttttaaattaaaaacagagctggtgaccttcacaaagcaaactagggaatacgtcagtatcctggcacttgagcagaatttctagggcccgtgtgaattctctccagcccagagaatgacttaaagaaagaaaaaataaaagccctgtaatttacatctgttgttttagtcctcacctgttgttttagtcctcaccttatggaattgtcaatcacatattccttcctccctcaccataacagaaggcatgtgacgagactgtctaatcaaagtacctcatgcttcaagattggcccagaggcacattcatgactcaagtatagccaataacagtcatttatcaaaagtttatagggagctgagagagaatttctctcctgcagagagcatatgcccatggaccatgtaaaacacagttctgtcaggtggcatcttagtcattacatagaaaaagcctctcaagatactcaagttctctcttttagttacctctctttgaagtaaatttattttgcagctaaaagaattcccacctaaaactcctaggatcatttgattcctaaaaagatcatctgagtctaaagaaaaggtgaatgtgaaactggaaaattcatcacaattcaattataagttggatataacattaagatttggttccagattgatttgtgctttctaaaattacttgtgttgcagaatacgtttgacctcacactcacatttctttctggagaggtcactgaccaaactgagaataattatgtttccttcattactcagtcattcattcattcaaattagtacatgacaatttttcccatcttcctaaaaatcatttcacatgacctgctttatcacgttatctttattcaaataacaaccccaagtattgctcttaccctaaaacatttttcaaataattgtaacaggggaggaggaaaaggggagttgtggtttaatggctatagagtttcagttctgcaagatgaaaaagtgctggagatgtttcacaacaatgtgaaacagcttgaatgtggatatactcaacacactaaaccatgcacttaaaaatggttaagatggtaaattttatattatgtatttttaatacaataaaaaattgtaacagcacaaaacaataaaatatgttttaatactttatgatgttataggctgaattcagctgatgaagaaagatatattattggaaacacttactgaaaacttggaagggaagctgaatcccaggaccttaaatttgtcttggcacctaggcttctcaaaataaggacagatatttcatgtaacagatgacaaaagagttggagttcctggaagaaatctagggcagagagacaaaaaacattaaaatggtcggagcttgttaatttgacccctccccatgaccacatgaaatgtttggtgccagtcaattcttttgggagcaattcacaaagacatttcattacacatctgggtcaatgctgcagctcagaggagccattgagaagcaaggttgaaaaggtcccaaatgatgtttgtattaaaagagtttacaaggcactttcctattcataatctaactagtctccatggcaacataaaaatgggcattagcataagttccattttacagacaagataactaaggcccataaaatctaggcatgttatccaaagtcatacaagcaagaagagattagcctagtcctctaaatcaagatcccatactctttccacatacatttccacattgtcctcccctgacactgtgcaagaacctgaacctgcttccctagtgtcagctcaaaccacaaaacagctcatctaaattgtgtaaaatgtgagattagcacaagtaatatgagtatattagtccactccagcactgctatgttgaaacacatgagactgggtcattcacaaagaaaagaggtttaatttgctcatgtttcctcaggctgtagagaaagcatggctggggaggcctcaggtaatatacaaccatcggcaaaaggcaaagaagaagcaggcccatcttcacatggccagagctagaggaaggaggagggggtgtgctacatacttttaaacaagatctcgtgagaactcacaatcaggagaacagcaagggggtaatccaccccataatccaatcacctcctactaggcccctcttccaacattggggattataattcaacatgagatttgggcagggatacaaatccaaaccatatcactgagactgagcccctttttgagtgaagaagccaaaccatgattctattcatttttaaatccccagtgctaggttcctggtagttattcctaatatgtttgttgaatatataccatttcaatggtataaatttatatcacctctcatgtcaacctagtggaatataaaatggatcatatattaatttattgatggaattgaatgaattccaatttatctgattgtttccctgatgttatagggttttccaggctaggactttttccacatattatattttcccttaaagacattgtctatcaatgcaaataaaaaatacaatgagatactgtctcacactagccagaatagttattattaaaaatcaaaaaacaacagatgctgtgaaggctgcacagaaaagggaacacttatccactgttggtgggaatgtaaattagttcaagcactgtggaaaacagtttgaaaatttctcaaagaacttcagtcagaactacctttcgacccaccaatcctattaccgggtatatatcccatagcaaataaatcattctaccaaaaagacacttgcacttatatgtttattgcagcactcttcaaaatagcaaagacatgaaatcaacctaggtgcccatcaacagtggattgaataaagaaaaaaatgtgatatatatatatacatacacacacacacacacacacacacacacacacaccatggaatactatgcagccataaaaagaatgaaatcatgtcctttgaaacaacatggatgcaactggaggccattatcctaagtgaattaacgcaggcacaggaaacaaaatactgcatgctgtcacttctaaatgagagctaaacattgggtactcatggacataaagacagcaacaatagaccctgggaactactagagggggaagggagggagggaaaagggggctgaaaaactacctattgggtgctatgctcactctctgggtgacaggatcattcgtaccccaaacctcagcatcaggcaatatgcccaggtaacaaatccagcacatgtaccccttgaatctaaaataaaggttgaaattatatatttttaaaggcattttatatccttaaaactgctacagtagtgacattggagagcttattgatgtgaagtgcaattctcagaattagaccactgaaaatctgagttcagtaacctttattattcctaccattttaagcttaaaatctttgaaatgcattatgtcacttgaaagacattgaaatattcattttattctttttatttgcatgtaattattcaaatgaaagatgcttaaaacttggtctcctttggaaacttttgcagtagtaattcactgcctccaaataattcaaagtatgtggtttttgaggtgtgtggatggttgcgtttgtactctcttacgacatgagagcagtagctttttgttctcaattatgccaattgtaagaaacagtcacaaaaatgtagacaaagaaaagtagaagaggtgaccagcagtctccttaaggcagtatggcagaatgaaaaaaaatctagttcttgagctctggatttgtgatcttggaccaatcacttcacctctctttgctttatttacttcactgtaaaaaataaatggcaggatcacttcttaaagccacttaaggttctgaagaggtgccacagggatgaaaggagtgaacaaagccagagatgatgtggtccttccatcagctccagtcagaagaacttcaccttgacctatgttattaatgattgaacttttgagtaagatttaattcaaccaaaaagtattccatgcctaataatacttgaaaaccactgacctactatccttttatgattcaacattccttgcctctgatctcactctaaaaactacttgtctaaattttcccattatactattcataactgtaagaggtgtgcctaccattgcaaattcatgatgctgttgtgacctttcccactgagggtgtttaatagaattaaatagaataagttttaagctatttgccaggtgttttcacatttatgatctcatgtaattgacatatatttgctgaccttcatcaatttgtaccactaagctggctattttaagagttcaaaaggcatgtaaagaggtagtatggcatgagtaattctatacaaatttaaagcaaaacaatatggttattaaaaagagcttggggccaggctcggtggctcacgcctgtaatcctagcactttgggaggcttgaggtcaggagtttgagaccagcctgacaacatggtgaaaccctgtctctactaaaatacaaaacattagatgggcatagtggcacactcctgtaatcacagctacttgggaggctgaggcaggagaatcccttgagcccaggaggcagaggttgcagtgagccgaaattgtgccactgcactccagcctaggcgacag

SEQ ID NO: 93439 - DNA, 15262 bp, Homo sapiens
tcatcgcctgatgtgctaaaaaattaggtagcataattcctggaatgtacttttgtctgaagtaaattttaccatagaaaatggtcttaattttggttaacaaggaaagatgtatccaaattctttacctgcaccttagatcaaaaatgctgagatcaggaccaccctgaaagcaaactctgtggttcttcctacaaccgccacaggcttacttctcccacagtaaatgcagcctgtactttcttcaaggaaaccacttgaaaacaggaaaactgaaactgccaattaagatgaggcaagttgatcactggaagtagcaacagagttctttgtgaaatcaattttatcgtttgggagcatttccacctttagggtagaaaggagaagagttctcattttctgtgcgagagggtatctgcatgaaattcaagtagttcagagactctcgactgtgcagctgcaaatgatgactcacaagctggaacaagaacggcgagcatggttgtaacggccggggatctagcgtgcgcaaagacgacagccgctaggccatttacaggctgccattggcctcacaggtgtctattgttatgatttgtaggtttttgacattttaaaatcactgatcattttaaggatatatgtatgtgtatatatatatttgtaaacagataatcacacatgtatatacacatacatatatatagttatatatacacaaatatatgttctgtcactttgtttaaaccatggtttaaaaacacataaaatttaccatctttacttttttttttttttttttttgagaaggagtttcactctgtcactcaggctggagtgcaatgacacaatcttggctcgctgcaacccctgcctcctgggttcatgagattctcctgcctcagcctccagagtagctgggattacaggcgcctgccaccacgcccagcaaatttttttgcatttttagtagagacggggtttcaccatgttggccaggctggtctcgaactcctgacctcaggtgatccacccgcctcagcttcccaaagtgctgggattacaggcatgagccacctttaccatttttaactgtgcattcgtagcattcacattgttgtgcaagcaagctccagaacccttcgtcttgcagaactgaaagtctatacccgttaaacatcatgtccccattcctacctccctcagcccctggcatccgccattctacttcctgtttatacattcaactaccttagatccctcaggtgagtggaatcatgccacattcatccttttgtgatgggcttgttaaacttagcataacgtcttccaggtttatcacatcttgtggcatgggacaggctttccttcctttttaaggttgaataatattgcattgcatgtatgggccacattttgtttgtccattcatctgttgatggagatttgggttgcttccatgttgtagctactgagaataacgctgctgtgaacaggagtataagacatcctgttttcagtgtttctgggtctatacccagaagtggaattgctgctattttgatgttttctttgttttgagacggggttttgatcttgttgcccaggctggagtgcaatggtgcagtcttggctcactgccacctctgcctcccgcgttcaagggttcaagcaattatcctgcctcagcctcctgagtagctgggattacaggcacgtgccactatacccggctgattttgtatttttagtggagatggggtttctccatgttggtcaggctggtctcgaactcccaacctcaggtaattcgcctgtctctgcctcccaaagttcactctgggattataggcattagccaccgcgcccagccctattttgacttttaacactaacaaattatgtaagttttcaattgaagagacttggtgagaatgcagtcacacagaatactgtccaataaagaatgcagtagatgttactgacatttgttcttccttttctgtgtatgcatttcctcccgagtgtctctgatctcatgctttccttgggggcttgtcctagttgcagtgatactgcagagggattagaaacatgggcttcctgtccacgttgaagtcccgtctccagtgcttcctagctgtgtgaccttggaaagatccttaatctcacccagcctcagttttcttttatgaaattggaagaagcagtagtggctatctagggtggttgtgagggtgaaaacagataacctccataaacccacattacagtggcctggggaagtgctctgcaaagggggcttaggaaaagtagctgtggaagaagagacagcagcaacccctagagatctcagaaactgtagatgccaatcctgttcaatttcaatcataaatgttttagtcatacaccagggcatgtatatatattatgttctgtaagtctcactatcagtacttattctgaaaagcataagacatttgcatcacaattccaatagttaaaaatacccttgagttgatttgatgtgtgaacttttaattccatctttagtatcataattttagagttgatgtggatttttgaggtcagctaatctacctattattcaatcaccaaacctttattaagccccaataatataataataatagcttccagttatggctgctcactatatccgagtactttacatatattatctctaatcctcatatcaatgcttcgaggtagggattatccacattttacaaatgaagatgaggctcagtggtaatcaactggcccaaggccacaaacctagccacgttgttcagctgggtttgaacacagatccctcagctaccagtctgtctgtgttttcctttctgcacacacacccctattcgtgtgtgcacatgcgcctatgtctttgttttttcccatgcatctgcaccacttcatactgcctgtaccaggtactgtgttgtctatactaattaacattttatgtaaaatcaatctagtagaaggaatgtgagctaaaataacaatattaatcaagtctgaccaacatgcatgataccttttggatttgcgcacctgcttccatttactgtggtttctggaaggctaatgagaaaaacttttaggtgtttgaatggcgtctgtttccatcttgagccagcatagtaaataaatagcaaatcaaagaataaaaacaatgtagaaagggttaaagattcatctagaaccactaatcgctgacccgggcttgttcatgtttgcataccgatgcatagcctggtgcctggcacaaaactctggtaaaaatgtttgcctggagaaggtgtcagataacagacatcaaagctgactttttggatgttcttttcactccgtggctgtgtagycacatgttcatggtttgtcattgtgtggaatttttgatgctatatttgggcatatatctattaaatatgcttattgatgaattgtaatctggatggaatcttctaggatttatgatttgagactttgaagactaattctctcttggagcttcatcgttgcagtgacaacctgggtctgtctggcgcttctgagcatccgtgccgtctgtcctctctcaggggctttccttgtgggttgttgtctctgctcagatttcaaaatttgtagtagttcacaaaagcatcgttttaaggaaaaaatgaaacacctggaaatcacagaggcactttgggaagggcgataacactgtattttccaacttcttctgttctatttttattctttatattagttttttctcgagatgggtgtgaatagagcctggagcacacaccacaaaaatgtgtttgctctgttttaactctttcaacctacattcagccaaggagggacttcttcagtttgagattctccttgagaaagacgtggttgcagtgcctgggatctggaccacacaggaggtttggggtgtggggaggctggccccacctgactgctggcccggcactggcacggtcactcctgtgtagctctgctgccgcccctcccttccccctgggcttgtctctaccctagaagtaatgtcaagcatgaggcttcctcttcttgaggcttccccacaaagctcctagaagcaagttggaggtgtgggcggtgagggaagagcagacaagaggactctgtgtctctgttttgtgcaaagcatacgccaaaggcttagatcaaattaaagacccaacagcggccggaacatccctgctttccttttggtcatttagtaacactgagaagtggtgaagagcggtgaaattgggattaaaaacaaaaaacaaaaacaatcttccctttctcctttaccttcacttttcacgtcttccagctttaagcatctgcttctggatcaaacctgcagctaagcttagcctcccagggaactttaaggatatatattcagctcctggagcttctaaatgagggtagattgaataactgtttactgagaaggcacagtgggaagagcactgcctttcctgtggcatctcatttttgctcaccctgtcgcatgggtgacttcacagtggtggtattgctattctgcagctgatttagagagatccaagcatttgcccaagttcagatcaacaaacgtgggtgccaggcctatgatgggtgccggatgggttacagggaggaaggatcctgtcctccagacacctgcctacctatggagaaggaagagagccaatattcccttttctaggaaatataaattgcttatttgaataaaaaaatcatatgtttagccacattgctcactgattatcacagttgacatagtaagttgaggtccagctaattttcttttaaagtgtgaaataaatttaaagagactcaccagtatgatttcaagtaccttcagacttaaatgtgctggcctcatctttgcaaatggaacaaaaattcaattctgaatttgcctgcaaggcttaggtgtatctgactcctttctttgtggtcagaaggcttcctggggtgtgctgatttggatctacgaagattaaatacttgaggattaaatgagttcctgtttgcaaagtgcttagaactgtgctgacatatgccaaatcggtaacatcaatggttatttctggactcgtcttggggatcatggtccttgaaggcaaggactttgtcttttagccttccttggtcctggcacaggctggatattcgttgttcaaatactgtgagctcaatgaattgtgttgaggtgacagaggaaggagacagggcaccacatctcaccaggaagtccatggaaatgagtggtccagtccaggaatttcccgagaaattctgtgagacagtccagagcagagagaaccaagttgtgaatgctgctgtggccgtgacccatgggtccactgggttctgcctaaccacctacattggccgctgctgctattgatttgtctctccatcacagtagagaggggtagaaaatggtgctactccagttaaggtcacagataggtgtctgtttccacactgttcccagtgtgtgccgagataaattgggaataagcatttagaaactacgattgcaggccaggcatggtggctcacgcctgtgatcccagcactttgggaggccgaggcgggcggatcatgaagtcaggagtttgagaccagcctcatcaacatggtgaaacccggtctctaccaaagctacaaaaattagccaggcgtggtggcatgcgcctgtaatcccagctactcaggaggctgagacaggagaatcgcttgaaccagggaggcagaggttgcagtgagctgagatcgcaacactgcactgtagcctgggtgacagagtgagactccgtctcaaaaaaggaaagaaaaaaaaaaaaaagaaactccgattgcattcaacactgccttggcagcatgatccgtgggctcccctcattaactaggtacagaccagtttgcatggtcttggactctcatggtgagttaccaggagagccgcctatggtgtgagtgtgagctaatcatgcaaggtaggaccacattttcgttcctgacagattggtgatgtaaacaaaaacccaaaacctgattcttcaccgcaggtaggcgtagagaactgcctggaagaaacctagctgcagttgtcttgccaaagcaagacatgtcccgtgatkttataacaattgggtctagaatccctcatcagtgagaccaatattgccacctttaggttaacaagtgggctgaattctgtccaacccagtggtgctcatattagcaggggcagcagcctggtctgtcctgcctggaactcaactgccattgttggtggccataaggagggctgcatcccctgcgtttaggtgcctccccagtcggtctccctgatgctgagtgagagcctcaggatcttggcttgggaccctcgtagccacccacatacatcctgaggccaatttgttgcaatgctgccctgttttgacctcttgagatttgggtagcctattttgccattgaattagcttatttgttttgggtaagttattttgccattgacttagcttatttagccaatgggaagacatataagatgacctagccctggcttttcaaamcaaaattaagggccgtggagtttgggaaaggtgcatacctcatttggaagctgggctggttggaccaggaggctgcgtgcagtgcgcttgtcaggccgatccttctagaggagagcctgctgtaatctcttcggttcatgctgttccaaccagctttaatcatcaaaaccagtgctaatcatcaaaacttgaataatatacagactgcgaaaggaacatatttcttgccgaagcctcgatttgccaaagggaagcacctaagcttccccatctacccatctatggcaacatgttgtaaaaataagaagcacctggatggcttcatatgatgtggggaaactgcctttttctacgatgattctcagttttaaaatttcctctctttcccccaagaggagaaaaatgattttcatggaaagcgtgtttcagggaagtcgcttttttttctctgtataaggtcaccacctcacttgtgaccttgagggaggcttcctccctggccccaggtgtctgacaaggtctgctctagtggmccctgggtagaggtctggcagtgcgggggaaggtaggggaggatttgtgctctgagacctggaaggtacctgtgactgggacagagggaaggtcgcaggcagcygtggagaacctcgtcaggagagcagctcctgctgctgccttgatgggataaaggcacacaaacggccctcctgtggcaggggctccagccccagttctagatgagggctgtagtgatggcccctggcccttgcccctccccacaggctctccctcacatcactgagtgagcagggcttttcagagctacggccctgctcaggttttaaaatttaaagcttgattctgcagayaccacaataatgcgtttttgttaaggaggacctctgggggaggcagcaggggtggggtggtcactcactgactgtgaagtcacaatttgacagctgtaacwgtctgctgtttttattcctggtataccttcccgaatgcctggtctccggaaacattttttgatagctcaaatagacacctgggccaagtatagtctccttggtcccaggaaaatgggaggcagttgcccatcaggcccttattcctgtgctgggtgtgaccagtgctgagatggggttgggtggaggatgtgagacactgctgcctgggaactgagcatgcggcagtgaggagggtggggcttggctgtcaggccagcacagtggcaattaaaacgtgctttcaactcaacaaacaaacacctccattaaaaaatgggcaaaggacttgaatagacacctctccagagaaggtataccaatggccaataaggacacaaaaagatgctccacatcactaatcattggggaaatggaagtcaaaaccacaataagataccacttcacgtccattaacgtgactataaacaacaacagaaaataacaagtgttggtgaggatgtggagaaactgcaacccttatgcactgctcatgaaaatgcaaattgtgcaaccgctatggaaaacattatggccattcttcaaaaaattaaacatagaattatcatctgatccagcaattctgcttctgagcctatacccaaaaaaagtgaaagctgggacccaaacagatgttcatacactagtgttgctcatagcaaccacattcacaatagccaaaaggtagaagcaacccaagtgtccgtcagtgatgaatgaataaacaaaatacactagayacatacaatggaagatgattcagccttaaaaaggaaggaacttttgacacacgctatagcgtggatgaaccttgaagacgttatactaagtgaaataagccagtcacgaaaggaccattactggaggattccacttatatgaggtacctagagtagtatggattggattcacagacagaggtagaatggtagttgccaggggatgtggggagagagttatcgtttaatgcgcaaagagtttcagtttaagaaaatgaaatgctctggagatagatggtggagaaggtwgcaaaacaatatgcatgtaggttttgcagatgctgctgccgctgctgggatccccatmctgtcagccgtggtcaaccctgccgtgttcttcgacatcgctgtcgatagygagcccttgggccatgtctctttctagctgttttcagagaaggttccaaagacagcagaaaactttcatgctctgaactttcatgctttcatggagagaacggatttggttataagggttcctgctttcacagaaatattccagggttttatgtgtcagggtggtgacttcacataccataatgacactggtggcaagtccatctacagggagaaatttgatgatgagaacttcatcctaaagcatacaggccytggcatcttgtctatggcaaatgctggacccaacatgaatggctcccagtttttcatctgcactgccaagactgagtggttggatggcaagcatgtagtatttggcaaggtgaaagaaggcatgaagattatggaggccatggagcgctttgggtccaggagtggcaagactagcaagaagatcaccattgctgactgtggacarctccaataaattagacttgtgttttatcttcaccactcagccattcctttatagttcaggagagcatgcctgctccccatttgctcacagtatcctagaatctttgtgctgtcactgcatttccctttgggttccatgttttccttgttcccttccatgcctagctggattgcagagttaaatttatgattatgaaataaaaactaaatagcaaaatagtgtgcatgcacttaatgccactgaactgtacatttaaaaatgattaaaatggtaaatgttatggcatgtatgtttcatcacaataaaaaaatagatttccaaacatattccaaagtgattctcctagtaaattctttttaaaattcacctaggaaaaaaatgtgttttacaatttagcaactcttctagggcacttgccgtgttacccgctctgtgctgagcattgcattgcgtttatttattattattttatttgaggtgtgatcgttgagaagcaatacaatgaaatctacagcctcaagtgttcagttcactgagtttcaataattgtgaacctgtgtaactgcatgatgaacctgtgtaactttcatcaccccagaaagttccctcctgccctcttctggtcaacccccatcttctttccaaccactttctgatgtcagtcatcatgggtttatgcctgttctcgatgttcttgtagacagaaactcacagtgtrcactcttgtgtgccctgctggtcttgctcagcctgccgtctgctgttgacctgtgctgatgcgtgtccctggagttaactctactgctaactagtactccatcccatacagtttgtgcatccattctcctgtgggtggacattgagatggcactgtggtttggagaccgctgacagtgagtgaagatgtcagctgaccactggggagtgtccyggcagagtgagcttgccacacttcaagttttcggtgctgggggttttgcttttttggtgactcagcactagggacaggaagtggacagatggccttaacaggttgacgtccctgagctgtgatagctgccacacccttccccagctccgacggccacctgcagatgtgatcagatacccaagggggctagggtggaggtggaggagtagagcggcccctgccccaggcagggtttgggtggcctgtccccagcttggcctcttcctttctggattgaagccttgaggctggttgagatgctctttagccacattaaagccattagtctgggactgaagcaccacagcttttccatctttccagtgacttggctctctctgctgtgacccattcttgggtgagtttgtagcctctgagtccaacactgaggtcagtgtctcctcatttccccaatgctgggcagtatcttatctcatgacatggtgaggcctaatgcagagccatgcagctgggcaccgtggctcacacctgtaatcctagcactttgggaggccaaggtgggagcgttgcttgaaaccaggagttaataaaggtcaacttgggaaatataatagtgagaccccatctctacaaaaaaaaaaaatgttaaattagccagatgtagtggtacacgcctatagtcccagctacttgggaggcaggggcagaaggattaacctcctggttaagggtgcaatgagccaagattgcaccactgcgctccagcctgagtgctatagcaagatcttgtctctaagtggtatgggagggggaaagctacacctttgttgcaaatagatctgggctcaaacactagctggctacctggacatgatgcaatcataggcaagttaatctcttggagcgtagctacctcatatgatagcatcaagaatacctttgttgtcccatgtctgccttcataggcctgttggaggtgggagggtaattcctgccttccagtaacatggacaaatttatccgtgtgaaagccagtttcacctgaggtcagtttcctctgctgccccgtttctgggcagtacctcatgtcatgacatagataatgcaagttgagagtgtgtgggtgacaacttcaactgttgctctacagtagagacctgtggagacaggacagactgatcagggtgggctgtggtcactggggaacctcatgaagcagacagaatttgggggccctccaagagaaaaagtatttatgccggtttccctctctccattcagaaaccgtactctatacacccccggtccccaccctaagtccaccaggtcactgacagctaacaattgaccytcacctgggagaggtaagcttgcaaggcccagcttggacatgcacctgtgatttctaaaggacttcttctgaattcatctctgaatgaggttggcggcactgctatggtgtctgagcctatacaggagccgagggctatgtagtcatcagagcctcagtttagaggctcacatgacagagacatggagtgtggagcccatctcagcaagtcagggcctgacgcgttatgcccgctcacatgtaggcacaggagacctgggacagaggaagcgatctgctcctgcctgaagtagtgggaggggcaggaaggtgcattgctgagcagagggactatctgctggtccaaggagcctctgtccggctggactgaggctaccctcagcttccatctctcctcttcattctctagaaggctctgccaggttcagatcctgcctgtcctttgcagctttgtagggagcagtccccacatctctgaggattgcctgatgcaagttctcgaggtaactgcttcagggctgcgtgggagtccccagctgacttgaccatgtgctcctgtggaaaatgatcacctcaccttttatttatattctgttgttgattttcctctaaggatctaggccagtgctgggcacattttgcactttcaacagtcgaggggcagaaaaagagaattaccatacctgaggcttgccagtcaggggcagagccagaactggaatcccagcagcccagacgtgggaagagcatcgaggaccggcaggaggaggggatgggagggccgtctgggtgaggggtcatctaagagcccagtgctgtttcacactgtcccgggtggaaaatgcaaaccctgtggattttcaccctctcagtgttgactattgtcctatggaaataagggtgatttcctaaaatgtgtggctcaataaaggattccttcaccggggtgtgaaatgactgtgcatctgaatctgagccagaaaagataaactttgctccattttcccacacaccggattagaatctttccaggacactaacctagtgtgtgcttatctaggtccttgggcctaggggcccctggtgaaagcccaggccatgcaatccgagtcccagcgcccccatccttccccctctctcccgtgggtttgtatctccctggcatcccccagcagactgctctgcccagctgtgaactgaacagcctggcttgtcttggggcagaacctgtcctcacaggtgtgtttgggcactgcaggagggttggggaaaagtggtgtaaataaccctccttgcctttctgctgatgagaaaaccatgggaaaaatataaaacatttctatggatattgagaacaaagtttcttcagtgatttcactgtaagtttggttatttgagagaatagtttttaattaataaggaaacttaattaatacatgtgtgtccctgatttcttatatatgtgtgtgtatatatatgtacatatacatatgtatccctgatttctttaaatctatgtatgtgtatatatcttatatatcatatataatcttatatgtgtatgtatatatatcttatatgtatatatacatatagttttcactgtagacgtactatactatatatatagtgtacactataatgtcaagtatatgaaaacaaagaacatagataaaaaggctgaaaatgtgccataatattaacagtggtcatctttctaccataacattttctggtttttaaaataataagcgtatttttcatattgggaaagataaaaatttacctaacaaggcaaaagaattaactatcataggaaagttaattttgccatgcccgtccccatcccatagtgagcagtatgtgtttacgtccatgctgacattaagactgatgaaaacagaaaaaggacaggccgccatgtagaagaaatttttaaactaccagtttttaaaatgggaaaggaaccaaatggttttgtataatcccatataaaaatgtccctcataatgaatctcagactcaccttaaaggaataattctcaggattctcttccatgctggggctccagtaagagtcaagatttggggctttcttaaagcaggcttcaaaccttaaaagcataccttattgaatgccagtgccagcattctcaaataactgtgcccccaagtggtcacatgtacctgtaaattacatgcagcaaaaaggtgcaattaaccaggtcctggactgcagagtttgcaatttattaataataatgatgatgaaaacaataatacatccaaaagagaaaagaaaggggaagatgaaacccaaagagagagagagagagagtgtgtgtgtgtgtgtgtgtgtgtgtgtgtgtgtgtgtgtgcaggcgcaaaagacagggaagaattttctcagtgtttatttttgccatgcctctcccagaaaaagagcgtgtgtgcgtgtgtgtgcatatgtgtttgcatttgaggagggaggcctggccagaagaggtggggggtagctgtgggcagagccctcccaagaattctggagactttgcatcctttctcaggagcaatcctcgatgcctttgactgcctacttctctgcagcggtggttccatgatagtctccttggcagcctgccagaggctgtaagtgtacagagaattgtgttttaatagaaggctttacctctgatacagatttaaaatgaggaagaaactttctgttcctcagccagaacgaaatgcgttttgcttcctgtgaaatgctggtgattacaagctcatcttacataattttattattttcaattgctgcccgtcaatctcaggtgatggttccctgggagcagaaaaagaggcagattctgggcgatgactattaaaaaaaaaaatcactcagtcattagcaaatcgtacaaaartttagaaaggagaataattatctttgtgatgatgctgtttaagataatcagaacttgcattgctaagttagacacgccgaagtgaattgaggactgtttaatggcctcttagaaaatgtatttttgctttaacaaagcattgatgtttgagatttaaaaaaaagaaatcctttaaatctcgtgaaggaattctctggaataaccacattttcagaaatccgtgacatgatcgaggtggtccactgtcacgcccacaagagggcattttctcatcaactactgtaaaaacgatttgttttctaaagggaagctgagaggcctgggggaaggagagtgttctgcagagcaggaagtggagagctgcttgcaattgagttgtatgtatgcttccacttaatacgtcctgccgagcctgtaagccaacacttccggccaggaatctgccctctgtgtttacctactctctttttatgtcttattcccagaatgactggggaccaaaggaatcctttgcaggagttttctccagacagacagttccacatgctagtatattgtcgaccccatccataacttccatgaaacttgaatctcatattttaagacaccttctctaggtccaagttctttcctttatgtatgttacacatatttgttgagtacctactgtgtgtcagcttgagccagactcagatcctgtcctcgtggaacacacatcctccacaggaagacttggcataaaaaaggagaacaaatactggagtatgatttagataattataaatgttataaggaaaaataactgggataag

SEQ ID NO: 93440 - DNA, 19625 bp, Homo sapiens
gacagagaaagactctgtctgaaaaaaaaaaaaaagaaagaaagaaaagaaagcaaaagaagttgttggttggcagattaactattactggttttgctctattgcatttttagcagggcattattatgaattgatggaattatttagaaatacattaatttggccaatatgtattgagattcattatgacatctagcagggccagagataaacatgggccctcccctctgggagcttgcagtctagtgggataaagagatgaactttttgtatgtgctacataacctgctgtgtgccaggcatcatgccagccatgggcactgccatcaacatcaacaataataataatagcaaacattattgaaccctgattatgcgccaggcactgtactaagccctttacatgggcaaactcatttcatcttcattacagcttcatgagggagatgtcactactattttaaggataaggcatctgaggtttgaggaggttgagtatctcaccaatgaccatatggtaagtaggtaacaaaatgaggatttgcactcaggtctgtttgccctgtcacacttacacacacaattgtgacacatgtcagagagtgagccggtcagatgggagacaaagacaaaattataaggggtgccaggagagggagagtctctgcccaaggggccttcaaggaagggctcctgatgggggtgccactgagctgaagagcaggcctccagacagaggggccaagtcagacagggtctgtttgggtgattgctcctgcagttttggtgctgggtcaagacatgcctgatacaaataagttgctattggaagctgtgagtgtagacatcaggctgtgcatccaacaagcccgggtatgactcccttcttccccgtttactaattgtgttgaccatggagaagccaaccaaattttctgagccgtggttgcctcatttgtaaaatggatataaccgtgatatttatgcctcctggagatgttctaaggatttaatcagacataggggtaaaatgggccaggcgtggtggctcacgcctgtaatcccaacactttgggaggccaaggtggcagattgcccgagctcaggagttctggaccagcctagacaacatgtgaaaccccgtctctactaaaatacaaaaaaaaaaaaaaaaaatagctgggcgtgctggtgtgcacctgtagtcccagctactcaggaggctgaggcatgagaattgcttgaacctgggaggcagaggttgcactgagccgagctcaagccactgcactccatcctaagcgacagagcaagactgtgtcttaaaaaagaaagaaagaaagaaagaaaaagacatgggtgtaaagtagttaatattgtccctggcacatggcaagggctccataaatgttactgatgatgtggatggtgatgatagtagtagccacactctaattctgaggactcctcataaaaacagagtcccaccttcctgatccctgctggcctccactctgctaggcttaggcactgaaaaaatgaacaagtggtgtgctctgggcccaaggagaaggggctctcaaagaccaaagatttgcatcctacacagtggcgagagtggggagtctttcagaaccagaggcagcagcagtaggatgagggttctctccttacgatggatgaggggagcagtaaggtccccagagtcaacatgggagagaaagtgagtaaataagtgttgagggatgggctggaagctttcgatgacattgctcagtgtcccttcataacagccccatgggatgctattatgatttctgtcttatggataaagaaatgtataagtaactcaccaaggtcatgtagctgagaagagcctgggcagattcctagtcaaggccttcctgactgcaaagccaccctcacagtccagcctgtctgggctgagctgggctaagggtgcaggggtgggctcaggagtccaccaggtggactgtctctggacagatgtctctggaatctgtctcttcctctcccacccactgccctagtctgggctattataggagtctcctttccggcctctctcgccatcctcctcctccaatctgagctctcacttcagacaaagaaacacagtggaccagtcctctcctggtgtagaaccctcttttgcccacaggcctgcttctcacatgagcagtgtctgcctaggggcatgcagcagaggagaaggctgcctccctgtggtgccaattatactttcaagttacgacaagtccatgctacagagtgggacgcaaagtgtccagggattgtgctcagagcaggagtttgtgtgtgttggggggaagagaggggcagagaggagtatcgttcctcatcagaaaggtttcaatggccacaaagatggagataaactcagagatttgtccagcagaccctgctgcacctggcttctgatggctgtccagttgtgtgtccatgacacctgggggtgctctatgctccagccagaactatctctagccatcttccttatcagaagcaatttattgcctctctgaccagaatgtctttccatcccatttttggcttgggaagctcctatgtattccttaaggtcaattccaagtacccctcctctgagaagccctccctgatcccacctcatggctgaatgtcacgtcctttcccaaccccccaatctgcagtgtgttcgctcggcaccttgcacttccctcctcacagcttcttaccacagggcactgtgtcaccgctttcagaggcagcctctccaggaggccgtgagctcatgaggttggggagttcatcattaactctgccttcatttgcttattcaacacacattcagagcccctcctgatgccaggcaaggggctctggatgcaaggacgattcagtgtgtcctcagaggagcccatgatctgagggaagacaaaccatccattcatttattgattgctatattaaaacaacacataaaccaaaaagcaaaaccctgtgataagccccaacaccgggccaggccctctgctcagggatgaggatagagaaaaaagcaaaaccttttcttgccctcaaggagatcctattctggctaagggaaattgctaagtgcgtggtgtgtccccagagctgtggggcaccaaggcaggtgtggagtcctcttcttgctttatttctttgtgataaccaattaataaatgagggaatgaatagatttttttctgtgtgggtttttttgtttttgtttttattgcagggggtggagtggtgcgtcatggggctttaaccatgaataagctctgtaaactaagtcattcaataaattctgatcaattgattgactgaaatatcgcacaggaagtcactagcagcaacagggctagattctgggtttccacgaccttgggatctccaccaccctggactctctcaatggggagcaaatctactctgtgactgtcttgataggactctgcagcctggagctacagagcctcctgcaatctcacagtaaaatgcagcattcttggcctgcctcccaagggggttgtgagcattaattagttaccattggtaaagtgctctgaagatgtgggggtgtataaacacggcaagtcattaggcctctccacaccactatgctctacagcctagggactgctaattgagaaataattaacacctcagggtgctgaggacagctgcctggcttttccaggatcggaagggatgtaacaacgtgcacaggaacagggagaaattaaaggctactttggatatgtagatccaagaaattctgaagtttatttgccccctgcccccaaagaggaggagtgagaaatatcagtccagcgaaacctctgggactgcactccttggggaaagcctctaccacagctctgggctgtaaaggctgagcaaggctcttagagacaaaagagctcaggtccaccccagccctgcctggcctcctagctggtaggcaaatgcagtcgtgtgctccacccaagctgtgttttcttcaactgtaagaccaggataataacatggcatctacccctgccgcctccaccactaggttgtccagtgcctttcctctagggctgcagatctaaccccggtgcacattagaatttcctggggaactataaaataataatgtctgcacaaccagcatcttgggacagagggtggcagtgggtgcatatagtgactctaatgcagtcaaggttgagaatcactgctctggcctgtgtgccaagctctgtgtgaggagctgggagaaataaagatgtaaaccacaccacaccccatgcttccctcacactggctcatcatttcctgagctgtgcctttgaatgtcctggtccctctgcctgaacattggcactccactcccactgccattcttgtctgggtagaccccattcatccttcaggtccagctcaaaggtaacctcctcagtgaagccttcttttcccacgctcccgcaggggtttgctcagcccctatcacaccactgatcacacggagttgttcctggaagatcctgtcgtactgagagcttcttggggccagtatcggaatcaccagtgtcttgcattgggtctggtatgttttaggcattcaataactgtagttgttatcaggttgagttatataacatgcagttcccacttcaggacatttgcatttcttgtttcctgtgtctggaaatttcttcccctgcaaggctctgtctctcacccccttctggtctttgctaaaaacgccacctacttgatgaggtttttcctgatcctcctattttaaattgcaaacacttggctgggcgcggtggctcacacctataatcccaacagtttgggaggccgaggtgggtgtatcaccacctgaggtcaggagttcaagactagcctagccaatatggtgaaaccccatctctactaaaaatacaaaaagtagtcggacgtggtgggcacctgtaatcccagctactcgggaggttgaggcagaagaattgcttaaacccgggagaaggaggttgcagtgagccgagaacgcgccattgtactccagcctgggcgacaagagcaaaactccgtctcaaaaaaacaaagaaaaaaattgcaaacacttaactcccccactccattctccttctctaattttttctttatagcccttatcaccatctgactgacagattcttttaaattttgatattttgtttgccatggattttttgcattttgtttttttaaaaaaacaattgtattaaaatactgtttatcttggttactgagttctttgctcccattccctgccctgcttaaatttcgctctattggtttattgactgtgtcctctctagaacacaagctacactgaacgcagttaattttgtctgtttggttcacttcactgtccccagtgtctacagcagtggcttctacgtggtagcagctcaaaaaatattttgtgaatggaagtttgaatctgtgtcttaaagactgtcttgggcactgtaataaaggcgtctttctcaaactgtttcacaattttatactatttaaatggaaagcccgtaaaaatcataggatagattagaaactacactgcccagtgtgtcgtcatggttacactgtcgccagtggttctcctattgggggagtgggcggggcctggcaggggcaggaacagcaccctcaaatcatcatagagttatacctcccaagttcctagaaagtacttccggaacggtgatttactcaaggctgccctggccaatcaacgatcttggggaaagccgggtactcgctctttggctacacttccggaaaacctctcacgcgcgcctagcgtggggcggggccagagcgcccctgccctcggccccgcctccgtgagcgcggctttgcaattggcgagaagggcaggaggcggggcttaggagcgggcttgctcgaggcgcaagcgcgctggcccggcacggcggtggtcttgcgggaggcgtgggctgggattgcggtaggtgaacgtgggtgactcccagacctgagggacgggcgcgggcagcgaaatgaagcgagcacgcggtgtgggcgcggagacctaggaccctggtgtccgttttcccacttgcatcccgtccttgagttggggcgggcgagaatcccataaacttttcgatactcctggtctccgtgtcctccgttgtaaaatgagggcagcacttcctggtctctccctcggtcgtcgtgagagtcacacagttctcgaagtgccagctctggaaaggccctgggaccacctgctgcctgagccarccttcccgttttatgttggagaaaacggaggtccggggcgaagtgagtggtccagggtcaccgagcgagtgaaggccgagcttgttcttagaactaggcctagggttccattgctgtttaatgtagcacagttcgtgatggaaactgtaggatttggaggcggggaccttgccttccaggcccgaccctgcgcttatttgctgtgtggcttgacacaagtgactttatatttcagagcctcccttttctgagttgggcataataataataataatagcactttgtgagacttaatattatgtatcaggtacsgttgtaaacgctttaggtacaacttttctgattagattggggggcaatggtgagtcaaagaatctttaaaaaggcctgggctggaagggctgacagtgtcccgacagagtaggtactcaaaaaaatcgactgaatgtctcagaggctgtttgccagagcctgaagtgtygcatacgttagttactgtattgctcctgaaaaactgagataattctacttattctcctgtttgtataagctgaggggtctgaggacagacatgctaaacgtggaggagaagagtttaaagctctcgtttaaattatccagataattatatcattgcacctgtttgctttgctcttaatttattaacatatttgatcaacagataataatagcctaaatagtaggcattatgcgagactctgaaatttaaagatgtataaaacttcataaacttgtaatttcatcaaggaatagaatgttaaacatcgacactgacctcccctcctggcccccgtacacacccccagaaagaaaaaaaattgtatgtgaaacaccattcgcttccaatgcctggcacacaatagttcctcaaaaatatttttggagatgattctaatacagtatactaaaaagaggtgtgtgcagtggagcacagaggaggtgactttctctgtttagaggggttggagaaagtttcttggagtaagtgaaccttgaattccagttggaattgctgggggttggggggaggtcagtctgtttcaagaataatgagcaacttggggaatgctaggataagaagctggaagaggtgtgttgggatcaaaatgtgaagagctttggtgccattctgagaaaattatgagagccagccgttaatggattgtaaacaggggagtgattgggtcagctatctttttagctggagactaatacggagactggactgacagggttcaagaattactccattcattcattgatagaacatgtattgagcctgggcacagtggctcacacctataatcccagcaatttgggaagctgaggcaggtggatcgcatgaggccaggagttcaagaccagcctgggcaacatagcaagactccatctctattttttaagaaagaaaaaaaggaacatgttattgagtgtccactgtgtccaggcactgtgctgaatgctgcagataaaacttggaataaaatagacatagctgtcgtcttcatggagtttaagacattagtcattggtggtasacagctagacccctgcagtggttctcccagtggggtccctggaccagcagcatctgtgtcacctgggaacttgttagaaatacaggttctctgcccacaccccaaacttactaaatsagaagctctggagatgggcctctgcaatcwctgttttaacaaacccaaccgggcatggtggctcacgcctgtaatcccagcactttgggaggccgtggcgggctgatcacttgaggtcaaggagtttgagaccagcctggccaacatggtgaaactctgtctgtactaaaaataygaaaaatagttgggcatggtggcacatgcctgtaattccagctactcaggaggctgaggcaagagaatctcttgaggctgggggtacggaggttgcagtgatctgacattgcaccactgcactccagcctgggtgatagagtgaactctgtctctaaaaaaaaaaaaaaaaaaacaagccctccagcgattctgatgctcaattagatttcagaaccactgggtaactgtaatgtagcaagtggtattgaggggctaacctaatgttgaggcagtaagggccagaaaggagggggtggacttaagggaaaccttgagacagactcatttgctttaggaggaatcaaggatgagtttctggctggagccactgccctaagtaaggttggatcacaaggaagttawagagccaggggtgaatccacatgtgccttgcctccatggcccgtacgttcctacaacaccacactagggctctgtggcagtgcctgaccacctttaaacatttgtacagtgcacaggggaaatgaatgaggctgcttgaggttggaggggacaagctggaggacctgaggctgctagaggtaaccagctgggagatcccagctccctagagctgaggggaatcagyaacccatacccagcatactgccgggagctttgttgcatggactgtgctgaaaagtagagrtactcactaaatttggcaatacaaataaaaagtctcaaaagaatttatagcctttgattcagtaattccattcttcaacgcctctcccaaatatataacaaaaaaagccttctcttcattgtagattatgtataacagagaaaaccaactactgatttttgatgtaatcagtggaatgtcgtactgccattagaaatgtgtgattattttgtaaaatcagagaaacatacttgcctattggacaatgtctagtaagcccctgtcatgtgctgaagatacagtggtgagcaagctagacaggtccttgcttgcactgagccaagtgtcagggagaagacagacagccaaatgggcaggaaccctaggagacaagtgggctatgcgggaaaagccagccctttgggggtatggggagtgggacaagaaaggcttcctggggagaggatggtaatcctgaggcctagaggacggctagatgttggcaggaaaaggggagaggggtgttctgtgcaaaagggacagtatgtttaagaatgggcatggggccgggcgcartggctcacacctgtaatcccagcactttgggaggccgaggcagttggatcacgaggtcaggaggtcgagaccatcctggctaacacggtgaaaccccgtctctactaaagatacaaaaaaattagcgggcatggtggcgggygcctgtagtcccagttactcgggaggctgaggcaggagaatggcgtgaacccgggaggcagagcttgcagtgagcccagatcgcgccactacaktccagcctgggtgacagagcgagactccgtctcaaaaaaaaaaaagagtgggcgtggcraagcctgatcagagagggggcagtggtgagatgaggcccaagggggtcagcttatgtggggctgtgcacaccctgaaagtcagaagcttagaccttattctaagggtagcaggaggccgttataaccaagaaaagctgttagcatctgtgcttggraagtctcccctgtggctgcagtatagagaatggattgaaggagggcaggagtggaagtcaggagaccagtggggaggctgttgcaaccatccaggtgagagatgagggtggcctggacctgggcggaggctgtagagagaagagggacagattgaacagcaagtgaagaggtaggaatgacagggccaagagggctgtgaacgtgggacacagagaggagcagagcaggcgaaccccacattctggtttgggcaaagtgcaacttttggtgctattcacaatgacaggcagtgctggagggggagtaggtttgcggggagaatgctgagttcattctgggacacagagttttgaagtacctacctgatgtattctccaggaggcaggtggagattttgagtcagctctcagcatgcaggctgtccagggagtgtgtgctgtraagagggaagaggcccatgacatttaaatattgggggcaggtagaggaacaagagagggatgtgcaaaggacagggtttgcaagagacagatggcaacaaaacgtcagctgcagttgactccaggctgagggattacagttgattttcttttcctttttttttttctttgagacagagtctcactgtgttacccaggctggaatgcagtggcgtagtctcagctcactgcaacctccacctcccaggttcaagtgattctcctgcctcagcctcccaagtagctgggattacaggcgtgtcaccatgcccagctaatttttgtrtttttagtagagacagggtttcgccatgttggtcaggctggtctcaaactcctgacctcaggtgatctgcccatcttggcctcccaaaatgctggaatcacagacataagccaccatgcccagccttcttttcttttttgttttcagatttcccccctagttttctataataataatagcagacattagttgagctcatagtacatgccagatactgttccaagaacttttataactcttctaagtgtccacaataagcctagaaggtaggttctgttgttattaccattttacagatgaagaaacagcacagaggggttaagacacatgtccccagctacacagggtgcagccattgggaggcctgactggaatccaggctgcctgattccagagcctgtgcactcactacatgacgctgtctctccacagratgttgttartgtttttataatcaggaaaatattgatttttcaaaaacggaagtaagaggttagagaaatagtgctttgatctgctaggatattagaaatggaaggatttgtatctgcaaaatcagtggctgccttcgaagtttgttgagagcaggctgggttggctgcttcatggtgttggaacacggatgaggctcattctcacacaactcatttttcctcaggtgcctgtgcttcccggtgccagggtgtcatggaagggctgctgacaagatgcagagcattgcccgccctggccacctgcagccgccagctctctgggtatgttccttgcagktttcaccactgtgccccaagaagagggcggcgcctgctgctgtctcgtgtgttccagccacagaaccttcgggaagaccgggtgctctccctgcaggacaaatctgatgacctgacctgtaagagccagcggctgatgctgcaggtgggcctgatctacccagcaagccccggctgttaccacctcctgccatataccgtccgtgccatggagaagctcgtgcgagtgatagaccaggagatgcaggccatcgggggccagaaagtcaacatgcccagcctcagcccggcagagctctggcaagccaccaaccggtgggacttgatgggcaaagagctgctaagacttagagacaggcatggcaaggaatactgcttaggaccaactcacgaggaagccattacggccttaattgcctcccagaagaaactgtcctacaagcagcttcccttcctgctgtaccaagtgacaaggaagtttcgggatgagcccaggccccgctttggtcttctccgtggccgagagttttacatgaaggatatgtacacctttgactcctccccagaggctgcccagcagacctacagcctggtgtgtgatgcctactgcagcctgttcarcaagctagggctgccatttgtcaaggtccaggccgatgtgggcaccatcgggggcacagtgtctcatgagttccagctcccagtggatattggagaggaccggcttgccatctgtccccgctgcagcttctcagccaacatggagacactagacttgtcacaaatgaactgccctgcttgccagggcccattgactaaaaccaaaggcattgaggtggggcacacattttacctgggtaccaagtactcatccattttcaatgcccagtttaccaatgtctgtggcaaaccaaccctggctgaaatggggtgctatggcttgggtgtgacacggatcttggctgctgccattgaagtcctctctacagaagactgtgtccgctggcscagcctactggccccttaccaagcctgcctcatcccccctaagaagggcagtaaggagcaggcggcctccgagctcatagggcagctgtacgaccacatcacagaggcagtgcctcagcttcacggggaggtgctcctggacgacaggacccatctgaccatcggaaacagactgaaagatgccaacaagtttggctacccctttgtgataatcgctggcaagagggccctggaggaccctgcacattttgaggtttggtgtcagaacactggtgaggtggccttcctcaccaaagatggagtcatggatttactgaccccagtgcagactgtctaaatgcccccagcccacccctgcccccatttgcagccttggtgttcgttctaacactgcattttcctacacccctttcctggactgctctctccagaaacagcacagctcatggagggtgagatcatgttagggaaatcaatttttatctagtcatttgttcagattatttgtatttaaagtcattaacttgatccctttctccagactggccatgcrrccatatacctttccttttgtattccattgtggaagcttctaggaggctgagaagcaggagatccaagctccagtcctgggtgttaccctgaggggggaagtcacttcccttctctcagctgagtttttcacgtgtaagatgagaatggctgatggctgagagcccaccaaccttccccaccccgtatcagtttgaccacgggccttttgctacattctatccagagagcaggcctgccagcccctctccactgagaagttgggctgagagtatggggaaaagaatcaagagacctgactgccgccaactcactagtgacttagatacatcccctccccctgctggggcctcagtttccccatctgtaacttgagaaaatagaactagatctgtaaagtctggaactagatctgtaacgtccttataggtgtcactagggggttccatgagaggtgtgtgacaggcagtctgattcctctcattctccatagtctgtttcctggaaagtcgatgtaattaactgatggcccaaaaactacctcaagagacctggccctgttaagacggcttaaccactgagatcccgttctattgatttaataaagtcaaactattggaatgggccttgcacattaatttgaaacaatgataacatctgccattttaacagtgcaacagctttctactccttttctttcctttttgactgttcccacacacccacccctaacataaaaaatcaggtggttaggaaaatgtggtttaaaccatttcttcccccaagtatcggggcagcaggcttcaactgccacggtgaccttatcgtaggtacagagttggatcctagagccaagatggggtgaatattaagagctggtctcttgtgtccttaatgtagaagctggttttaaagaaaaaaaaaagctactctctgcctgaattgtatggaaagatggagcaagcttgaactaccctagcaatgccaactactttcattgctcctgcatcttagataaggaacataaccaagttttccatccttggccccctagggtctctacatgtccatatctgacaagaatctgtgaagaccaagctcaaagccagcacctcctaaaaagctgcctggcagctctgaatagtggttttccttctgcctcccacagcacagatcacatcccttcttgttttgtgcatacacagctcattgtacagtggtcctgcctcttgttgatggtgagctccctgaggccaggcccctgagctaattcccagtgcactgcagttcttattttggccagtggttccacctgctaaacagcctccaggtagcttattactggtagagcaaccctgcctgcctctacatagcatcaggcttcctgtttttgtttttgtttttgttttttgagacagagttttgctcttgttgcccaggctggagtgcaatggcgcagtctcggctcaccacaacctctgcctcccaggttcaagcgatactcctgcctcagcctcccgagtagctgggattacaggcatgcgccaccacacctggctaattttgtatttttagtagagacagggtttctccgtgttggtcaggctggtctccaactcccgacctcaggtgatctgcctgcctaggcctcccaaagtggtgggattacaggcttgagccaccatgcccggacagcatcaggttttctaatgaatgcgtagccaagccctaccagctcccagccctgccattggagctccaggcccaggattcctttggaatacttcagattttcaggctaggagacatgcattctgagagcaaacctagtaaggctagattacaaggcagaggatcttacccttgcacattggaatcacctgggtcccatccagagggtctggttacatgtagggtgtggcctgggcattgggaagtttaaagcttcccagctgattgtaatgtgcagtcaaagtcaattgagagcacctggtgcaagagctgcctcctctgggtccactttgtagctgggcatttcttttagtaatttcagttgttcattatcagactgatgtgcgcactctgcttttaatgggctggccatttatttgttgaggatctgccatatgccactgtggtgtgaggcactttaaaaaaaaaatttttttaaatagtggcacggcactttttgttttctttaatcagaaaaataagccctgcgcttctgggatggaggccccaggtgagtaccggaggaaggggctggggtgggtggggagcgagggggcctagaggccaaagcagatgctgcatcagaggctggtcaggacccgggagggcctgcgggggtggggtcctcgtgagcaagtgtggggggctggaggtcagcagctgcctggcctgggagccagggacacccatccccttcctgacacctgaggcggcccagctgggcaagaccaggcctgcaggaccagggccttctgtcgctcggcgcaggggtccaggtggtcaacgctgctctctggaggaccactggctagagcctgcccagcttccctgaggtctggagacagagcccccctcaaacaccccctcccttttgggctagtggcgtgcctcggactccagaagactcgagtggggctgcctcgagaccaggtcctgagggggtggcaacccctgaccacaggtgggggccgtggaaggggcagggatgggcccaggggtagccttgtagtgtgaggtgtgcccgactgcatgtagctcaacagccagacgggacgctgcaggggactgtggggaagccgggagaaggtgctgcccaccctgtggggtccccctcgcctggagaccctgcgggcaacccttcagtgcatgcccacaggggtggtggaggcagagtcctgagaggtgagggtgggagcctccgggtcccctgcaggtcctgacccaccggatgggtccgtgtgccccctgtagcttgggggccctggaggtggacaccagcacctcctgactaccgggggagggcctggactgaaacccacaccttcaccattcgccactgggccattctgcaggaactgcagcaccccacagatccttcatgcccagcacgccactcactctcacaccctctctcgcacgcacacacacacagcacgcacacaccaggttcacgcgctccgcacaggtggcacgccgggggcaagcatgcacgtagactcagagatgcagggacagtattggcaattcagaggcacagaaagaagctgaggggcccccagcaaggtccccgccctcgggggctgtgttccccagggcacgcacaccacaggcagcaacgcgggtgggggcactgtgacgccagtcgggggagagggagcatagcggggcggcaggcagatgcgggttcatctctcctgttgtggtgagcctcagcctgatcacggcactgtaggggctcccgcctctggccaagcctcaatttccaacgacaaacagcccagccctgtctagacaaggcctcaggctagtctggcaaagcatctccagcccaaagggcaaggcagccttggcccttgaggccctgccagggtgcagatcacactggagtgggctggaaaacccatatggggtggtgcctgcaggcatcagaaaaaatttttatttacttttattttttagggatggggcctcgctatgttgctcaggcaacaggtttcgaactcctgggctcaagcaatcctgcctcagcctcctgagtagcttgggactacaggtgtgcaccacccatggtggctaatttttttttttttttttttaagagacaggctctcgctcactttgttgcccaggctggtctccaactcctgacttcaagcgatcctcctgcctcggcctcccaaagtgctgggattacaggtgtgagccaccgcacctggccactgttaggcacttctatataccattttcagatttcacaattgtgcaaggcagatgctgttatctcattttacagatgaggaagcatgaggatctatttcagcaacttacccaaggatgcacagctattatgatcacagctagattgcaggcactggccaaaaactgtccttctcactacactgcttagcctctgcaaaagtgatttcaataaataaaactaaattatgtatatctctctaaccaagttagcctaaagtatgcgagaaattaggattcatgcaaatgggtgctttaaatgtatatatattttttaagagacagcgtttttacctgggagcagtggctcaagcctgatatcccagcactttgggaggctgaggccggcagatcacttgagcccaagagttcaagaccagcctggacaacataacccgggcatggtggcacacacctgtagtcccagctacttgggaggctgaggtgggaggatcgcttgagcccaggaggtggaggttgcagtgagctgagatggcaccactccactccagcctgggcgacagagccagaccctgcctcaaaaaataaagagaggcggagttcttgctatgttgttcaggctggacttaacccctgggcttaagcaatccttcaaattcagcctcccaagtagtgtgccactttggctaaaaaatttttatttttattttttggccaaataattttttaactttaaatatatgccccataagcttgcttgtttatgggaggttagcctaatgtaagcacttttaaaaaccagattccaggaatagagagccagttaattttacttttgattaatgttcaaggcctagactgacttgaggatgatatagaatcctggagctttagagtttaggtaaacttgaagctggccttggctctcagctgggaagtgggcctggagcaggaatgaacctgccacatgtcatctgactcgcaagacacccgaggacaggacaggcgccactcctctctggttggtcctgctgagtgaagagaagactggctggatcaacctttgagctgccaaagctgtgtaagttcatgaaacaggtgcccattctctttattttacaatagggagagaaatacagggaggacatcaatttgcccaaggtcaggctgaatgaaacccaagtgtcctgatcaggaagccagtgtttcttctagtagccaggggcagtgtgatttggcgaaaagatcagagccttgaagagacataatcctagattcacttactggggatgtgacctcagacaaattacttgccctgtgtgcctctcagattctccgttggtgggacactcgtgctaatggtacccaccttgtaagtggtttgggggttgaccaagctcacttatatgaaatgcttaattaccccttagtctgcactcagagacacttcccttacaccagacgacttaggaaatccccccactgggagctcaggttctgccgttaactttgttatctcaagacctggatcttgttttcttgataagatgcttgacaactttcctgggaaatgccacaggcaagaattaggaggcacctgcagaatagctgtatctccttagagaaaagacagaaatactcaaactgtgtaccttactgtctcatttctgaacttgccaattttacctcttgccataaattgatgaaatgggatgctggcaaaatagcaggtacaggctgtattatcattgctcattccttggggagatctagcagtgactgcctgggaaatatttagcagaattaatacttggggacaaaggctggtgcataacaaaaccattgtgtaaatcaggcttagaatgtaaatcaaggcctccgttaatattctgtgttttaatggaagaaacacctgctgggctatccataaaggagctttgcagaaatctgttgaaattgtcatttccttaactacttgagtgccaggtctccagagttcccatgatccgtttccacaccaagatgcatgagtgctttttagaatgggttgttacgcatccaagggcatgtgaggcttgttttagagttaggaaaaggatttttaagtttccttataacgtggaaaatgggaaaatatttttatgatgttattgcaaacttaagtaacacctgaaaaaagtcaaggtattttgcttaatttaaaataatgaggctgggcgcacgcctgtaatcctagagtttgagaccagcctgggccacatggcaaaaccccgtgtctacgaaaaatacaaaaattagctgggcgtggtggcgggcacatgtagtaccagctgtttgggaggctgaggtgggaggatggcttgagcccaggaggcagaggttgcagtgagccaagatcctgctactgtattccaacctgggcaacagagagagaccctgtctcaaaaataaaattagaataaaaggcttatagtgaccccagctacagactctggagtcagactgtctgggccactcactatctccgtgacatttgtgcaaggtacttcctcatagtccctccacttcagctttcttatctgcaaaatggggataacagtgcctggcccacagcagaggcttggcaagtggagctgcctgtatattaagtggtactttgcacagaaggtaggtg

SEQ ID NO: 93441 - DNA, 13307 bp, Homo sapiens
aagagagccctcgctagaacctgatcttgctggcaccctgaccttggacttccagcctccagaatgtgaggaataaatatttgttgtttaagctacccaatggtaagttgttacagcagtcctaacaaagacagctagtgaagttgaagatgtatagatcttatcaccagggacctcactcttaggtacatttctcagagaaatcttgcatacatgcatagagaaatagagaaaaatagcagccttgtttataatagaaagacattggaaataagctattttttatttttagagacaggggtctcactatgttgtccaggctggacttgaactcctggggtaaagtgatcctcctgccttggcctcctaagtacctgggactccatgtgcacaccaccatgactggtttgaaaataacctaaatgttcatccctatgagaatggctaaaataaattgtgtatttctgtattcatgatactatacatcattagaatgaatgaaattcgattgcatatatcaattgggtaagtctcaaaaactatgttgagtgaaggaagcaagtcattaggagaatcaaggcttggtttgaaaataacctaaatgttcatccctatgagaatggctaaaataaattgtgtatttctgtattcatgatactatacatcattagaatgaatgaaattcgattgcatatatcaattgggtaagtctcaaaaactatgttgagtgaaggaagcaagtcattaggagaatcaaggctatttgctaaagtttaaaaacccacaaaagtagtattactgttttataaatacatatgtgatagaaatataaaaatatgaaagagaatgacataaacttcaggacagtggtttcctctgggatgcagggaagggaatgagattagggaggacgacatcaagtatatctgtaatattttaatccttaatacaagtgagagttatgcagatgcttattatactgttgttgatacttttcatatgcctgaaataataataatgtacttacatataatttccatatactctaaaaatagaggagataaagcttctctacagtcagaataatttgtacttccctaaagaacctctgagagacctgataaaagaaagaaatgcaggcagcagtccaatgttttcagtattaattggaatttggatcttaatttgggtgcagaggaagccattaaaaggttgtggctgaggaatgatctcatttttggcttgcaaggcctttgaaacgcgactctgtttctcttagtcatcctcatctgactgtcccagcctcccaagtttttcttctagtaacttcacacttctggtaagttcctagttatgccactcacaactccgtgcagttgctcatggctccctgtgcttagcacttatttctttctagatgatccacactctcctttccagagccagctaaggcaatgctatctcttaccaagtttatcttgtttccctcaggatgggttaggttcccctctgaactcccagagctccctttagtattgatggccaatcttatttcatctttgtctttctggtccccagcaaagggctggagtcagcataagtgctcaggaaatgaaaatgttgttagagcaagaaagtataaatggagcatttgttcaagtcccttctagaactactgacttctaataatggctcacatggtcataaaataacatcacagtggaaattagatcctataatccttcataaagcttgagtaaaaaccttggaaaagaaaactctgaaaaaggggtaggattgggtgaaggattgggtgtgaggtttggagggagaacatagtgatgggtccagacttaagaagcttcctgatagccacttagcaaggtggagtctgcatagacaagaacccaagtctcttcattcctggccagggctctttcttttgttctactttctgtggcttgagaaaacagctgctctgtatcatcttcttaaaatctcttccagtacttacaacaggaaatgactctccagttcttgggtagtgaaactgggtcaactataacaggtggcttggaagaacctatgataagaggcactagagaacagasaagcctcaggaaagcaatattaaacttaagcggggtctcagaaaggtctttgtagttgaatcaagttaaaacaagtttggttccaagggtctggtgactctcctaaacatacttacacatctggatattgaactgaattccaatagaaatccatcattgaggattatctagggacaaatttttgtgcaaaaaaataaatgattgaatgatgaattatcatatagatgacgttgaccagctgttcatcattaaaatacagaataagacagaggccataaacaagataaggcttccatggcattagaagaagtgtggatggatgtgctaattatctttgaatctcagggtcaacctagggcctggaacatggtaggtttgcaccaagattttctgactgaatggatgagctctggagaaattgcatgactggaaacagcttcaccagtcacctcttatattaatgcatctggtttggaagagagttggtggcaaaataaaaaaaacagacttcctacaagagcttttaccatcaggctaaccagaaacaccaaatccatgtcatcagcgggattaaaaccaagggaaggctgggcagggttcttaatggttgagaatgaggagtttctgggttatgatggtggctttccagtagtgcttgatttaaccaccctctctctcatcaaaatactcccaaatgcagaataagacataaagttgcaacagcctggaaggaatgacttttcatgaataatttggaggtctctggaaggggttttgtcttgccacagcattgatggaatgggattgagaaataaccgacactgacctcaaaagtagaaccacagcattggactggaacatctacacacataccagaatgccttgccacccattgcctgggaacagcactctagagcaggcgggttcactttcaactgttcctactgtccatctgtgcctctctttctgcatccatttgctattactcccaatcttacgccatcctgggatgcaaaattggcagtgagagaggcacagggggaaaagctgaagaaacatagtattctggggaaaaatgcttaattgggtttagacatttgaaattttacaaatttttctctttgcatattttcatatactattgcaaatactaatattatttaatgttcatctctaactacagagcaagaggggattgatatctgagtataatactggtagctaatgtccttatagcactctagaatttaaaaataattccacagattatttcagtcccccaccccaccactgccaccatcatttccactaccaacaaacccatgtttattgagcacttatccccaaggctcctctgcagtaaaggagagatgcgggcccctttcacgtcttatgatttgtggtgatgtatcaaaaagggaacaagtgtcattaaaacagggtggcaaaatatcatctactttaaatggtgacaggtaacaaattagcacttttaacaccaaaaccacattctgttaatttgtgtttctcagcatgcaaaaagtataacaattgaagtaattttggctaatgtaaaatcttagatttttttttggtgtaaaataatatgatttaaaatttcaaatcaaacagtactatagcagttaaaccaaaatgaaataaatagattatgagtgaggcatagtgatagtggtacaactgtgctgtttaaaggtaatcagcaggtttataaaaatattatctcaagatgtagtacagatgatatagacaggtaatctgacacaaatttaagaaatatggtaaataatttctgctgccctgtcgatgcatttctttggctatatgtcactcccagggcagaaagttcttcagattagcattaactagcactgtggttttctaacaatgtaccgatctctttggccctctgctttccatcagtgaaatggaaggctaagtgttggacatccacattcatcatctcagtgctctccatggtcatttccttaatttggctggccaggctagtgactctctacatctttatctgcaaatatgacagattggactggctaaactgtggtgctctaccaattcagagcctatgagctcatttcatagaaaatacatacttgaactgaaaaatacggccatctcatactgctgctgtaactgctgctactaccactactgccgctaccacacttatgcatgccctagtgagactaagctgtttagcccaggaaggcaccccaacctcactgagggcagcgtacctagcaataagtagccctatgagggctcatcttacagcctccaaaccccactcataacctcatgcctcaccctatcaaaaccactaggaaatagcttctctgggattggatgcaaaaattgtggaatttcctctcccaagaattgttaggcagtkcaacgattttgctaaagaggtgcccacaaagactttgaaagagaaggaaggttgtcttctgagggtttgactgtaaatcaaaacctgttggacacaaatatgcaagaaccaccctctgaaaagtagactaattttaagaccagaaggccatcaacatatctaaaaaagaaggtactaattgaaaaagggttgggaagtcaaaggacataaatgaacatgaattactgaggcagcactccttcaagcttggctcaagatagaggcattccagatctagaaaaccaagaggtcattgtgctacccgaccctgggaaacaacggctgctgtttactgagcatggattctttgacaggacaatgtgaagtgcctgtcttacaatatcccatttaatattcaaaacagccctaggaggtaggtatcactactgctattttatagaaaagtaaactgaactgaggatcaggaaggacacagctgcttatggtcacacaactgatgatgctggagcctgaatcagactcaggttttgtgactcccaaggctctgctctgactgctgtgtgcactgctgggcagtcacagggtcacttgtactctccttcaggccagtctctgaaggagatagacccagatgcttcttggtagagaggaggtgctatggacccaaatttatatatggaagccctaactctcagtttgatggcatttgtagatggggactttgggaggtgaataggtttagataaggtcatgacagtaggaccttcatgatgagattagtgtccttataagaagaaccatcagagattccccactcctacctctctctctctctctgcctcgtgaggacacagtgagaaggcagctgcctgcatgctaggaagagaaccttcatcaaggaaccacatcagcaagcacctggatctttgacttctccgcctctagaactgtgggaaataaatttctcttgtttaagcgccccatctatggaatttcattatggcagtgtgagcagactatgacagtaggaatcacactgatcaagggcaagactgtctggtctttcaggggctatttctctagagggaagactgatgacagtgagcatttgaattctacaactgctgctctccgtggttccaatcctctgctcatcaaacatcatccaggaggtcagccagagtgggagcatagaggtttcaggttccctcaggagttccatttccattgtcaatatgtttaagggcatcagggtttacacatcatgggcttgattagcctaggtccttcgccacatattggtacattcaccccaggagtggaagtccctgtgtgtggccttctgaactggtcatgctgccttccctgttagtgttctgactgcttttaaaaagtgggaggggcccgcttgccctccactctgttctgcagctactcaactgccctcctcccgtccaccatggccctgccgcactcaggctacatcacctcctggatcaccgctgccttccaactgggccttgccatggcagcctccaacaggactagcttctggcgggcccacgtggacatgggacttccagatcctatcctgggagtcaccaaagcctttaagagagacattgatagcaaaaaggtgaatctggtaattggtgccaaccaggacaacaacrgaaagctttatctgctgtctaacatctgcaaggcagaggcccagactgccacaaaaaatttggacaaggaatacctgctcattggggtactggctgaattttgcaagacatctgcaggactagccctgggtaagaacagcgaagtgttgaaaagcgactggtttgtcactgtgcaggctatttctcgaactggggccttaaggatcagaaccagttttctgtaaagagttttaaagttcagctgagatgtctttctgcccaaaccatcctagggaaatcacacacttcagggatgctggcacacagctacaagcttatcagtactatgaccccaagacttgtggttctgacttcacaggcactatggaggacatttcaaaaataccagygcaaagtgttcttctcctgcatgcctgggcccataatctcatggaagaggacccttgtccagagcagtggaaggaaatagcaatggggtgaagaaaaagaatctctacattatttgacatggcctatcaaggctttgccagaggtgacggtaacaaggatgccggggctgtgtaccacttcatcaaacagggcattaacatttgtctctgccaatcatatgccaaaacatgggcttatggagagcgtgtgggagactttactataatctgcaaagatgtggctgaagtcaaaagtgtggagtcacagttgaaaatcttgatccatcccacgtattgtgactctcctctcaatgaggcctggattgcctctaccattctgaacactccggatttgtaaaaacagtggttgcaagaagtgaaaatatggccgactgcatcattagcatgtggactcagctggttttcaacctcaagaggagaactcccacaatcctcctctgaagaaggaggattcctcccacaactggcaacatatcactgagcaagttggcaagttttgtttcacaggactaaagcctgaacagatggactggctgaccaaggagttctccatctagatgacaaaggatggccacatctctgtggcaggggtcacttctggcaacgtgggctaccttgcctatgctatttaccaggtcaccaagtaatatccctggtgtgagggaacagagacaacctttctgttttcagcctctgctcttgtgagctttgcacrgaggatgagggagggtggatggtggtaaatggatcatttctttcaaccataatgtatgactctcagtgactgtgattctcagaaaagaacatgtagtgacacagggcagaggcactcatgactggcgtctggaactttgtggctctaaatcaaagtcttctttatccttttatggccaacttttctgaaagagtttacatgtgcaagaaagtcatagcgccaaaaaaaccctgccaatcatgcccttgcaatatttcagatgatttaactgaagtgtcgtatggtgtcaggggttcctcatgagaaacggtactcattagaggctttgagagcagacctagttctggcattaatagtcagcctcatgtttgtcctcccgtgatggagcaaccttatcaatataccgtattgcagaaactgtgttttatgaaaattaatgagccactgcagcaaggaaaataaaagatgctgtttcctgtcttatttaagtaaaagagaaggccatctcttctctcttatcattgctcttcttttccttatgcacaaatacttttatctaacctagttgttcatctcattctactgcttgtttgataataaccccatttctattgggatttatttaagaacaaagaacataagtttctgctcatgccatactctcaactttcttgccaaataatagtggagagtaggcaactgcattttatttccgcatcttcttcatcgattttgtagttgtctcctgttgggttgttgcctctacccagtgagacctcttatcttcactgaatgtggttgtacagtcactcatctcacaccatgagtcaggcggtgcaggatagtgccaggaaagaggatattctgggctttgtgtgctgccggctggactcaggcttcaccctttggaaagacagccaccgtctgctctaatcatatagacttattgcagcttagtttctctgttacaataaaattactgtagaacccccacccgtccaaaagtgtgagaaccctgctgtactcactgtttagttaccattccagtgctctctagacttccgtagctatgcctccaaggcagatgacactccagccagtgatgatggggctggcaatgatgacaaaaggtagtttttattgagtcttttgtatgtggcaattcaattcattttaaacaaagccaagactaacaagtctggagaccacaggaaaggtctgcagaagatgatgtgcaatcatccaaattttcaagaatggataagatgtttaccttatagaaaaagagggaaaaaatccaggcatagagaagagtctagacaaaggtttggaggttggatctggcaaagtatattctgagaactcagtttggcatgcatggctgaggcaaatggagcatcagctttggtgacaggagggaacagacaattgcttttgctgggaaggtaatggatgaggtgctcatggagacagccagtaaggtgcagggtgtggcagaagcattattttcccatattcttcagtactatcagatgctttctgagcacctactctcctgctgatgttgttgtggcttgattctcttgtgggatcaggcaatggacgagctaagtgtaactgtccttcaattaaagcaagaaaaccctactctggacactgggttaaagtgaatcctctgctgttcaaattacaggaaaagaagagatgatgtggtgtgaaaaggggaaaggtgagagaagtgagattgattgagtgtcagtatgagctgagccccatgatagacacatcatccacagagtgtcatttgattttaagagccccagcaggtttgcactagtatttgtagatgagaaggttcagagaatttccacccaagggaggaagtggtggcaactggatttgaacctaagtttgtgtcgcccaattgtctccagctatttgactctttaggaggtctcagttgacattcctctttggtaaaaaatgtgctgtgtggatgcaagtgagtcatttacactctcaaagcctcagtttctagacctatacatctgtttccttagaggttcactcttattcttctccttggattcttacagaaatcaaattttcctgtctcatgacaatccttcaaaaatatgaaaatagtatgctttctctgaattttctcattttcaggctaaaaattcttgcttctttcagttgcttttcctccttgctttttgattctttgctgttaatatatggttgcccccaaagctggtgctatcttaggttgtactaaaagaagtatagtgcctgaattagaggagaggaacattctcctcaggtcagagcacctctgaatcaaggattcagctctgaggccatgaagcatgagggagccagatgaatgagtatgcattagagaagaatcttccatggaactggtcttgttgacaaggaaagtggaagtaaaacggacctttctttattcctttaatgccaacacaggaagctttcttcagagtccccctcaagactatgttctgagggcgcggtggctcacacctgtaatcccagcacattgggaggctgaggcagatggatcccttgagctcaggagtttgagaccagcctgggcaacatggcaaaaccccctctctacaaaaaatacaaaaattagtcaggtgtggtggcatgcatctataatcccagctacttgggaggctgaggtgggaggatggcttgagcccaggaggtggaggttgcagtgagcaaaattacaccactgcactgtagcctgggcgacagagccagaccctgtctcaaaaacaaacaaacaaacaaacaaaaaactgtgttctgacagagcacatgaaatctcacactgagattctgagcagcatcaaggctatacaggaatacagctaaggggctggggtactaagtggagagggtctgaatcctgactcatgatgcagagctttgcatgagctattgttcaatttttggcagcaggtcttttagctggacaataggttgatcaaggcatagcaaatgacaagtaggggtgtgaacccgtttctatcatttgctggccatgaccttrtgcaaattcttttccttctctgtgcctctgtctcctcatttgccaaatgaaagcattggattagaatctgcaaaggccaattagtttcatcatatcaacatgtcaatgacttggaatattatattgagaagcatgagactatatctgggctctacagtaaagagctttgtgagggattaacaatattagtcaggacagcaagtgatatagtttggatatttgtctctgcccaaatcccatagtgaattgtaatcgccaatgttagaggtggggcctggtgggaggtttttggatcatgggggtggatcccttgtggcttggcgctgtctttcgtgatagtgagttctcatgagatcttgtcatataaaagtgtttgggcacacccctcccccgatcccattctctctgtcttgctcccgttttcgccatgtgacagtcctgctccccctttaccttccaccatgattgtaagtttcctaaggcctccctagaaactgagcagatgccagcaacatgtttcgtgtaaagcctgcagaactgtgagccaattaaacttctaaatgtttcatgtttctgtgttccaaacgtttttggtgttggatttgttggataggtgaattttgaaatttttagttgaagtagaatgaaaagtgataggattatggatataatagtaatagatcatgtggatgtgtctagttggggcatttcagtggaagaatcataactttcagtctctaacttaaaaggttaatgctagttagctctatagtgatattataatatagacgttgctcaattttcaaagcattttagaggtaccagttcaagaacaatgggcatgaagctgtgattagatctgcagatttctggggattgattgtagtaaagacctggccatgtagatgtcaacgttgcttggtttaaaagtcctgggattgcatctggctttaggcctaatgatacacagctcatgaatatagaacatcttctgatgcaattgatgcgaattgatatttctatggggaggattacttgattatcaacttcaagtagccacagttctcctggttttaagtctgttgtaggaattacggacgaatcaaactttaggtctccataatctgtgtattcatagctgcagtatcattggtgtcctatagtttcgatggtaagggaggggttataatttcatctattatatataatatacataatgatgaaagagcaattaaaattaagataatggcaggtaaaatagttcataccattgtgtttgtgtgagttttagttgttaatatcagggagataatgtaaagtactaatgagctcattaaaaaaacaattattagggtgtggtcatgaaagtgaaggagttctgtgataggtgacatagcatcttggaagcctaattgaaatggatatgccctgaagatagaaagggttctaacatgtaaattaactttggcaaagttatatgattattttactatagtaactcttaaccgagaaattcatcgtagttacgaagttggcttaaacccagttttgggaggttcaattccttcctttctcttctaggctttcacataaacaggttcttcaaatgtgagatatggtggcagggagctgtaaagtcattctaggtttgtagttgatagttcaactactgaaacatctcgttttgaagcaaaggcttctcagattatgaagattattaagcttggcctcccagctaactttagtagacaagtcctggagtggtttctgattggctaggtttggctatgtttggccttgcccatatccaagccaatcactgtggccaggagagaatattatgattggctaggtttggctatgtttggccttgcccatatccaagccaatcactgtggccaggagagaatattttgattggctagactcaggtcacatgccctcaatcttgtggctaagcgggtagaagactgactaacagccccacttagatttcatggaatggagcagtgcattctttctcttaaaagaaaaccaaggagttacgcatgctcagcagaaggagtttgggaaagccttttgggaagaaacaaacctgtagatacatactaactccagctacatgagtgggtagcaggcaatttggcatcatacagctcacacttttatcatcacagaattagattcaggccctgacaacccttaaattctattcttatgagtaaagagctcagaacgaatggcactgcactgaaattcaagaggcctgcaattgtccattcattttgagtaatatgaatcaaatgaatggcaagattggctgttattcttctctgctcttggcctcagtttactcatgaaggggttgatcttgtcaccagatgttctctcaaagtacacttcctctctgacatccccacccrctccagtgccctagaatttcaccccaacaggccctgagccaagcttacgtagcaccagcagggctcagcactgtctacctacctggggaggctgtctctgagctggcttgttgccttagaactgataactagggtgcttggggtgagctcctgaaccccagcctgctcctatccttgccatgttggccccatctcttggttgggtaacaaacttgtttctctccatcttcaccaaaagaacaattaatcccaaagatttgaactgatagcatgcttttataactcactgaatctggtgtcaacgaggctctggcccttcttcacgtagctttaaggggaaccacttggaatgcccaccccaaagaagaagcacatccgcaaatagtacagagaaaaggaatcttctgggctttagtg

SEQ ID NO: 93442 - DNA, 13706 bp, Homo sapiens
atttcttaagtattttgcccatctgtttttaagaatgatattttagcctttactaagataatttcagagattcagcatgcattattcactagtactttctgtcttcttttatttaccttaatagaaagggtagagaattcagagaattaacctcatataaactgtacttttttagtgtagcaatggggctttctggcatggacttcatgctgcttaggaggcagccttatagtgagccatccctgtgtacagagctctcaggttagtgtgggctttgtaattttatttccacaaatatttttcagtagaggatacagcatgttttgatggaagttaagggatggcgacttccattgggaaattattttaaatgctttgtgtcagttagtcaattatcatgatttttttaccgaattatttgtttaaatgtgattagttatagcttatgagttttgtgggcttttccctccttatggggttaaaaaaaatgagttaatgctttaatagagaacatgtactatataatgcccacttttatatcacttattttgaaagctttccatcattattcatagaaaaattaggtgaaatatttaaaaagctaaaatttttgactctcatatcagttctaaaataatgaactttagagaacatgttttgtaatcctgttttgtgactaacttttatcataagaaccccacttgacctgagtgacacaataaaatgctcaaagttgaagcagcagcttagctaatgagcagagcaaaaagaacatacaaaaattattttggggggatagatattacagatctctatggacagtaggtaagatgtgcttatgtcttaaagatgattaatttatagtagccaaacactttagtcttttatcattattattaacatgttgaggattaaaatattagagtgctttgagttgaatttaaaagccaaatttttattactaaaatatttgatcatcagaagctcattctaatatatttcagtatagtctgcaactttctgttccagcttaccaaaacaaagtttttcagctatgaaaccacgagtccccactggaaatattatattatagatattactatacaaaggctgatttgcttcacagttcccagaaatgactttccagggaaacttgacaccattttttaaaaaagaaatatttcttataccataccttaagaaactctcctagaaatattggtgacttcaaaaattgttagtcttcacttttatttttcataccaattttattagctttacagtaaaaaacctgtaaacttttttaaagctattttcaaaatactcatctttattatgtaaatataacattttatgtgttagtaatgttttatattatgttccattcttttttttaaccttagaagcttttgatatgcacttcttgctttgtcataagaatgcactccttcctttttaatagctatgttattctccttgggttacgtaacgtaatttatttaactattccctgcttattgcacatctgagttgtttccattgtttttgataaaaaacaatgtggtatacttttttcccctttgggatatatgtttagataaattcttcagagtggaattactgggtcaaagggtgtaagtgatcggatagctcttttatcattgccaaaagatatgtgtgacccaaggcttttgaatgtacctattctccataccctgattcaataatggatacaaattctagtatttgatgcctcgctttaatttgtatttcttttattagcaataaaatggaatatttttaatgaatagtttgtgcttcttcatgtataagctctcagtgtcttttaactacttgtcttaaggagtctggttaataagcctcatagatttgtaccaactttgtatattttaatataaaatatttttctggtaatttccacatttaaaaaaaatggaacatcatgaatgttttttcagtgttactttagtgtcatgaattattgattagagtatcctctagtctttcttcactatatattttgctaatattgaaatttgatttagagaattttacatggttgcatattgtttcaaacttatttaacttacctttctgttgctaccagacataactgtgtattttattaaagtgtttcttaaagactcataagttaaatgccttatttatcatctgtgaaaataaaaattattgaaattagtttcacattctactaggcctatagtttgtttctagacataagcaaacagttatataattttttcaggttatatatgtgaatgctgtcagctctttctaattgtactagtctggaacttccatgtgttatactgtcctctcataatgagggcattatgattttaaacggatttgtgctttatgttgtacactagggttttttttaacccatttattggaatattagtatgtctagatttttttattagaaagaaactgaaaaacttttctgctttccctgttttgtatgtgttcattcatttttccagtgtttaaccaagatggactatattacctttcaaaacaatgcaaaatttgagcctgaagcaaagctcctcttattgccctctctttgtcgtcattggtcctcccataaaagtgtttattttgacttttgatacttaatttttcaggtgttactaaaataatctttacagtcttgtttatgtctgccaaatgacagtaaagcaaaaaaatcaattaattcataattttttaatgaaagatttctgtgtacaaattcagaagcatatagtatattttacaaaggttgaaatcatttaagtaaaattatttgtctggccgttctaaattccatatttttaaaatgtgcacctcaggccaggcttgatggctcatgactgtaatccaaatactttgggaggccaaggcgggcagatcacctaagtccaggagatcgagaccagcctgggcaacatggaaaaaccctgtctctacattagctgggcgtggtgtcacacatcctgtagtcctagctactcgggaggctgaagcacgaggattgcttgagcccaggaggttgaggatgctgtaagccatgattgcgccactggactgcagccgggatgacagaacaagaccctgtctccaaataagataaaataaaataaatgtgcatctaagtatagagtgtatatttcccatagctggtttaattccttaattcgtctgaattaattattttgttaatataactctcaggcagtcatttatgttcattggcactgatggctagagtaaactttgttttgttaattttggaattgtttttgtcctctagtttctcatgagatacctgaaatgaaatcggagtggatgagtttattcagctagtttctatgtctagtgcagttggttggcctagttctttataccatgcctgagaccacccagactcgggttacatgagctctctcctgtcacccagtacctccattttctgggaaagtttttccctcgacttttaacgttaactcttttggttaccatgaaagaattttacatatgcatgaggttcacacaactaagggcaggtagtccatatctctcttccctttcaagtatccatacttcgttgctttctatgctttattttggaaaaaaataacagagttattaacagagttaaacccccacatcttccctttcttaaggagatcttctttccaacctttatcttccattctgagaagattacttttattctgctttgaaatacaactgttgttgtgagacaaactccttagtagactcttggtgattcccagtggctagaataataataataaagggaaacaaaactgttgattctctcattgctgcccaattctctttctttccttatcactgcattttctactttttctgactcagcctagcctcaaatctagttttatgtgaggattagcagtcagtccttctgtgtccacctattgtattttttcccgtgctaattataaaatgttgtataaaatgtattctttcattgtatacaatctgtgtgcttagtaaaagaagggtgcctcctcactgttcctcacatccttctgccatgactttgcaccattccaaatactgcttatatttcaaatcagtttacatcctgcccccttacagttccttccctgaaaatcccagcccacacttcaagttgttcttttggtctttattaaaactcactgctaataacacaactttaaatagttaattctgttgtgtattcaaatagttttggctgacacctgtaatcctagcactttgggaggcccaagggggcggatcacctaaggtcaggagtttaagaccagcctggccaacatgatgaaaccccgtctctactaaaaatacaaaaattagctgggcatggtggcgagcgcctgtaatcccagctactcgggaggctgaggcaggagaatcactggaacctgggaagtggaggttgcagtgaactgagatcatgccactgcactccagcctgggaaacagaatgcgattccatctcaaaaaaaaaaaaaaaataggttgggcacggtggttcacagctgtaatcccagcactttgggaggccgaggtgggcggatcacctgaggttgggagtttgagagcagcctgaccgacatggagaaaccccgtctctattaaagatacaaaatcagccaggcatggtgcccatgcctgtaatcccagctactccagaggctgaggcaggagaatcgcttgaacctgggagggcagaggtagcagtgaggcgagattgtgccactgcactccagcctgggtgacagagcaaaactccgtctcaaaaaaaaaaaaaaaaagttttagatttcataagtaaatctcatttccccaaataacaaacaaatcacttaagggtttgatccatgtatatattttttctgacaggaacatatggatatgaagtgagcaccaaataaatacaacttaactgagaaacatcagaaagttattttcattttccttctaattgcttatctctcagctgtcaaatctgctattgctcctatatttcttgcttaatttatagaaaccatattctgccaggcacctgatttaaaattctcagaactctcttgtattccatccattccctcagaaccaaatgaatcttgtcatcaagtgcaatagattatacttctggtttctttcttccatttcttcatgtctagttcagtcctctgttctctttcctggacgttataacaacttcgtaaggtgtcttcttgttgctaatctctggattctgtcttacccagggatcttgtagcaacattattttaaaacactaccttgttcaaaaacaggcatctgtagtgagagaaacagtatataaggcacagcctttgtcctcaaggactttaaataatgtgaaggagataaacctctacacaactaactgtaatcaaaggtagagtttaataacagtaacactaggatataagcagagttccatgggagcacaggagaaggacagatgagtgattaagacgaggttttattcattcaatttacaaatatgtactgaccatttagtgctgggtacttttaggtgctggatatgcaatattgaacaaaccagacatggatcattctttgattgggtttatggtccagtggtggagatacatgattaacaggtaaaccaaaatattacataacaacaagctacattcaattgtaggcaaagatcagggtgccatgaaagagagtaacagaaaggtcccaggctttatgtggtcattttgaaataaaaaggaacttaggtgggaagataggggaaaacattctaggcaaatatccttgtcttttattccgctgagaaaatagaaaccaaaagtcatgagtactcttcacttaccattcccataccttaaacattactgttgagaccaactgatgggagggatggaaggcaagcaagatgacgcagacacagggcaccaggaggaaagtctgttactactacgacggggatgttggaaattaatattatagacaagaccatccaatgaagcctcaccaaatctactactcacaatttgctgcccagctrtggtctccactgaacaatagaaatctgtcaccctcacaaacccagtactgaggagatgaccaagtaccacagggatgactacattaaattcttgcgctccatctcttcagatacatgttcgagcacagcaagcagatgcagattcaacgtcagcaaggactgtccagtattcaatggcctgtttgaattcttacagttgtctactggtggctctctggcaagtgctgtgaaacttaataagcagcagatagacatcgctgtgaattgggctgggggcctgaaccatgccaagaagcctgaggcatctggcttctattacatcaatgacattgtcttggccatcctggaactgctaacctatcaccagagggtgctgtatattgacattgatawtcaccacggcgatgggatggaagaggccttctataccacagactgggtcatgactatgtcttctcctaagtagggagagaacttttcaggaactagggatctacaggatattggggctggcaaaggcaagtattatgctgttaactacctgctccgagatgggattgacgacaagtcctatgaggccatttcaagttcagtgctcttacagtgtggctcagactccttatctggggactggttaggttgcttcaatctgatcatcaaagcacatgctggcctgtcgtggtggctcatgcctgttctcagcattttgggaggcccaggcaggagaatcacttgaggtcagaagtttgacaccagcctggccaacatggtgaaaccccgcatctactaaaaatacaaaaattagtcagacatggtggtgcacttctgtaatcccagctattcgggaggctgagtcatgagaatcgcttgcaccctagaggcggaggttgcagtgagctgattgcaccagggcactccagcctggagaactgagtgagactccatctcaaaaaaaaaaaaaaagggttgaggggggcatgccaagtgtatggaatttgtcaagagctttaacctgcctatgctgatgctgggaggaagtggttccaatttgtaatgttgcctagtgctggacatatgagacaggtgtggccctggatacagagatccctaatgagcttccatacagcgactacttggaatagtttggaccagatttcaggctccacatcagtccttccagtatgactaacmagaacacgaatggtacttggagaagataaacagcgactgtttgagaacctgagaatgctgccccacaaacctgggtccaaatgcaggtgattccagaggatctgtccctgaggagagtggcgatgagagcgaagaagaccctgacaaatggatctcgatctgttcctctgacaaacgaattgcctgtgaggaagagttctctgactctgatgaggtgagagagggtggccacaagaactcttccaacttcaaaaaagccaagagagtcaaaacaggatggaaaagagaaagacctagatgagaagagcaaagtcacagaagaggagaaaaccaaggaggagaagccagaagccaaaggggtcaaggaggaggtcaggttggcctgagcagacctctccagctctggcttcttgccaagtcccctgcctttctccaccaacacctcagattttatgctttctatttctctgtgtatttataggaaagtttattaaatataaatatccccagggactagacagaaaccaaggccctgagcccagggcagctatgctgggtgaactcttctaggagctgccttgccacccatccttccatccttccccagttcttaactttgaaccataaagagtaccaggtttgggtgaaagggatactttcatgcaaccataagacaaaatcctgaaaatgccaaatgcctgcttagtagctttggaaaggtacccttattgaacattctagaaggggtggccaggtcttcaagggtctcccgttcttttcaggctgctaatgtaacatcagccatttttagattggctctgtcctcataccttcccagtggcctcaggtgagccaagaaactcacactgcctgccctttgtcttcccctaattctgcaggtggaggttggtggtctagtttcctttttgagataccgttttcatttttgagacctttgtaataaaatggtacatttctatacaaaaaaaaataactgtttagaccccatctctccccactgcttgtcacagtggaaagatgtcttttgttgaagacttcactcactcatctgtttgctgtatctggtgactaccttccttctcagtatctcaccccttcaaaaaggctctctcctgtaaccaactgaaccttatctctatcgactccttttcctcagcttttatacatacgtgaatctcttccactaaaaaaggcatccttcaacctggcaatcccctttcagtgctgccatcttgctcctcctttgtagtgagcccttttgaagagtatctacacttaaaccatcacccattcctcaccaatccatttactttctggttcctagtgccaccactccactgaaacttcccccagcaaagtcccccatctctgttgctaaacacaaggggctacttatttaggcgtcaccttatttgaccatttggctatatttgacaggactctcctcttcgaactctttcctcgccttccatgtcatgctgtgcgggtttttcttcttggatttcttttctttctaacctttaaatactagtgttccttgaggctgtaatctgagccctcttctattcattcttacactattcattcttcctggagaatcgcacccaccccacaacttttgtacagcatcctctgtaggctaaggattcctgagtctcaatccctagccttccaagaaaatatgaattctctagaaagtttaatttaaaaatgtatcatgtggctgggcatggtggctcatgcctataatcccagcactttgggaagccgaggcaagcagataacttgaacccaagagttcaagcctgggcaacatagtgagaccctgtctttaaaaaaaaaaaaaaaaatcatgtgatgatgactgctggaaaagcctccaatccagcacagcagtattcttaagagattccagttgttagagatcttccctggatttcttattttctggtgattagctttaggtagatattaataaatgaggggaaggtacctgggcagtcaagaaattagccttcaaaagatatatatatgggaagttatttttctaattagtggaatattggcaagtaaagtttaaagatggagaatgtactttacaggacctggaaaaagcaattaatatatcagcacctaaaatgaaaacctaaaattctgtagtaataaaaagtgaacaatctttctaaattaatacagaattattcaaataagtttcttccagttttccattgcctgaccatgagtatagtaaattctctacaagattgccttttttttttttttttggtggtggtggtggtaaaaaacacgtaacatatatttaccctcaacaacttctaagtgtgtatcacagtgtcgttaactatgtgtacattgttgtacaacagatctccagaactttttcatcttgtgtgactaaaactctgtactcattgaacaaatccccatttctccctcatcagccccagcaatcaccattcatcttgtgtgactaaaactctgtactcattgaacaaatcaccatttccccctcatcagccccagcaatcaccattctattatactttatgttcctatgagtttaactactttagataatctgtataagtagaatcatgcagtatttgtcttctgtgattggcttatttcacttagcataatgtcctcaaggttcatccatgttgtaacatataacaggattttttttaaggctgaataatatttatttgtatttatgtaccacattttctttatcaattcatttgtcaatggacatttaggttccttccacatcctggcttttgtgactaatgctgcagtgaatataagtttctgaatatctctttgatattctgctttcagtttttttggataaatacccagaagtgggattactggatcatatggtagttctatttttaattttttgaggaacctctgtactattttccatagcagctgcaccattttagattcctgccagcagttcacaggggtttcagtttctccacatgctcaccaacacttgtttcttgtttttttgatagtggccatcctaatgagtataaggtgatagctcactatggttttgagttccctgatgactagtgatgttgagcatcttttcacacagcaagcatgcttgttggccacttatgtatcttttttggagaaatatctgttaattactttgcccattttttattcaggttatttgttttgatgttattgagttgcaggcattctttacatattctgaatatttactcctcatccagtatatgttttgcaaatatttttcccattctctagttggcccccacaaggttgccttttaacagcccaggactgtctgttatttcacagccttagcttaatctgactctggtaattcacatcaaccccagcttgattcttacctaattcctaactctagacttaaattttgactgccttcccttcccacattatcttagctatctttattgatagctttactgccaaccctgattttcattccccatgacctcttctttactaatattttagtaaatgatgattttaaaataaggcatatatttggcataaaacaggaaaaaattataatctctgtattaatcttaaatgtaaaaatctgaaacagaagttaaaatctgttttataagaagtaaattcttatgttaaaatatccaaatttgaaaatattccctttgaaggaataagagaggcatgctattttgaatcaatgcatttggtgagtgtgtagggagatagtcatagttgttgtgtgtgtcccaaagtcttacacctctttttggcccactaatcaaactagaaatgtcacatgaaacttcttgagtgaactagtaattttacatttgctaaaatagagctataataagtggctgaatgttctgattgaccacacataatgtagagtttatttcctagcaaataatgaaagatcgatggatgaatgttggtcatgaagaggaagaactaaagccatatactgagcctgatccrgatttcaatgacacaaaaagaataggtaagtatttaaacatggtaagaagtgctgtccctaggcaacaagtaagagtcctttagtgtgccaaaatagtgtttaagagtataaataggaagcaatttttatttgaaaaatacttgcattgtcattttaatgataatatgctgaaaattatacatttcaagttccctaatttgttcccatatatattatggtctaattcaatgtttgacaacagtgatataaaacctaatgtaaataaatcgaattctttcctttcagtgatgcccagcaggaggaatggctgatgtaactatcagcactgatcagactgataagcatcagcgaacatagcatgtattttaaccaaagacatagaggcaccgaattaagagttgaacactttggctctccctttctttttccactgtcttagcaatgtttattctccctcctcactcgtcctgctactgcccatacccaaccagagctctccttctaacttgttctcttcatttcacaatcccttcccaaagccatcatttagtctcagctgagtcatctcaactgtgttcctatctggcttgagggcagagtggcaggggagagcattttagggtgttaggaacctgatcagaaaaaccatggaaattcaaatctcccaaagaagagtcaacctactgcaaatcagaaagcagaaaattttaagagatgaaagaaaccacttcactagtagctgaggacgaattgagagaaagacagagaattttgtgtgtaacaaagactgacatggtcttagactggacaaagaaagttagctcaggaatgtattaggcaatgagaaattaagtgggcccattaatatattaaccatgatgtaggtaatttctgcatgtaaaattatcattgtacaatatctgtgaacatatggtatccgtaggttaatagtccagaagtttttaaaactacactttaaattttcatgactaagttttcatattcaaagatggcaaacttgcccatttttgttgatttgtttacgaaaataaaaccattttcagaaaatttctcttttttaaatttctagacattatggtcaccatgggctttgcacgagatgaaataaatgatgccttaataaatcagaagtatgatgaagttatggctacttatattcttctaggtagaaaaccacctgaagtaagtttttcaccttttcagattactgtgaattatttcttgagctaatatattagttaatatattctttgtggaatcaaaaataatataaagatcctaccctaacattcttatttattggaattcaaaaatcaagatgttaaattatgaactggttgtatttctgggtaccaagagagattttatgaaagaataggtctactgtctttcttagctccaagagccaccattcacagcctggcctttgagaatggcctcccacacagcttgtgcatccaaatgtaacagtcccaccaaaggtaatatggttattccaagtgtgcagaaaagacagtgagtgaaacatgaggaagtgatagcatttaaaataaaatgtatgtcttaaaggatttttaaaagaggtaactccaggaaaggttatttgatgatattttgccttataaagtgtcaagtgactgatgctttcaattgggaattctcaaggccaggagaactataataaggagatggattcaggaaataactgcatacaaatggtgaactatgttagtcagttttgcattgctataaagaagtacctgagactgggtaatttataaagtaaagaagtttatttgactcacagtactgcaggctgtacacaaagcatagtgttggcatctgcttctggtaagggcctcaggaagcttacagacatgatggaaggtgagggggagccagcatgtcacatggcaagagggaacaggtgagaggtgggggaggtgccacgctcttttaaataaccagatctagcgtgaacccgtaaagggagaacttgttaccacgagggcagcaccaggccattcatgaagtgtccaccttcctgactcaaatacctccctctaggcccactccaacattggaggtcacacttcaacatgagatttggaggggacagagcatccaaaccatatcatgaagcataaaagcaatgattctttaggaaaacaaatataaaggctatacatcgagagtcaagaacagatcgcagagcattaacaatttattggaagttagacatctgtgggaggtattttagagagaaaaagctgaaattatttataattccgtagtaactgttaatggagcagt

SEQ ID NO: 93443 - DNA, 13637 bp, Homo sapiens
caaaatcaatgtacaaaaatcacaagcattcttatacatcaacaacagacaaacagagagccaaatcaggagtgcactcccattcacaattgcttcaaagagaataaaatacctaggaatccaacttacaagggatgtgaaggacctcttcaaggagaactacaaaccactgctcaaggaaatcaaagaggatacaaacaaatggaagaacattccatgctcatgtgtaggaagaatcaatattgtgaaaatggccacactgcccaaggtaatttatagattcaataccagccccatcaagctaccaatgactttcttcacagaattggaaaaaactactttaaagttcatgtggaaccaaaaaagagcccgcattgccaagtcaatcctgagccaaaagaacaaagctggaggcatcacactacctgacttcaaactatactacaaggctacagtaaccaaaacagcatggtactggtaccaaaacagagatgtagatcaatggaacagaacagagccctcagaaataacgccgcatatctacaactatctgatctttgacaaacctgagaaaagcaatggggaaaggattccctatttaataaatggtgctgggaaaactggctagccatatgtagaaagctgaaactggatcccttccttacaccttatacaaaaattaattcaagatgggttaaagacttaaacgttagacctaataccataaaaaccctagaagaaaacctaggcattaccattcaggacataggcatgggcaaggacttcatgtctaaaacaccaaaagcaatggcaacaaaagacaaaattgacaaatggggtctcattaaactaaagagcttctgcacagcaaaagaaactaccatcagagtgaacaggcaacctacaaaatgggagaaaatttttgcaacctactcatctgacaaagggctaatatccagaatctacaatgaactcaaacaaatttacaagaaaaaaacaaacaaccccatcaaaaagtgggcaaaggacatgaacagacacttctcaaaagaagacatttatgcagccaaaaaacacatgaaaaaatgctcaccatcactggtcattagagaaatgcaaatcaaaaccacaatgagataccatttcacaccagttagaatggcaatcattaaaaaggcaggaaacaacaggtgctggagaggatgtggagaaataggaacacttttacactgttggtgggactgtaagctagttcaaccattgtggaagtcagtgtggcgattcctcagggatccagaactagaaataccatttgacccagccatcccattactgggtatatacccaaaggactataaatcatgctgctataaagacacatgcacacatatgtttattgcggcattattcacaatagcaaagacttggaaccaacccaaatgtccaacaatgatagactggattaagataatttggcacatatacaccatgaatactatgcagccataaaaaacgatgagttcatgtcctttgtagggacatggatgaaattggaaatcatcattctcagtaaactatcacaagaacaaaaaaccaaataccgcatattctcactcataggtgggaattgaacaatgagaacacatgaacacaggaaggggaacatcacactctggagactgttgtggggtgggggcaggggggagggatagcattgggagatatacctaatgctagatgacgagttagtgggtgcagtgcaccagcatagcatatgtatacatatgtaactaacctgcacattgtgcacatgtaccctaaaacttaaagtataataataataataataataataaagaaaaaaaagaagaatagataagtagatggaggaacaaatgcaaaaaagtatactttaaaagaaatgcattggctaattcatacataatgttatcgtgtgaattattatgttgttttcaaactaattctgcactgtgtaaaaagttatatattaggttgacgcaagagtagcggttttcgccattgaaagggagagatagcaccatacagccaccttagtctaccttttacaatgatcccaaaaactcatggaaacattttcaaatgcataaattgaagtttgctgctattattaatagggacatttacaaattcataaacaatttaaaaattgtttttaaattgttaaaagaaggattggtgtgtttcgaaatattaaaaattagtgactaaaatgacacaatatgtacatgagaatatacataactatagattattagtcatttcagcacccagaactctgcataacgtatggaatatatatttgcatattttacaatcattgtcaatggaaaggtgaattgaaggtaaactgccccaaatatttcacaggcttcctaatagaaagaataatagattatatccataacatgtttcaattttcaaagaaaatggataacctataatgaaatctttccatcatagactttaatcagtcaccaccatgagcaaatactagtagctaagtaagcagcccttaaaagacctggagagaaacagaggacatttgcataaagaaaacctggaaaacctgtccaagaacaggagaacgtagagacattgatactgtgaacatagatgaaaactggcaagaagacatttcagcctctatgtgggatgatacgtggtaacaggattttaattttgaaagacaaggtcctcagagcttgatgctgttacatgaagacagatcttggggaagtggtgacaaaatgcccttgtggtttagctcagtgcagagcacactgcaaatcttctttacagaaaggtgccaaaacagaagagtatattttccttttgggtctttcaaatctagtatttgtaaatcatggtgaatagtaatttgaatactcagaatctatttatcactacattcaaacagtccattaagctccacctctagtagaggaatgtgtctacatacattatttggaattcctctgtagagaagttttgtcctttcccccacccccacttatttatttataagtcactgcttctctgccctcttacgaacagagcttgaaaatatttgcgtttatcaaaatcctgtttgagtaggcagaataacggcccaccaaagatgtccatgtcctattccccagaacttgtaaatactgatgctacatgacaaaagagactttgcagatataattatatcacagtatttaattagggagtttatcctgtattatctagtttggcccaacttaatcaaatgagtccttaacagcagagaattttctctggatgaaagtggaaaacagatggagtagaaatgaaaatcagagagattccaattgtaagaagaattcaatgcatcattgctggctctcagatacaggaacctacaaacctgagagggcctttaggggtttattaacagccagccaaaagcaggtagctcagtcctataattgcaaggaactgaatcctgccaaaagcctaaatgagcttagaggtaaattcttcctagagccttgtaatgaaaacccagccatcaaaactttatgaaatccagagcaagaaaccagcagagccaacctgaatctctgacctacagaattgtttttgaacacaaaattgtgttatttcaagtagctaaatttgtgacaacttgcttcagtagcaagagaaaattaacacatatttatacacatatatctgtaattattttccatatcaacctatgtgtatattgaacttaatatgagttcataccgatatctcagactcttaatccagcaccacagagttcattctgcccttgcttatttgtaatttattttcctgacggtgagaaacttttaattatcttccattatttgtttatctctaataacacaaatagtttaagaattattcacctataagcttgtgatattcaaacttaccaactagagtattatatttatggacagctgtttttgtctttagttttacaaactgaaaacctcttttgcaaagttacttaagtcatttcctttttttgtccacatcacctgtagtaaaatttccacatcacatgtagtaaaatttcctatatattacgatacagttaggcttatctgtcagaggctacattatataatacgattccctaacactctggatcatattttttatttgcattcattaaagtttactctctacaacgtacgattctatgaattttgacaagtgcatagaatgttgtatccaccactccagtacctcatagaaaagtttaccacactaaaaatcctcctgtgtatccccattatagttgaccacgctctcttaacctgtagcaaccactgatatgttttccatccctatagttttgccttttatcaaatgtcatacaaatggaattatacaataactacaaaatttttttgcctggcgtctttcagttagtaaggcacatttaagttttatccagggcttttgtgtaagtaaatagcttgtttcttttctttttttaaaaaataatattccattgcatggatatatcacagtttatttatttattacttgaagaatatacaattttggtaattattaataaaactgctctaaacgtttgtttacagaagtttgagagaatacaggtttttgatgtccttggatgaatatctagaaataggattgatgacttgtatggtaagtctatgcatatttctaagaaattgccaagctgtttcccaaaatgtctgtagcatatttcattcctgggagcaacaaatgagagtttctgttactatatattttaacaccatttaagtttgcttttaaatgctgttgactcgatgttcaacattgaggaaccgataaactgttttttaaagtggctgcaccattagacattcctatcagcaataaatgaggattccaatttgtccacttctttctcaacacttgtttttattttttattttagccatcttaataggagatgcctcaaatatatttctgtcaaagccttcattttacatatttagttcactcaacttatggagtagaatgaaaaaaactgtaaagccaattttcattactaaaccaactagccacatacatttgctttctccaaaaatagaatatcttactcactttcaattctaatatatgttttcatcttcatgaaaaccatgcatttatttttcagctcaatttctaagttgtacaggtaggaaagcaaacagagaggagacaaaaaataaggagcctcatcataacattgtagtctgaaagaaatgtcaccattactttcagcacttgttactgatactctctttgctatgatcttatgggattctcctgcagaagtgaccaaacattctttcatggtagtctgaaaatggaagaagcaaagtaatgaaaatatgacagcattcccaccacgtcccagaatagatctaaagatgaagactaacaacaagccacatcctcaaagaaatatttatcaagacaaggaaaaaacagaactatactatcctgacttgaataagcaaggtttcatatgaaaatcattatttcaaatattccttttatttggcactgcagaggtttttacatatcaaaatggttaagatttgacatgaatgaggtgtatgtaggtttgcgggggtgggggtggagttctttttgttttgtttttaataataaaagcaactgttaaccgagctgtggggtgggggcaaaaagagccagaaggcggcgcacacctcaggactattcttgtttttttagaaccattcttattctggggtttcttcacctacccaagtctcgcctgaagccaggtacagctctattccactacatgaccctctgcccaggaagttggaatcttcacctagcaacacagttcagatcgagattgacaggaccatgagccaatcacaaagctagatttgctttccagtctaacagtggccgttgtgctggagasagtgaggagaagaaaggggcgggacaagggcaaaggcgttagaagtcaccaccgacccagcccctcaacagcaagttggttcttcagcattaagatccaggtgtcagcctatgtctttatattgtcaagatgtctctttctaagaagttgactttagacaaactggatgttagagggaagcgagtcatcatgagagtagacttcaatgttcccatgaagaagaaccagattacaaacaaccagaggatcaaggcttccatcccaagcatcaagtactgcctggacaatggagccaaggcagtagttcttatgagtcatctaggtcggcctgatggtgttcccatgcctgacaaatattccttagcacctgttgctgttgagctcaaatccttgctgggcaaggatgttctgttcctgaaggactgtgtaggcgcagaagtggagaaagcctgtgccaacccagctcctggttcagtcatcctgctggagaacctgcgctttcatgtggaggaagaagggaagggccaagatccctstggaaagaagattaaagctgagccagataaaatagaagccttccgagcrtcactttccaagctaggggacgtctatgtcaatgatgcttttggcactgcacaccgcgctcatagttccatggtgggagtgaatctgccccataaagcatccggattcttgatgaagaaggaactagattactttgctaaagccttggaaaacccagtgagaccctttctggctatacttggtggagccaaagtggcagacaagatccaacttatcaaaaatatgctggacaaagtcaatgagatgattattggtggtggaatggcttataccttccttaaggtactcaacaacatggagattggtgcttccctgtttgatgaagagggagccaagatcgttaaagatatcatggccaaagcacaaaagaatggtgtaaggattacttttcctgttgattttgttactggggacaagtttgacgagaacgctcaggttggaaaagccactgtagcatctggcatatctcctggctggatgggtttggactgtggtcctgagagcaacaagaatcatgctcaagttgtggctcaagcaaggctaattgtttggaatgggccgttaggagtatttgaatgggatgcctttgctaagggaaccaaagccctcatggatgaaattgtgaaagccacttccaagggctgcatcactgttatagggggtggagacactgctacttgctgtgccaaatggaacactgaagataaagtcagccatgtcagcactggaggcggtgccagtctagagcttctggaaggtaaaatccttcctggagtagaggccctcagcaacatgtagttaatatagtgttacttccttctgttttctgtccatggcccttaagtcagcttaatgcttttacatctcgatgtgacttttgttaaaatctactcctagatcaagacctatgtaatggacaagcagcaggccatcaggaactcttaatatcagcacagcaattcattttagtttggtcacgcatttgcctgttcaagttctcatttgaacttcaccattgtgctatctagggaggacatattcttaagttgcctattaaagaaagtgagctgaagaaactgaatctttttattttagtccaactttgctattgtttcataatttgaaacccaaaagataaaacttaatttgttgggaaagggtggaatgaaagttgacaaacaaacaataaatatgcccaaataaactgagaaaaataattacatataaagaactcatgggtaccattaaagttctgctaaggggaaatgttatactaaataggaccaaaaaaaagagaaatgaaagacacttattaaacccaaggaatttttaaaaagaaaagaaattaaactcaaggtaagaattatgtttgtgtgcatatcaatgcacaagattacacacaaatgccagctagaaaaagagctacaagttaaacccaagttgtaaataagtaattgttttatttttaaggcaggcattatttaataaatagataatataactggtaagttctaaaacttggtttttgagataaataaaatatatatacatagctggtttaataatgggaaaatagagataaaaattctctattagaaaacagaagataaaatgataagaaatgtagaaaaaacaaaaacacttattggaaaatattttgctttattctgtagacagaggtagtttagggcaatgctattaacaagaatagtaattaagagtaaaaatgcagattaacctttcccagctataatgtcttatgtcccataaccgcagatcaattgtgatattcaatatcctgaataattgagcttcaaatatgaatcttaatacatctgaaatttcaacatattttaagcagaatgttaatatcatagtaatcccaggaaagatgtaggagttaggattaatggaaccaaaacttgagtagttgaaacaagaataaaacatgtcgctctctcacatgagaatccagggcaaataacatgggctttcctttttaaggtcatctagggaaccaaactggtgaaacagatctgttactcccagtgagggggttcagtctgtgtatggtatgaggccactgttcaagcttttgctacttgattgccaacctgaagggggaagttcttgaaaggcaattagttttcttttcaatacatgattcaaaaagtttagagatttgttttcatgtaacctgttggcattagttgtgagataaggcctattttgcaagggtagattggggatgtattctctctagctgcataccttgtgccaaactaaaaatcaatagattctattgctgaaaggaagtaaggaggggaaaaacactgaagaaaattaatggtttctgacagactgccatgctggcctcccaagtatccatgtacaagtattcatgttttgttttgttctgttttgctttccaaaaagaaaacatctgttctccaagagatacgatacaatcaaatgtccagttactgcaccctactaaaaactggatatctctgaattacgcacagttctttctgtgtgatccagtgggggcggaacagcgatgaactcaaaaacacagtcatttttctcatacctcccagcccctgactccatacatagccaatatacaatagtgaaaaagaaataggacaactgcaacaaaaatactcacctagaaaaagccactgattcattacaattatgaaataaatcactctggatcagaatttcaagaactccctgacctggcagcagccctatttctttggttagactggttctggtttctaggaggaacttatccattgtcctttcctggccagtcatttgaccaattgggacattttgtttccttaacttccatggcatatcgtcaagcagatggtatgcttcatcaggccatatcaggccactgcacagatttcctaacctctttttgctggtatagttttgcttgtttgtttttttcgaagacagaatctctctctgtcactcaggctggggtgaggtgacacgatcttggctcactgcagcctttacctcccaggttcaagtgactctcatgactcagtctcccaggtagctgggattacaggcatgcaccaccacatctggctaatttttgtattttcagtaaaggtcgggtttcaccatgttgaccaggctggtcttgaactcctggcctcaaacgatcttcccgccttagcctcccaaagtactgggattacaggtgtgagccaccatgaacagctgctggtttcggtttaataaaccaaggatgtctttttgtatcacacaattaaaagcctttcaatgctgagctagtggtttttcaactttcgcaagaattaaggtttctggtgtatttagtttcatttggaagaatttcaccaaaaatgtcttctagttacacttcttaaccctctgattcttgtttttaattaattgacttctttgctgggccctttttttcttttttttttttgagacagagtctcgctctgtcacccaggctggagtgcagtggggcatctcaactcactgcaagctccgcctcccgggttcaagcgattcccctgcctcagcctcacaagtagctagaactataggcacatgccaccatacttggctaaattttgtacttttagtagagacagggtttcactatgttggctaggctggtttccaactcctgacctcaggttatccacacccctcggcctcccgaagtgttgggattacaggcgtaagcctggccctgggcccacttttctttattttaaagacggctaatgtggtcatatgaaaaagttggtagtggtacgaaggcaatatttataatctaatctttgcatgtggctttttcatacttttggctgaaaagtccaaatgggggggggggatctctaaaaaaagccatgagtgacactctttctcccgctgtttgaagtatcgaggcagttagttttttcaactctgagagatctcacttttctagcttattagccaattttaggttatctccctaaaaagttctgtcacctctatttctaatttcaactgttcattttttcttagctgtgctcattttttgttataatattttactaaaaactacatgtaacaagcaaaatatactgacattctgcctttctaagcacttctctagctgctttaatctccataggaatatgttctgcctagtactttccacagttaacagttttatcaatgctgcagcagaagaattatcaccaccttccagccttcaatgcctcttcacttcttctcactgactcctaagtgaatgcaatattttataagttttattaaggcagcattactacagggaacaatgtctacattcgttagtctacagactagtggttctcaaacagaaacacatttattccacaggggacatttgccaaagtccagagacatttttgcttgtcacgaccagaagaatgccataggggtctagtggtagtggctaatgatgctacaaaacaccgtaaaatacacatgacagctttttactacaaaaacatattcagcctcaaatgtcaattgtattaaggttgagaaatcttgttctagaaactactataataaaaatacttaaaaatatagcttctcaagcaacatagcaattttactttcttaaggtaactttccaaggtggttagggataagcagacatttcttgagctcatccaaggacctaatagagcaaaaatgtctctgtcattatctgtacttgattttcatctctaggagcaggaggatcaattcagtcgttgacattttccaacctactgtgcagggaaaggggaattcagagaaaacatcgtcttcttaaagaggagcactggaagtcacagatatcaattttgtttatatcatctcagcctgcacttcataatatgatcacatctaagtgaaagggaacctggacaataatgttctataaytgagtcatcatgggccccattaaaactgttactgaaaggaagaataacaaagggtgaagttaagacaatatcaaaaagaagaacctatgacaatttcacaataccccagtagatccatggagaaaatgctttcatagatgatttaccctaagagaaaggagaccatttagagaacaagcacgcttcatttaaaaaattatgaaagaagaaaaatgaatatagaagatgatcacatgagatagaaaataaactgacaagaattataaaaatacatgacaaattcaagtactgccagtacaaaatattaagtggtgtagacataaataaaagacttgaaagtgcacgggaaaaaaatcagtgaataagcatattgaaaaaataacataacacaatgaagtcttagaaaaagatgtttgtggagcaatatacagtcatgtgcccagtaacaacatttcactcaacaacaggctgcgtgtacaacagtggacccataagatcatagttgagttggaaaatttctattacctagtgatgcctcaatgatcctgaccctctgtaggcccaggctaaggtgtgtgtacatgtcttagtttttaacaaaaaagtttaaaaagttaaaaattattttaaaaatagaaaaaggctatggaataagaatataaagaaatacaaatttttgtacagctgtacaatgtctttgtgttttaagataagttttgttacagaagttttctcttttttttgtaacataaattactgtttattttttccaagctgtcaaagtaggctgtgcccttgcagccacacaaatgtgatgtttactctaattcgttaataaagaaaaagtaggagtcaaaaattttaaaaatgaaaagtttataaagtaaaaacttacagcaagatcgttaatttattattgaagaaaaaatatttgtaataaatttagtgtggccttcatgtacagtgtttctaaagtctgcagtagtatacagtaatgttccaggccttcatattcaccctctactcactcacccagagtaattctcagtcctacaagcttcattcatggtaagtgccctacataggtgtaccatttttgccttttatacagtatttttactgtaccttttctatgtttatatatgtttaagtatacaaatacttaaccattgtgttacaattgcctacagtattcagtacagtaacatgccatacaagtttgtaacctaggagcaataggctactccataaagcttaggtgtgtagtaggctataccatttagatttgtgtaagtacacatatcccagttgttaaacaatgtatgtatgactgtatataaatacatatacatgcatctatcatatatgtgtgtatgttatatgtatatatttaatataatattttgtataattataagaattctgtagttacatataattgtatacattaaaaatactttgctatgtattaatatcaaatttttaaaaaccttaaaatgttaccataagattgtggtattgccaaggttgcaatttgagttatttaattcacatgcttgggtattagtattcatttattttctgtgcatttttaataatatctgtaaattgatatagcttatttcaaggaacattagttagtaaagctgtgataaacaccagtctttagtttcactctttggattaccacaggtttctctaactctttagaatcatatagaagccttaagactctccaaaaaattaaggctcataaaattcttcaaaagatacaacctcccatccttctccaaaagaatgtcatttggaagcaatcgctacccaaacataccctttatatatgtgtatgtttaaatgttcaagaaaaaaaatcaattttagctttcataatggctccatgcttgccctaaaaaaataaaatgaagaaaggagagattaaagagaacatgatgccattcattgtccccatggtagggtactatagtgtctcattataaacctttattttctatgacggccttcattactatccaaagtgagaggaataggtagttgattgagaatatctc

SEQ ID NO: 93444 - DNA, 151097 bp, Homo sapiens
  misc_feature (1)...(151097): n = A,T,C or G
gaagactgaaactccatcgatgatattccattcctttattagatatctgaagtgaaaacaaaagttaattctgggtaggagagtcattatttttctgtttaaaactttcccctattaaaaatttgttcatgcccacattagaaaatttagaaaatacatttattttatttatttatttattttttgagacggagtttcgctctgtcgcctaggctggagtgcagtggtgcgatgttggcccactgcaagctccgcccctgggttcatgccattctcctgtctcagcctcctgagtagctgggactacaggtgcacaccaccatgcccagctaatttttgtattttttttttagtagagacggggttttaccgtgttagccaggatggtcttgatctcctgactttgtgatccacctgcctcggcctctcaaagtgctgggattacaggtgtgagccaccaccctgcctatttttattttttattatactttaagttctagaatacatgtgcagaaagtacaggtttgttacatgggtatacacgtgccatggtggtttgctgcacccatcaatccgtcatctacattcggtatttctcttaatgctatccctcccctagccccccacatcccaacaggccctggtgtgcgatgttcccctccctgtatccatgtgttctcattgttcatctctcacttatgagtgagaacatgcggtgttttttggttttctcttcctgtgttagtttgctgagaatgatagtttccagcttcatccaagtccctgcaaaggacatgaactgatccttttttatggctgcatagtgttccatggtgtatatatgccacatttcccttatccagtctatcattgatgggcatttaggttggttccaagtctttgctatcgtgaacagtgctgcaataaaaaaaaaggggctgggtgaagtggctcatgcctgtaatccccacactttgggaggctgaggtgggtggatcacctgaggtcaggagtttgagaccagcctggccaacatggtgaaaccccgtctctactaaaaatacaacaacaaaaaaaatttatctgggcatggtggcaggaacctgttatcccagctactcaggaggctggggcaagagaatcgcttgaactcaggaggcagaggtagcagtgagccaagatcgcaccattgcactccagcctgggcaacaagagcaaggctctgtctcaaaaaaaaagaaaaaaagaaaagaaaagaaaagaaaaaagcataaaaaataagtaactagcattcagatgtaatcaccatcaacacttttttctgctgtgatgtgtgtagatgtgcatttgaaattgtagtgtatatatagttttgtaaaatgcttttaaaatgtaatgttttatattttcctatgttaaatgttctgttaacacatgcttatcagcagctacaaaatatttcatcttctgtacacaccaaaatttattctatcatttttctacaggtagatatacaaactgtttccaacctttttgtcactgtaaataatgggctgtgaacattgtacatgtctgattatttccttaagatatatttccttaagatacatttctctctctatatatatagatatatttatatttaatattatatttatatttaatatatatatttctctatatatttctatatttcttaagaaatatatccttaagatatatttctaggaagaaatgccggccagacaggttcaaaatgtatgggcatttttaaggcaattgatayrcattatcaaactggtttcccaaaaggttgaatcaatttaagcctctttaattgggtatcaagtcgcctgaactcaccccacctctatagcaaatttgtttttcctgggcctctgggcttattttcttttggatttcctctagcagtggttcagacctcaggaagggagtggcttctggctggagaacaggcttggtgggcgatttccctaatatttgctcctgtgggaacctcagagccaaccccctccctccgatgatttcagtcacttccagtcattaggttgaaggcctgtcttgttactgctcaccacctcctacgctgcggctgacacatgtactggagcccttcagagaggaaggacaacccgttatttggtagtttgctgtcttataggaagctagggacaatactcagcaaaaacacagattcaccctaagtggctgtgcctttctaactgtcataatccagccctgatgttcaccgtcactgccaaaaatcctttccaaatgggaactctgctccctatctgaaactgattctagttaaggggccactgatgagtatcatctggctcagtaggagaacgaatggcttagtcctggcctgttaacatttacagatatttgttatcacccacattccagggaatttgttgacataagccccaactattttgaaagagcattccaccttgggatactgtactgcttttaaacttgtgtctatataaggcaggaattatttcacattcgatggtaagatttccatccattcaacatttaaagtaaaaaagtagctgcctcccactgttctgaggatacgtagctacaacctcaccaagaccaacaagcctgtctggtttcctctcatgagaactctcgagcctccttgactttctttctggctctcaaacacagcacattcccccagcctcggggcctttgcatgtgctacttcctttgcctagaatggtctccttcctcctagaaattgctcctgactcagcagattccactccagcaccctcctttgcccagtcctattagaatcctttagaggaactccaaaaccccatctgcaggcaaggctgccctgatgccccagacgaggtctggactctggtttatattatcacagcatctggtggttttgcttgtgatgctttgcagtttgtaattctatgtttatctgtgtcatcagcgttgaatatctgtctctctcattagtgtgtgaggtctaggcgggaagggacagctttttcttatcaccaaaagcacgtggccaccagcacaatgccggccagataggtgctgaattcatgcttgcaaatgagtaaatggatactgatatgctgcagctgatggctggggtggggttagtgcagtgactgagtgtcctggcacgcagtgtttattttattttatttttattttttgcagggggatacattatttctcatgccatataaaagtgcctctcagggtggaggtttttttttttttgagacggagtcttgttctgtcgcccaggctggaatgcagtggtgcaatctcggctcactgcaacctctgcctcccgggttcaagcaattctctgcctcagcctcctgagtagctgggattacaggagcatgccaccacgcccagctaatttttgtattttagtagagatggggtttcaccatcttggccaggctggttttgaactcctgacctcgtgatccacccaccttggcctcccaaagtgctgggattacaggcgtgaaccactgtgcctggccagattctgggtggattttcttaacttactagtgatgagactttcttactaccttggcttcagtctgattttaaaatgaggataatatcttacattttcttcatcctaagacaccaccgactttaagatgatcatcatttaataacaacttttcagtgaaaaaatccaaactagaccaaataaacaataaataagataaaacacctcactatagctcctgcatgttggttttaaaacacatattgattgtaaaacatacccaatttccaggcatgctaacatgttaaaaaaaatgaacatgtttagaatttagacaaaatgtggcgatgcctaccaaaaaggatgactgttcaaagagatgatgcatgttcattgttttgccacrtgcctggtatacctgaagcatttattactgtgaatactatcttttcctttgaaagggttcacttgttttcggtctgtgggttgtatattcctaaggacattaaagggcccatgtcttctatttctttataaattccatctcccctgccccccgcccagtatttggtaagctatgatgaacacaccgtagatatcagtagtggagactgatggaggcatccgtgccatgaagagcaaggctgttttggaccctgcttcctgcttgggaggagtgaagggaatgaagccaaaaagtggggaactggcctttctcagaccatctgtgctcaggatctggctcctttgctaaacaatcaagggaagaaaagccccctgtttggtgggactgcattctctgttgtggtcaggatgttattgttgtcttttctgtgttttcacggaataacattacagcatgtttattctcagagatctttgttggctgtttccagtcccactgccaccgcctggcccaggccttcatgacttcttgcttgtcccatgcagttacctcccaaagaatttcccgctggtagacattcctctctgcagctggcccgatttaattcagacgagatcgggcatgttcggggtgatacggcggtagactgacccaatttaattcaattccatacaaatgagcaaggtagtgttgctgggctcatcgtctaagttgtgaagatgctcatctcactcccctggtctcctgcagagactggttaagctgcaaaggctagtagccacagaaagcattattctcatgaacacgtagagaataaagtatggtctggtgagcaaagctttgctttctgaagttgagtctcattccaacatccttgcgttccttctcttctcagccttgatttgttcctgacttcctgtccagcctcagggtcttgatttggtcaagcctcagttgcctctgatttctggaaaaatctcctttgcttttacctcactcagcacactgtctaggcttgtcacacagcacatgattacattttcctattttggaatatactcagacaggcacaaagctgatttctagactataaactccttgagagcaggagctccatctcatttatctttatattgtagtttttacaggtagcatgcataaaatgagtaagttgcttaatggtgactgaaacatcaaaaggaatttattatagggtttcgactcaggtgctaaaaagcagtaacaggtatttctttttcttctttttcttgatttttttttttttttttttttttgagatggagtttccctcttgttgcccaggctggagtgcaatggcgtgatcttggctcactgcaacctccgcctcccgggttcaagcaattctcctgcctcagcctcctgagtagctgggattacagacatgcactacyatgccyggctaattttgtctttttagtagagatggggtttcttcatgttggtcaggctggtctcaaactcccgacttcaggtgatccatccgcctctgcctcccaaagtgctaggattacagccgtgagccaccgcgcccagctgtaacaaggtatttcttatgtgtcccataaattaaatctaggggaaaaaactatccctacacagtgaagggatctttcttttgcaacaatcatttttttgtgtgtgtgttcttcctttgaattaatttaatggtgcaaaggggccttcttttctctgatgggcagaggagggatgtatatactgtcagattatgctattttagcaatgtgtccattcatgcatgtatccagtgctcagaatgcagccagtatatattttaaaaccaacactggtgctttatgaagggtgggttgaattcagatgtaggcgcaaggagccaaaggcaggatcagctctagcttggtgacctggacttaggtcccagatgggtgaggccaagccttgctgccttcttctcagcggtggttcctggggcacagaatgagaatgctaaacagcttcacccttaagaactaccagctttcaaggaaatgggtagcgcagagaatggctctaagccaatgaccttgcggcatttggaagcagaaattcacagtgtttcaggtgcgctaacaaaataactcggtaagcaacatagcctattggggtttccctattacattttatggagtcctcaaattttaggtgattttttgaaaataataatttttggcacatttaaaacttatgtatgtatggatgtaatttctaaatccaatctcttctttttttcagtagaccaaattagattgccatctttatcttgtggcagacatgtgtttccaagtgcaaatggtcacctaacaaaaaacaatayggttttactgcctgatagatgattttcagatttttgaaaattatcaaaaagtcaaaatagcaatttaaaattttaaaaaatgyggaaaagcctttgtaaatatttgaataggctcaggggctaatgaatgtgggtgtcaacctcagtgtggagtggattgaacttcatggtcttgagtgtctttcctcctctcagtatctgcctctgcagatataagacagaaacagagatgacagacagcctctacacactgaaaggatgtgaagtaaatacaataatgcgtgraaacatatccttagaccaacgatcacgtctaggtttgaattaagtcatgatcctargttgtcttaggtaatgttctttctgcatagatcccttataaaaaattcctttctcagtgacagatgacaagagctcacctgtcaaaaactgttctgtaaaaatcatttacctttccatccttctctgcattattgyctttatttttcaggcactgcaaaagtggcctcattttcaatggcaggtgttagcagagtggtcatcctgtctgtgtgtgttccatgtcacccctacctgctggtagccgtgagtgggtccccactgctggagacgtggttttctcttctcagtgctggcctcccgggtcatggtaagccctggaatttctccaaggcaaagaggttttagggcaagacactctctcgtctaatttttcttgcattatttcaactggatactaatagaaaccaacaggtgagtaacctcttatccacctttgggaaatgcctacctggtttcctagatagaagctatttgatgagaaatgtcattctgtagttctttctgagtcttgcgatttttatcacagcaaagttatttgccttaaggacttttccaaacccattactttcctataaaatatcctcaattgaaataatacacttctcgttacgtagttactttcmttgctggagactcaaaaatacttgaaaaatcttttaaactcctcttcaaggactatttttaccactgtaaaatttacatatggtgatatatagcaactgttttaatagcttacagccatattaataaaatctagatataataagacaaaaaggattctatatctcaataatagtgcagtgctcacttagaaatgctgaataatcactctggctggaattggagcagcaaaggcactatttgaagagcattatatgatgcctaatgacctagagaaagtatgaccaagctttctatctaattggaaaaacacccttccttctgatcgggtttgtggggacaattctgctgaatgccacattttctcatttgcctttttcttacacttacataagggatgccagctttagggtagatytcatataatcactggtgaagtattgcttctcaatcctttcctcctacactgcaaagcccatctttgaagggttccaaccttatsaacccataggtctgcttaatccattggagctgccaaccttgcagggggtgtgatatgagggctaacctagcccaatgctttatcactctagcctckccaaaaatgctaccatcctttaaaataatactttgtaaaatttcagcaccggtatggtttkgatacgtgtccccacccaaacctcatgttgagtcataatccccagtgttggtggtggggcttggtgggaggtgattggatcatgggggcagatttctcatgaatggtttagtagcatcctcttggtactgccctcaggatagtgactgagttctcatgagatcagctcatttaaaattgtgtagcacctcctcacccgctgtcttactcctgctctggccatgtgatgtgcctggtcccacttcaccttctgccatgattgtaagttttctgaggcctccccagaagctaagcagatgccaacatcatccttcctgtacagcctgcagaattaagagccacttaaacttcttttttattataaattacccagtctcagrtatttctttayagcgatgcaggaatggactgatacaagcaacttttctttaatatattgaaaattgtgacacctgtaatcccagcactttgggaggctgaggtgggtggatcacctgaggtcaggagttcaagaccatcctggccaatatggtgaaaccctgtctctactaaaaatacaaaaaattagctgggcatggtggtgggtgcctgtaatcccagctacttgggaggctgaggcaggagaatcgcttgaacccaggagatggaggttgcagcaagttgagattgcaccattgcactccagcctgggcaacaagagtgaaactccgtctccagaaaaaaaaaattgtgttatagcaagtcattttttagtattacatgtaaatacaggtaactatttgctctatgtgagtgtatactactacactatatcwcgagaaaaggaaactccacaagaacttgctctagcaaaatgggcttttctagaaccaatattttttacttaaaaatagttgataagtcaatgtttaattccacccacccttccccccatggaaggacttcctgggcattaggaatattttgtaattacatagttattttattcttaggatgtcagtgcctgaaataattcattccaatagagaaagaatgtttcgcttcaactttagcagaaaattgtgatttttacttaagattgaaatcaagttgatgataattgtgtggctgaaatacctagcgtcttttatgttttttatcatgcattttaacaaaggatttatattggtcttagtattgtccaactggtgcatatatatatatatatatatatgtttagttagttattatttatttctttatttagagaagagtctcacttgttgcccaggctgcagtacagtggtgtgatcttggctcactgcaacctctgcctcccaggttcaagtgattctcttgcctcagtctcctgagtagcggggactacaggcgtgcgccaccacgcctggctaatttttgtatttttagtatagatgaggtttcaccatgttggtcaggttggtcttgaactcctgactttgtgatctgcccgccttggcctcccaaagtgctggtattagaggcgtgagccaccgtgcccggcctggtatatttttacccaaggactagattattagttgctagtgggtaaggaaaacaacttaaaattcctttgcaagttgtctttcagcacatggagaggtgggagtgcagcccatacttaccgtaggagataagccagatgtctggcactgaaatgaaacatctgtcagcatttgattgtgtcatagacaatgcccttgccacacccntacattaatgctcgaagaaaaactgtggcrtgtatataatggaatgtaggtgggccaaatgaaaacaaagatttaaggattctggagatcatatttatacttttgttactatttctttttttgaaatgtgcgtgaaggaattaacaattatatagtaatataaaaattatcctgtgaatgaacccggtaatatgacatgtaacttgacaacgagyggtgataaataattgctctaggcttcttcagtttttttttttcttagattcccttcctaccaatatgctctgtctgtgagacaccagatcttctataaggctgtggtctatggttgcacttccccagtggattattcttctcagaactctagtgtctcatgaaatgatatgttaatagttatttcacgaaaaaaggagatatgcatgcatgcagacgatctctgacttttgatggtttgacttaatttttgtactttacagtgggtttatgaaggtattaaatgcatttttgactcaatgttattttcaatttatgattggcttaatttatgattggcttaataggacataaccctatcatcacttcaagagcatctctctctctctctctctgtgtatatatatgtatatgtgtgtgtgtgtgtrtatatatgtatatgtgcgtgtgtgtgtgtgtgtgtgtataagtgtctcacaaaaagacttattrtaaggaattggcttgtgtgattatggaggctagcaagtcccaaatttgtgatatgagctggcaggttcaagactcaggagagccaatggtgcagatgaagtttggaggcaatttattgaagaattccctcttgctttgggaggccagtctttttgttctgttcaggctgcttgaatgagacccaccacattatggagagccagcgcttactcaaagttcactgacttaaatgttaatctcctccaaaaacactcttcaaattggcacataaaattaaccatcacactggcaaaaaacaaggggtggtgggagtgggagggagagaaacacggcatgttatgcatgttacagtctcctcctggagggagaatcacaatacacatgaacataaaggccctgagaagtcctgcagtgaagatgtctttttatatttgtatgaccccatctttcccaaatttatttgctcatggaaactccccctgcccccaatgttttttctgtgaaaatgtattaccattgtgctagattactaatgttcaggggaacacagtttaaaaaaaactggtctatgggacactatctgttctggcaactggatcatttggagataaattgataatatcagcttcattaactgaacctagtagcctagatgggcatttatccatttaatgtattggctatatactcaagtgtatatagagggtctcctgcatgagattccatacacgatgggtaacgtgtgaaacactagtgcacttacaagtatcatcaccactaacacaaaataagcatctgagaaagatgccaaaataaagagaatcataagtaaagaaaaacaacatcgccacttgcatattcataggcttatgatgtatatattttttaactcagggaaaaacaaagcatctttaatcctatcgtcctggaaaacttgagtatctcaatgcagaaaggcatgaaaatatctttttttatttttttttyragatggagtctcgctctgttgcccaggctagagtgcagtggcatgatcttggctcactgcaaactccacctcccggattcacgccattctcctgcctcagcctcctgagtagctgggattacaggtgcctgccagcacgcccagctaattttttgtatttttagtagagacagggtttcaccatgttagccaggatggtctcgatctcctgacctcgtgatcygcccgcctttgataaaattttctgaagcctacattcaagtatgtgacaatcctaggtgaatcactgaaactctcaagctgtataattttatatgaaaacaaatggtaaatttgtacagttaattcttagatgactatcacgttgagatagtaatcatctcaccatgaatgttactaggttggtgcaaaagtaattgtgttttttgccatttgaaagtaatggcaaaaaccacaattacttttgcatcagcctaataactcctttttgtccctttctcctttatccatccccagtcattaactctggcaygtagcagcagaagagggcattggaaagagtccagtggagcagagaaaggtggggagtggacgatcaagggcagccaggtcttgatttggaaaagatgcccgtggaagggacactcactgaaaaggtgacctgtgtgctaaataatgaaacatagattttacccaccacgaacacctgtagaagcactgagggcttttcagccaggagagatgcgaatagacaggcattagaatcattctgatatccactgaaacataggttagtgagtgggggttatgggaatttgggagagagtaagtcttagtatgctttttggggtacctatcttacctatcttacatatttaataagaacatggcttctcgagggcaggtacatgtgtttatttatggctgataaaagaaaaacttcagctgaattaaatttaaaggagttgggctgggcacagtggctcaaacctgtaatcccagcactttgggaggctgaggcaggagcatcgctgagctcacgggttcaagaccagcctgggcaacatggtgaagccctgtctctacagaaaaatacaaaaattagccaggagtggtggcatgtgcctatagtcccagctacttgagaggctgaggctggagaatctcttgagcctgggaggtataggctgcagtgagccgagatcacgccactgcactccagcctgggcaacagagtaagaccctgtcaaaataaataaataaataaatttaaaggagttgaattgagcaatgaacacrtgaatcgggcagcctcctaagccagagtaggctcagagactccagcacagccacgtggtagaagatttatggacagaaaaaggaaagtgatgtccagaaaatggaagtgaggtacaaaacagccggttaccagttggcatgtgccttatttaaatatggttcaaacagttgactacatttgattgaccaaaacttggtgaattggcacaagtgtaggctacagtctgtttacacctccattggctatagttcacgatgtccagaacttcaaatatttcaggttgagcttaaaatacgtaaggaggaagctttaggctaaacttgattaaacactgtgcagtctgttttgctacaatgtgagcttttagggcaaaattttgctcacgtgcaatttgtaaataagggaataatgtcagtactgaactcagttttgtgcccttccaaatgttctcagcacctgcacccccctcttcctggccagagaggcttccagacagctcatgcagctacctggtcttccagtagagccgcttgtctcatcctctcatcctcccctgggtgtgaggccatggtcaggttctagaggctatgacagcaatggcattctgtgcagctggaccctcaggggctccagtttccctggcggctatctggggtgggatgccacctggacgttagcakaattacttgcactgtgaggtaaaccttagcaatgtgggacaggaggcaagaagaaactggcaggtcaattgccggcctcccttccgccatatttcctgagatgtagtaattccctgtgacctttctggagatggcccacacgacccagggagctggggctgttttcataaaactgtggccatcttggtaacagaactttaaattccttccctcttccctgattcattcctcttcccccgtcactcctccaaacacccacccctaataacctgaaagttttgcctcagggctgttttccagagaagcaggtgaagacgatgtcagtgtaagaacgtggaagtcatttcggttcatacatgatttttcttacacaagggaagccagaatagatcatgggagtggaattataaccttcatcaggaagggggtaagcctccaactcagtggctgcccaagcagcaaaggccttttggctgaattttgagaaaattaaaacgagggcctgtttctggagccccgccttgagagacacaactctcggctaggttagatggggctgcctctgggcccagatttgccacagccctaccggctacgagccacccccacacttgcgttcctcagcactcccagctctgctctaactgaagtgtggctaacatgtttactgtgttgtttctgtgctttttttggagatggagtcttgctttgtcgcccaggctggagtgcagcggcacaatcttggctcactgacctcagcctcccaggttcaagcaattctcagcctcagcctcccaagtagctgggattataggcacctgccaccatgcccggctaatttttgtatttttagtggagacagggtttcaccatgttgactaggctgttctcgaactcctggcctcaagggatcagcctgcctcagcctcccaaagttctgggattacaggcatgagccaccgcacccagccaatgtttctgtgcatttttaaccgcccagtggcagcctccagccaggctgagctgcctgcatggtggtttccagttgtctccccaggaaccaattaccgtttttgtgagtactctggttacaaagctgcataggtttgaagtggtctgyctaatcctatttttctcggaaaggcagtaataagtgtgtgatttttgagaatgttgaggtatattcaggtatgcctatgttgcaatctagcagaaatgttggtttctcgagcagataaaaaaagacttgtggaatgaataaaatgctttaaaaattattcctagggatatggaaagtgacattcacatgatagtatgaatatttttaaaactttttgtttagagaggattttaagccctttcattgtagctatttttaaaaaacaaacatttccccattgcagcggcgtaccactggaggagataagaatactatgatgaacatctttctgtagcccctctgaatccactcttctccctttttcagtgtgttctgtaccctggaaggctggaactggaaggctgactacatcagggacgactctcttgctgtagggcttctgttcggtccagccaatgccagacaaagcagggaatacgaaggtgggagaagagcgaggtgggcccactgcttttttttktttttttttttttgttgttgttgtttgttttttttgagacagagttttgctcttgttgcccaggctggagtgcaacggcgcaatttcggctcaccgcaacctccgcctcccaggttcaagcaattctcatgcctcaacgtcccaagtagctgggattacaggcatgcgccaccacgcccggctaattctgtctttttcttagagacggggtttctccatgttggtcaggctggtcttgaactcccgacctcaggtgatcggcccaccttggccacccaaagtgctgggattacaggcgtgagccaccgtgcccggcctgcccactcctttgttaaaactcctggtctgtctgtgtcacctatttcctgctggtgaggcaggagaatagggtctgcaggcaggaaacctaaggccgattcacgctgayttcctagaactaaatcaaaaggaagaccccaactttccacacctaagtaacaaaaaaacaccttgctactcaccgccaactgctgcccgcccattttttgggtggcagacggaaaattgaaagtatctctgattggctggtttctgcaaccaatcagactgactgccggccaagtcttctttgcctagaagtgtaactttgtaacttcactttagcctctgattggttgctttccacaaccaatcagatgcttgcatagggtgtaatctttgtaacctcacttcagcctctgattagttgctttctgcaaccagtcagatgattggggccattacttcatctatacagggtgtacaccaagtaacgaatgggaaacttttagagggtatttaaacaccagaaaattctgtaaagggtcccttgaatccctatgctcgggccgcccccacactgaagagtgtactattattttcaataaatctctgcttttgttgcttcatgctttccttgctttgtttgtgcgttttgtccaattctttgttcaagttgctgagaacctggacaccctccactggtaacgctaggaccctgactactaaacacctttctctgaaggtttgtgtatttcctaaccttcagcagatgaatgagtgaggcaacttcaataacccttgtcacattcattcactgtacaggaagcttgtagttagaaattaataactggggaaatgggagatatttcactctgtcttcaaagaacagtaaagagtatctcttccttggcaaatgtgtatccataaaataacattataaaatgcatttgaaaaagtgccacttaaaacataagtcaatctgtttttcgatgattcagaagatatgatagtagcccgcagtgtctcaggagtcatggtgatgactaattgtactaaagatctgtggaaagtctggttcatgggatatagagagcagaattttctatattttgggtgtgcgaatcctgcatgtctactgtaaaaatcccttatgarcactgttaaattataataaaaccgggacccagcaaaatgaccccataaaaagttctgtacttttaaaataaaatcagaaatattatcaaatgtctcctacattccagacactattatagtttgcttaccatatttcctttcatcttcaggacaacccaacaaagtgggttttatcatctgtcttttgtagatgaaggaacgggctcagagaagtcacaggttcaaggtcacacacccagtaaggggcaaagcctggattagaggccgggcctgtttggttccaaagttcattccctttcatgagaccaactgccatttcgaggattgtcaaaagggaattctagaactcagaactttttggcttttctgagctttcatggttttgagtgatcctgaataggtgaatcccagcaggctgtggaagcgagtgcttctctttctgttcttttcttctacagaagccgagtcttatgatttaggcattgctatgtgtcattacccactgtaatagcataacgcactgagattagcttgcaagacaatccttcactgtgatggctggcaggcgccacactgtgagatcctcggactgaacttttcacccaaagaaatgcaggaagctgtcctgtcgggcagtcacttacagtgctgtgccttggatcatggagttttagagccggaggggaatgcctataatgaaagcaataatttttacttactcgcaaagacctgtctcaaaatagtagactacgcttggcaggcaaaaaggtaatcttggtttttcatgtcccataaacaaggcaacaaactcttgtgtgaggaggtaaaataaaggcttagtttttcagggttttatgttcctcagatgtacatctgagtatgtcttaaatcctgaagggtggcccagacctggagaattaatcccagctggtctgggggctgtggtgagcagtgatcaagcaggacagcacacgagaaggaggtgagttgctggatttccatgtgtgctttgcgtggagcttgcagctgaccagacagcaagaccagagaagcagttgagagcatgsgctctggagagagactgcctgggttcctatcctgacgccgccactcacctctctgagcctcagtttcctcccctgtaaaatggcaataacaagcacatgcacctcaaggggttgtcctgagccttgctcaggtaacacatgtgaagcatggagaatggggctttgcacagggtaagccatctatgtgttagtgacaattcttgtgattttcattttttcagaggctcagaaatgtgaatcaacctgtggtatggtttggccatgtccccacccaagtctcatcttgaattgtaactcccataattcccatgtgttgtgggagggaccccatgtgagataattgaataatgatggtggtttcccccatactgttctcctggtagtgaataagtcttatgagatctgatgcttttgtaagggaaaactcttttctcttggctcttattctctcttgtctgccaccatgtaagatgtgccttttgccttctgctatgactgtgaggcctccccagccrtgtggaactgtgatgtcattaagccactttttctttataaattacccagtcttgggtatgtctttatcagcagcaggagaatggattaatacaacctgtctaaggtcctacagcttgtaagtgcgtgcattgggacttgtgctgcccagaataggtggagggtgtaaatgtcccccatcctgagactgtctaggggaccctgaagttagaccaggggaaaccagagacaagttcgtggtgccaaaggcaagagtcaatattgaaaaccagttccatgtgagattccccgtgaagagaattctgcagacctgtggttttgtgtatgccaattttgaaatattcttcctttctgcttccatgattcttctgctgagagaattttctctgctgagaaaggttgtgggtgatggcattaagccatcaagaataaaggtattcacagtctttccagtgtctgttcagtgtggaacctccagctcctagaacagtgtattagtattcactgatgtttattaaatgaatacttattaaatgagtgaaagaatggatgaagggagggagagatgactttttgaatcaaagttttgtgtaccaggggagagcagacaggagcttaatgatcaccactcagtgttccctaggctgggtccaaatatggccccaggggagctggctgagagacgacaaaagcagggtgtgtgaatggcatgttctcctcaaagactgcatactccccttcttctccactcctggggtgggtgctcagtgtgtggacagtggacccaccyacatgggacccacagaagggctttcaggacatgcaaagagaatccctggtagatccatttttcacttccatgggtcagagtggctcctgggacataacyaaaaaacgcattgtggcctccatccggagatgggggtggcagagagagtttggcccagatatatcggttggaaggctgtttcaggaattcaggtgagaactgaagagggcttgcattcaaacacaggtggtgagaatggcctggaggggatgtgttctggaaatctttgtagggtggattgtcagcactgattggattcatcacatcctgccctgaagccttagatgtccccaaataaagtgagtttatagtttccagctgagaattttggccagctaccagctattgctaggaactggcttttttagaatggccactatagtcattgtttttgaatttctgagtaccatttgtttggttctacagtgtgtttctttccatacttaatagagatctattgaaatggcatttaactcaggatttttgcacctatgaagtcactgtacctttccctattaacttaatattggatctcttcccctcccccaaacttctctctctctgtccctctctctctccacatcccaccccatctcctttagttatgaatggctccatacatttcaggagcaccttgccctataactttgattccgatgcaaggaatggaaaacctttgtagctcagaagcatcttaaaattcattcatgattcccttgatcttcattcatagggtagaaggagactttggctctggtaaagacaggtatgtctggtgtcagggacccctatcattctaaaagcaggttatccctcatcctatgctcctcctttgaagtctctagttcttgtctagaaccaggaagcttccccagagatttgctgcaattgctgacagcttccggacctgtccttgttctggtagtaacacctgattgccagccaccatttacccacaccaggaaggttgcttaaaacaaggcagagagcaggccatgatcagtccactccgagattttgcttcacgctttcccctagggacttgccttcttgctattaccagttttctgtgctcagttcaggcctcaggctgtctgatctgggcctttctgctttacctgggctttggtgctgtcttccaaagcccagctggtctcagctctgcccgatttccaacctgcacctccctgcccagtccggacctatgagtgccatattctaatttatccaccgggacttagaaacttctctgtgccctctggttaggtttgggaaactgggctctgactttgccactgccttttccatggtcctttccagtggtgcttcatgcccctgcatgacaatggaagccatttggcctgactgtcaccaaataaacctgtttggctaaaagagaagatacgctctcattccctgaatcattatgtaggacatctcctctgagcaccattcagtcatttcacatttggacctgagatttctaagttcaacctcttttatcattcatcaaattttgaaacccaactatctatctatctatctatctatctatctatctatctatctacctacctattatctatcttctatctatctatgacttgtcatctatctactatccatctatttatctactttcatctatctatctatctatctatcatctatctatctatctatctatctatctatctatctatctatctatcatcyatctatctatctttcagagacaggatcttgctctgtcactcaggctggagtgcggtggtgcaatcgtagctcactgcagacttggcttcctgggctcaggcaattctcccacctcagcctcccaagtagccaggaacacaagagtgtcataccatgcctggccctcaacaatttatctggaaattttatttgatgagcctaactactttgattacaccttttagatttgagctgtgctcactagtttgtgtttaaggagtatacctgttacttgggtttgatggggcttaggatatgctaccccaaaatatggcaccttggcattagagaaaacagtagaagcaagaaggccactctgaccttcccctacctttctcctccaaagtggatgaaaagactctggtttgggaggggccctcattattttgggaggaaaggaacattcttatatctgaaaacacagtgacacagagaagaatctgaacaaacaggccttgctaagttccccccagtttattactactggattataccactttgtccaattacacttctccacgactacccaattcttcatcaaacctagggtaaaaaggtacacataattacctgcattgaaagacaaaattataacaaatttagtttaaaaaccttaactggcttttatttgcaatcccagaatcaggcaacatctcattctataagatagagatgagcgggggagattggctttacagacaaaaaagggctgaggaaagcaaaaatagaacaaaaagtaaattggtcattttaaagtaacttttcttgtaaagttaaagggaagagggcttccttattatgccagctaaaactggcctgtttggggatttggctcttttctctctgtcttcggatttcctgaaaggtcagataaacaacttaactaggtggcatgaaactttagcatgagtaaccccattgtggtttggtttgttgggcctagtgcgggagctcagtctaaaccaatggcctcctatcaatttctcagagaagcactcgtgtcttgggtctgcatttctgaaggctctcctgccatgtaaaagttatattaaataaatctgtatgcttttctcttgataatctgcctttagttatggggggctcagccatgaacctagtgatgggaaagaaagatgctccctgtaggtacctgccattttcctttgtagggcaggaattacttttctgcttgaattactttatagtgtaactgttgggcctcagaaaatgatgccctgaaatgaaagccccagaagcagcttcagaagcaaaagtttttctctgacctcctttttcctgtctctcagtcccattctcccacaagaccagccatagaaactagaatcccttttccccaaggcgggttatcaaaaccagaatccccttccccaaagtcagccataaagcctgaaaatattactgtaggatcccccacatccctgtgtaaaaattggccacaaagaaattatctgacctgccttggttgattgtaggtcataagacccccattccagagagggtcctgccctgtactcagaaaaaaggaatgctggccaggcgcagggctcacatctgtaatcccagcactttgggagaccgaggcgggcagatcacatgaggcaggagttcaaggccgcctggccaaaatggcaaaaccctgtctccactaaaaatataaaaattagctgggcatggtggcacatgcctgtagtcccagttacttaggaggctgaggcaggataatcacttgaacccaggaggtggaagctgcaatgggctgagatcgggccactgcactccattctgggtgacagaacaagactctgtctcaaatgaaaaaaaaaaagaaaaagaaaaaggaatgttacacagacaggcaaaaaaaaaaaatctaagcagacaggacttgctggacttccctttactctattggccttggatcataacctttttgttcacttatatttctgcgtggctgttcccacattgttgaacctaagcattaaaaaaaagcaattaattgcccctgtatctttaggtcttcattctgaaggttcttgtgtcatggaaaactatgatcaaacatatttgtatgccttattttccccattttctgcattttgtcagttttggttttcagtgaatcatcagagggcaaaggggactttttctcttatccccatcataatcaatgcactcaagtatggtctaatgcaaccaagaatacatttggagaaaattaatgctattgatgattactgaaaagtggctcatgcttgtaatcccagcactttgggaagccaaggtgggaggatcacctgaggtcaggagttcgagaccagcctgcccaacatggagaaaccctgtctctactaaaaatcaaaaattagccaggcatggtggcatgtgcctataatcccagatactcgggaggctgtggcaggagaatcgcttgaacccggggggcagaggttgcagtgagccgagatcatgcactgcactccagcctgggcgacagagcaagactctgtctcaaaaacaaacaaacaaacaaaaaaaaaaaacaaaaaaaaagaaagttgtttctttgtgaaacagaggtactattagaaaacactttaatgtgctttctgtttgtactttgggtatgtaactttatccctggtcagcccaaggtaaggtacagttctggggtaagttaatggggatttgttgacattacaacagaaataccaagggaaacaaaggttaatagcccctgacgttcaaaataggtttttgctgccaaacaatagatttgaaaccaggtttgcctagagaagattccccaaattagcacataggacagaacaacagaaaaggtaaggaagaagacacattgtcttgatcacatatttccagaacagaatccagagaaaggargggtgctactggagctgaggggaatgctgagagcttggggcttttggtccattttaatgtttgtagccctgggaggagatcacctcaagagttgctcccttgtgaacctgggggaaagccactttgaagtagactagggaacagagagtgggccaggatctaatttgcctgagttgttcttgcttccagagggtcatggaagtgacctagaatttctctccctctcatgggattggaggtggggagggagacccagaaggtgactgtttccggacagcaggtcttggcccggggcgcactatggagaggagccagaggccaaggggaacactcaggctaagagctaacagaggatgggcggggtctcctgtgcctcccagagacagggaggccagctgtgtgagaaaggagcacctggccaggtgacagtaatcatttatttttacccgataaaggaggattgtagcatagtacctgtgtgatcgcgttttcctcaacagtagaacccagaaggacaggcttcgagaactcggtggtggttgcagtggttcttaggattatagataatcttgactttcttccttctgcttttctatttttctgatatatattgtaatgacaaagtgttaattttgtaaaaagaaaaagtaaagctatcttaaaaaaaaaagagaatcagactagacacattactctgtaactttttaatattccaaagccatccctataagtttgtagacatctctcttttttcattttcatttttttggaaacagagtctaactctgtcattcaggctggagtgcagtggcgcaatctcagctcactgcaacctccgcctcccgggctcaagcaattctcatatctcagcctcttgagtagctggggttacaggcatgtgccactatgcccggctaatttttgtgtttttagtagagacggggttttgctatgttggccaggctggtctcgagctcctgacttcaagtgatctgcctgtcttggcctcccaaagtgctgggattacaggtatgagccaatgtttctggacttttctttttctaaaaagcatacatatacttttacacaagtacaatcatattttttggttcagtctcctttttcctttgcctttgtcctgtattgtccccaccctccagttccccaggaaaagtattagccacctggtgtactctttagtactttttttctatctaaccatctgccttatgaccatatatgactatgcatacagacttgcatacatcatatacttgtataaaaacattgagattcacacatatgtaaacacatttataagtgggtattttgttacattacaaagatgggatcatactatgaacttatctctgcatcttatcttttgtactcactatcacctcctagaaattctccaagtcaactggcataagtcctattcatttttttttgaatggctctgtaatactctatgatgttgtcattcatccatctgtaagagttactagcacttcttttattattgattcttgaagatggtggctgtttggccactatgatttgaaagcttatgatatgttctatattttaaataacattgttttattaatttgatgatgttaatacacctagatatttttttttcaaacaaacaaataatttaaatttaccagatgtgggggaatggaatacaaacagtaacaaatgaactcaactcttttacaaattataattagaaccacacagaattggggcacgaaagagctaaacaaattaattttaaaaaagcaagagtttttgactgtatctttaagtctaaagacaaaaagaactatgcacaaatactttactatagtttacaaatgtgttttcacaagggtatgagtttgcaaatgtgaaattactttatgtgtatgctaggattgaacaaaatgtaaatatactgtggatgacagccaggctttcttttttttactttttgaaagtttttagtttattagtcttctcgatacacctagatttttatccgcttatttctagagacattcaaatatgcttttcttccttcctttctttcttcctttttctttctttctttcttcctctttctttctttctttctttctttctttctttctttctttctttctttctttctttctttctttctttctttctttctttcttctttttgagacaagttcttgctctctatcccaagctggggtgcagtggcgcaatcagagctcactgcagccttgacctcctgggctcaagttgatcctcccactccagcctcctgagtagctagggctacaggtatgagacacacacctggctaatttttaaaaaaacatttgtagagacaggatctcgctttgttgcccaggctaatcttgaactcctggtctccagcaatcctcccactttggcctcccaaagctctgcagggatcacagttgagagccactgcatccagcctcaaatatgtttttctattccagggccaagacaatactctttggttaatacaagcactagagagtaacaatgcaggacaattaatcaacaaatatttgagaatctctattatgtcagatacaaacttctctttaattagtggtttttcacaaaagtctttgataggacttgtgcggttttctgtggagagattaacaatgggcccaaattaagaaggtggagactttcatttgaattaaccaattattggaaaatgggcttgatcttcagaaggcaataaggtttttatgattttgctaaaattttcattgcaattattacagatagtgttttgcattcaggtgtagcccatatctggtttttagaggttagtaaaagaacagcttcctattgttaatctctctttaatctctctagtgattagcttattttctaaagatctgagttatagaccaccaatactgaattaagataactcctggttatgcatgtaagtctaaattttaaaaagatcttatacatctatatccttatttaagtcttacgacttttttgggtaatgaatctcatcgtttgacaacagatgaagattacgcttttcattttagtttgccaagagttttagatcatgctaacaaaagccaatattgcttagctgagctaactctaatggcagtttataaatcacttcctatcattttaaccacaggaaggagaggttgttagcctgctatacttgctttaaatgtctaactgtggcttccattacaaacaaaaattaygaaacacactcatccactgtcatgaacttttgactattaaaaacaagtacataataaaaccttttactttcaagcttaattttaaaaccaggtgtgagggcaaagaggtttgctatgttgaacacaggtcttcaatcacagggaaaatttgtagtgtgtgatggatgaggttgatatattttttaaaagattctacttttttcttttcaggaaataaaatcagaattacccgagaatctgtcccatggtctcttgactatatcagtcattcgacagcggacagaagtcacagcatctttaacagacagtcaagagacttaaatggggggcactgaattgctgggaaagctaatggcttgtcgaragcagtagggtcccttttgattacaaggcctaatcaccacctttgccttctgaatgttttgcttctcattgcatctcgtctctgaggatgacagagaaggtgaaatgcaggcagctgtggtgaaagatctggtgtgagggagcgttctccaccacccacacatccttacccagtgtgggctgatttccggctggctgcttttcctaacctccagactgactcactctgtgcttgtaacctcgtcatagcctctgtctctgccttatttgtcccacaggcagggctggccccctggcttaccagtaccgggaaggcatcatagccttcttagggtcttctagtgctagaactggaagagatcttcgcacatcccctcagccccctggctttgctgatgatggagttgaggcccagagagaaggttttgtggtcaagtctaaggttcagatttcctacctccaaatatgtcatttttctgagtctcactctgtcgcccaggctggagtgcagtggcacaaccttggatcactgcaacctctgcctccygggttcaagagattctcctgcctcagcctctcgagtagctggaaccacatgctttgcaccaccatgcctggctaatttttgcatttttagtagagacagacagggtttcaccatgttggccaggctggtctcgaactcctgatctcaagtgatccacctgtcttggcctcccaaagttctgggattacagatgtgagccaccgcgcctggcctaccagatatgtcacttctactccactaggctcattatgcttgtttacaattcttcctaatacagactcatccctttggaattactagagtcctgagtccaatatcctttgggagagaggccaacctgagtgtgaaattgtcagacacttatcttattagagaagatggcgataagtcagggtgctgagggtatggaacctttgtcragcgaaatgacaagatttcctctggggcaggaggctctgacctggactgctgctgctgcaggtgactggctgagaagagagaaggggcaaaatggaaactgtccttttgtctacatcatggcttcctctgtggctttcttccatccaaggctgccctactaccagcacttaccagcagctttcacaacgtggagtgctaatctgtgcatctcaaggatgtgtaggggactgttgtgtctctatgtccatctttgagcttcttggctgagagttcctccatggagaagcctttggatcatgaagacttccagctgcatttgctgctcaactccttgtagcctctattgtcccaaaatatttttgttacctaaaatgaaggaaaattgtttctaattctggatgatgtcatttgtgacaactccatcagggtttaggtaggattacatttccttataaatagcatacmtagtttaaatgaacctaaataatggacctaaataacttccttatatttttttctttacttcaaaacatcagaaagcaagcgacattttaccttgttctcttcgaactttccaaagaaaactctactagtgtggactgccaggtacaggtggtgaatgaaataaaggaacttttggaaacacagaacctttacaatagaactaatgactatgttaagtaaaagatgtaagcacaccttagatgtagacagcatctgagctctcctttctgcaatgtctttcactgattgtccctcaggctggagagactcatgaccaggattccaagtgagtctttttttccttttaaacgaagtctgtctctgttgctcaggctggagtgcagtggcgtgatctcggctcactgcaacctctgcctcccaggctcaagtgattctcccgcctcagcctctcaagtagctgggactacaggtgcaccccaacatgcctggctaattttcttgtatttttagtagagatgtgtttttgccacgttggccaggctggtctggaactcctgatttcaggtgatctgcccgccttggcctcccaaagtgctggaattacaggcataagccaccatgccccacctaagtgaatcttaattcaagttacttaaacattttcccaaatgggttttatgagataccacaggttattttgtaaaaaaaaaaaaaaaaaaaaaatactagtcatgattttttttgccctttaaattgtgttttaggccaggcgcagtggctcacgcctgtaattccagcactttggaaggccaaggcaggcggatcatgaggtcaagagattgagccaacatggtgaaaccctgtctctactaaaaatacaaaaatcagctgggcatagtggtggcgcgcctgtagtcccagctactcgggaggctgaggcaggagaatcgcttgaacccgggaggcagaggttgcagtgagccgagagcgcatcactgcactccagcctggcaacacagtgggactccatctcaaaaagaaagaaaaacaaaacaatataaattgtattttaaaagtagatgaggccgggtgtggtggctcatacccataatcccagcactttgggagactgaggtgggaggatcacttgagccccaggagttcaagatcagcctgggcaatatggcaggacctcatctctgcgaaacatgtaaaaaagtgacctgggtatagtgctgtgtgcctgtggtcccagctacttgggaggctgaggcaggaggattgccagagagaaccccagggattgagactgcagtgagtcatgttcatgccactgcactccagcttggggcgacagaatgagaccctgtctccaaaaaaaaaaaaaaaagatgtaagaaacctacttaacacatagaatgttccatccatcaatgacactgagacagccttttggcatactatcaaatggacatgagtactgtctcagaagaccaatgatctatgctgtgtattgcattcctcaacttcaatatatattagtcatgttatttcatgcacttaggatactaaacaattatattacactgtgttattttatatatatatatatatatatatgtttttaatcaacagttcctggcttgctactcccatagtttttgttataatgttggggcactttaggactcagtagaccccagaaaacagaatctttctctctctgaccttctcctgtcctcctttcacctgctttatttttcttcccaaggcagaaatcttctcccacctttttgtcttggagctggccataaagaaattccctgacctaccttatttgattgtaggtcctaagaccctccttctaaagagggttctaccccataccctggaggatgaactgctgcacagagagtccaggaagaatgtgaacagacaggacttgcgggcttttcctactctgcctattcatattagaccttaccctttttgtccaatgctatttctgcacaatggtcagccatgcttatccagtgaagtctccatagaaggcccaagaggactgctgaacacatggatgccgaccaagaactgatctgtgtgccaggagggtgatgcctctcagctccacggggacagaagctcctgtgcttgggaccggtccagacctcatcatgtttgtctccatctggctgtttattttatcctttaaratacactttgtaataaactggtaaacttaagtaagtgtttccctgagttgtgagccactctaacaaattaaaccccaaaaaggggaaccccaacttgaagtcctaagttccagaggcctggactttggattggtgggaaagagggggtggccttgtgggactgagcccttaatctgtgggttccaaggctatctccaggcagatagcatcagaattgaattgacttggaggacacccagctggcgcctgctgcagaattggttggttgcttggtgtgtgaagagacctcccccacatttggtcacagaagtctgtgttgttgttcagtgagaatagagaaaaaatactttgggtgtgagtttttcatacacatatgcaaacctccttcccaagatctatagctgacagaggaagattaaatgaaaagtaaggtattgtgaaactcactatatcagatataaatgagccacaataggtatttgaatttttgttgtcgctgtttgttttttgagacagagtctcactctgttgcccaggctggagtgcactggcacgatcttggctcactgcaaccctctgcctcctgggttcaagtgattgtcctgcctcagcctcctgartagctgggattacaggcgtgtgccaccacacctggctaatttttgtatttttagtagagatggggtttcaccatgttgtccaggctggtctcgaactcctgacctcaagtgatccacttgccttggcctcccaaaatgctgggattataggcgtgagctaccgggcccggccaaaataggaatattttaaagagaatattaatagtcatgctctttgatttctatagaaattactcaacataaacaatacatttaaaagcagcctaattcatgattacccaattattataacaccagaaggtcacatctctccctttgctaccgtgtatgtgtaggaaacaggatttttcataatgttctttagtgttgttgagatccttgggtttagtataacgaaatgagtttatagtcagacggtagctgaggcaggaaaatagggtctggagtcagggaacataaggctgattcacacttcagctatgataagaaatatcctctccatttacataaggcatacaccaagtcaccaatgagaacctctagagagtatttgaacccctcacaattctgtaaccagctcctggggcccctatgcttggcctgctcccacactctggagtgtactttcagtaagtttctgcttttgttgcttcattctttccttgttttgtttgtgcattttgtccaattctttgttcaagatgccmagaacctagacaccctccaccggtaacatagctacttactctcactttgaacaagttatccaatcttactaaactttatttatagagcttttttctttcttttttttttttttttttgtgagatggagtcttgctctgttgcgcagactgaagtgcagcagcacgatcttggctcactgcaacctctgcctcttgggttcaagggattctcttgcctcagcctctggagttgctagctgggattacaggcatgtgccaccccgccgggctaatttttgtatttttagtagagacagggtttcgccatgttggccaggctggtcctgaactccagacctcaggtgatctgcccacctcagcctcccaaagtgctaggattacaggcgtgagccaccatgcctggtgcatgtttttatttataaagttaaaaaaaatcagcaagagataccccaaaggattattttgaaggtgagatgtaaaccgtttagtgcagtgtctggtatgtaataaatagtcaatgcggattagctatttttattagttattatttatgctgcttcatatatgaagattggttcatgtttccttctagaagcatattaaaagatacaaaattttaaattcccactttattttttgctctattaaaaagtttacaggccaggcgcggtggctcatgcctgtaatcccagcactttgggaggccgaggcgagcagatcacgaggtcaggagatcgagaccatcctggctaacacggtgaaaccctgtctctattaaaaatacaaaaaaattagccgggcgtggtggcgggccactgtagtcctaggtactcgggaggctgaggcaggagaatggcgtgaacccgggaggcggagcttgcagtgagccgagatccgagatccggccactgcactccagcctgggcgacagagagagactccgtctcaaaataaataaataaataaaaaggttacaaatattaattaaattgggggtcatttctttatttttatttttatttttgagacgaattctcgctcttgtcactcagactggagtgcaatgacgcgatcttggctcactgcaacctccgcctcctgggttcaagcgattctcctgccttagcctcttgggtagctgggattacaggtgcccgccaccacgcctggctaatttttgtatttttagtagagatgaggtttcaccatgttggccaggctggtctcgaactcctgacctcaggcaatctgcccgcctcagcctcccaaagtgctgggattataggcgtgagccaccgtgcccagccaattggcggtcatttcttgaagcaacacaggttagtattttatctaaacacctgttagcttttaagtgtttttcttggtttgggtgcagtggctctaatcccagtgctttgggaggtcaaggtgggaggattgcttgaggcctggagtttgagactagcctgggcaacaaaagtgagacctccatctctggaaaaaaaaaaaaaaaaattagctgagcatggtggtttgtgcctgtagtcttaactaactacttgggaggctgaggcagaaggatcacttgagcccaggcattccaggctgcagtgtgctatgaccactccactgtactctagcctggttgagaggctgagaccctatttctgaaagaaaatttttaaaaagccaagagtatttcttggtcaaatgagcttgggaagtaatgagataagcttttttctttttttttcttttgaggmggagtcttactctgttgcccaggctggagtgtagtgragcgatctcggctcactgcaacctctacctccagggttcaagcaattctctgcctcagcctcctgagtaactgggattacaggcacccaccaccacgcccagctaatttttgtatgtttagtagagatggggtttcaccatcttggccaggctggtcttgawctcctgacctcatgatccacccacctcggcctcccaaagtgctaggattacaggcatgagccactgcacccagccctgagatacgcttttatttatctatatcaagagaaagaaatactaaacacagtaagaagaagactgaaatgacttttctatgccctcatataccatatttgatttaaacaatctcctatagatgaacatgcaagttgtttgtcattttttgtcaccatgaatagtgcagaacatgcatagttgatagaaaatgaaataaaaaatcgtatcagttgaaaactcttttcgaatgattgtaaaatgggccccaaagcttaaagacatatgactcatttgttgctagtgggaatatgaaatagtgcaaccactgtggaaaacagtttggtgactcctcaaaatgttaaacatagaatatcgtttgaatcagcagttccattcctaggcgtatacccaagacaatcaaaagcagttgttcaaacaaaaacttgtacaggaacgtttagagcagccccatttataatagccaaaaggtggaaaaccctcaaattatccatcaagaaattaatggataacaaattgtcatatattcatacaatgaaatgttattcatacaatgaaatattattcatccataaaaaggaatgaagtactgacgcttgttacaatgtaaacgtgctcagttaaagaagccaggcacaaaaggtcacacgttgttggcttccttttataagaaatatcccaaacaggtaaatccatggaggcagaaaacagattagtggttgtgtggactgaagggaagcagaggagagtagctccttgatgaacacaggtttccttttgcagtgatacaaatgtttgggaacttgatagtggtcatggttgtaccccattgtaaatgtacaaaataatactgagttgtacactttagaatggttaaaatggtatatttttatgtgtatttaccaccataaaaaaaccagaaagtggcttcatggtacccccaaaataccaatatgtgaaaaacctgaattcagctggagttgtattttcaagtaatttgttctcgtgatccagtggccgtctcactcagattgcttttgtctgaattatttcctgctaaactctgagggtcccttcttcagggaatggtgttaggcatttttgccccaatctcctgaactggagttaactgaaagggattttgatcaaaataagaaatctatagtttagatgaggtgttgtcatagaaatgcatttcccaatagacacctcttgtttatactcctctttttattccttcttttaatcttttcttttccctctccctctttgcattttcccctcagttgttgcttatatttaaggctgtccaggaatatgcaagaacattgctttggtggcaccaagaatttggagtggatggtattcttgcctcttagattgagacaatccagtccttaaaaacactcagtagacaaattgggctctgataaagaattttctgtgttcggattcatgtcaatatgtgtattatgaacacaactttctttttaaaacaatagcagggaaatgtctctatttctggtcaattcttttcacaatttactgtcaggtagcattaaaagaaacatgttagcagggcatggtggctcacgcccgtaatcccacagtttgggaggctgaggcaagtggatcgcttgaggccagaaattcaaaaccagcctgggccacatgacgaaaccccgtctctacaaaaaatacagctgcatgtggtggcacgtacctgtagtcccagctactcagaatcccgagaggttgaggctacagtgagctatgatgatgccactgcactccagcctggctgacacaatgagaccctgtctcaraaaaaaaaaaaaaaaaaaaaaaraaaaagaaaagaaaagataacatgatgtttattgctttttaaagttttccctgaaagtgatttttaaaaggccaatgtgactgataatgtgactgatatttcacgtgagagaatatgagaactgggactattggattagaattttaaaaatatactatgatttaccaagtaaaggatttttttattgaagtgaaactcacaagacacacaamtagccatttcagagcacacaattcagtagcattttgtgcattcacaacatggggcaaccaccacctctctgttattgggagactttttcatcactccagaacagcctgcacccattaactaatcactctctccttccctcctcccrcatcccctgggaaccattaatctgctttctgcctctatgggtttacctgcttttgatatttcatatgaaaggaatcatacaatgtgtgactttttgtgtctgacttcttctctcacttagcatattttcaaggttcatctatgttgtagctagtgtcagtcatattattcctttttatggctgaataatatttcattgtatgaatatgccacaatttgtcatccattaatttcctgaaggatgatttgagaggttttcacctttcggctattgtaaatagtgttgctataaacattactgtgcaartttttgtttgaacatctstttttgattgtcttgggtaatacctaggaatggaattgctgggtcaaacaatgttctatgtgtaacattttgaggaactaccaaactgttttccacagtggctgcaaaattttaaatttccaccagcaatgtacgagggttcctatttcttcacattgtactgattcttttttttttttttttgattatagccatcctagtaggtgcaaagtagtatattaaaagtctttttgtgtgatcgttggctatacatgtactttctttagaggcgtgtctatccaaattctttgtccatttttaaatkggattttttgtctttttgttcttgagtaataacagtggtttatatatatgattcaaaaatattttctcattctgtaagttgactatttactttcttgatatcttttgatgtacaaaatgttctaaagtttatgaagtccagtgtatttattttttttcttttgttgctcatgcttttggtgttaaatataagaatccattgccaaatctgacttcatgaagatttactcctgtgttttactccttaagctttttttttgttttgttttgtttaggtcattgattttctttcagttaatttttgattatggagtgaggtgggagatcaactttaattttttacatgttttcacacagttttcccagaaccatttgttgaagaggctgttttttcctcatttaatgatcttggcacccttgacaaaaagcaattggccatagatgtttggtttatttctggaccgttaattccattccattgttctgtatctatgttgatgacagcacgacactgtttggattactgtagctttgtygtaagtttgaaatcaatcagtgtgagtcttccaactttattttttcttctttcaacattattttggctatttgtaattccatatggatttgaggattgacttttccatttttgcaaaaaaatgcaaaattggaattcggtagggattacatttaatctatggattgctttggggactattgacatcttcatcacaatattaagtcttcctattcattatcactgatgtcttttcatttatttaggtcttttaaaatttcctccagtaatattttgtagttttcagtgtacaagtcttttacctccctggttaattttattgcaaggtttttattcttttggatgcaattgtaaatggaattgttttctttcgttttttttttttctaatattagcaggggttgacaggaaggaaacgttttcttaatttcctctttgaattgttgttgctgatgtataaaatcccagcttatttttgcatgtgatcttgtaccctgtaactttgctgaatttgttcattagttcttgtcattttttggtggattctttgggattttcttgtaatatataaaatcatgtcatctggaaatatatattgttctaattattccttttcaatctggatgccttttatttatttattcttgccaaattgccctggctaggacttctggtacaatattgaatagcaatggtgaagatgggaatgagacaaggatgcttgctttcaccacggctatcaatatcccactaaaagtaatggattttgcaggacatcttccatgtattacagttcacgaaataaagccagttgttcagtaatgccccaccttttctgagattagattttttttggcaaatttatggtacagaatatacatatttggaacatagaaatattggaatagtcctcttaggaggaagacaatgactatctcaaagctatatgtctcactctaaaagaagactagctctactttctgaaaaaagcctgttgactcagagttgttccttaaattagggctattgatttactcagggcgttttccttagacacttccggttctgtcttataatgtataatgcattcaaagggaggattgagaatacagaactgccagcagctgacagtgggagaaatgaccattggcaacaagggacaatgtggaagaaaagtcgagtgagaaggagttcagggaaagggcaagctaaatgctaatgactgcagtggtctttgtggtgtcaccatgtcgctccacaatgcaatgaatcacttttttttttttttctgagttcattttctagccccgtttctggacactcttgagtatcctctctgcagtcccctggccagtgcagaggagggcaatggggactgggacacggggtgctgctgggggccaggagagcacagtcaataacttttatatgaccttgagttagatgaaagactaaattatatttagtataaatcatttaatacatttaacaaaaagtcccataaacataaaatttaaaagttctcggaagggaagtgttcaatttcatggattttatatttatagcatatattccatttcttaccagtgccagggaaattaattattatatgaaatgatgaaacaatcttttaaaatagagttcttctggccaggtgtggtggctcacgcctgtaattccagcactttgggaggctgaggcgggagaatcacttgaggtcaggagtccaagaccagcgtggccaacatggtaaaaccccatctctactaaaaatacaaaaattagccgggcgtggtggcacatgcctgtagtcccagctactcaggaggctgaggtaggagaatcacttgaacctgggaagcagaggttgcagtgagctgagatcgcaccactgcactccagtctaggtgacagagtaagaccctgcctcaaaaacaaaaacaaagaaagttcttctaactcatttctgatgaaaaggttagagaaagaatgtgaaacttctcagtaacttgtctctgtaaagatggattgatgattttcttctacgacagccttcatggggggtgatctgagtaagtttcaccagtagaaatttagaccagtgaataaaagttcatttcctaagcaactcaacgttggggatcacataatttgttgtccaaaccaggaaacttttgagaaaggagtagtgcactacttattatgccagggtgacaggcataaaccagtactgtcttgggcaaactgagatggatggtcattctaactaaaaccattaggatcatttgagttttttttttttttgagatggagtttcgctttcttggccaggctggagtgcagtggtgtgatcttggctcactgcaaactccgcctcctgggttctagcgattctcgtgcctcagcctcctgagtagctgggattacaggcacccgccaccactcccgactaatttttgtatttttagtaaagatggattttcacatgttggccaggctggtttcgaactcctgacctcaactgatctgcctgcctcggcctcccaaactgctgggattacaggcatgagccactgtgcctggttaagtttttattctcattgttaccactgcttcattatggaaaaaaaattagtagcaagagaaacttttattctttaaagtgataaaccagattttcagtggaaaggaaaatgaggtaacaatccactattgtaatagttgccctttccagttcttctatagttttttagagtggcctatttgggtgatgtgagactggactgaagtcaatccaaatcaatttgatactgagtgtggccaagacagagctgcctagtgggtttaggttcacacaaagaccagggtgaagaggagctggtttcagtccagagctttygggccattcttgtgcaccgtctccactccagacttcctaccaatgaggcagcctgggaccctctcacttttaccagggcccaccaagcgtgggaaagtcctaagattcggctgtaactgggcttgtttccaggaattaggaactgagcgggataattcttttcattaggaatacatttacttcctcacactttgtcgataagtaaatttcacagcaaagcaataaccaaaataataaaagctattccatgaacatacttaatcatgtgaatgtgatttatgattccaaaggctaaaggtaatgatggttaaaaatcagaaacaatttagtttaggcaagtgttctaaagcttacttgtctggcatcagcgggaccttacatttaataattagtcttcaatataggattatgagtttgtggwtccctataatgaagacatagtggacaacgatggctattggagcaacgataaaagtaatgaaaaccacctaggagcatctattgtctaccaggcaaaagtagttggtttaaagtaacgtggttagttagtagcagtttggagcggagctggaattaacagttcatgcccttcccactctgtttcagtgaccctcgattcacagatattgtagataatggaaaatacattgagatgcaaagcagggacctaggtcctagccatggatgtgtcttccataatggcaagtcctacgatctttttgaatcagtttcttcatttgttaaaggaaggttatataggtcctaactgaatctcagaatggtagtaaaaatcaaatgtgatatatatgacagtattttgaaaatacttttcatggcataaagcactgtgaaaagttattcggaagattctgtctcaatcacacttgtattatgacctgtaggaaaaagaaatcattcagcctttaaaaattctcttctctatttttagatgtgcaaaagacggggaaaaaagagatctttccccctcactcatcccagtcagtcttcataaacacttttccaagtggtttctatggctaactccttttttttttttttgagagggattttcgctcttgttgcccaggttggagtgcgatggcgcgatctcggctcactgcaacctccgcctcccgggttcaagtgattctcctgcttcagcctcccgagtagctgggattataggtgcatgccaccatgcccagataattttgtattttaaatagagacagggtttcaccatgttggccaggctggtctcgaactcctgacctcaggtgatccacccgcctctgcttcctaaagtactgggattacagacgtgagccaccatgcctggccatggctgactactttatccattgtttgcaggtactaattgctaggtggatcagtgggattctgaatgcatcctacygtccttagtgattattaaagatccctgagactttaaatattaagtgargcatgaggatcactttggttttaattaacagaaatttctgactcaaaatgatttaaacattaggagacatcaggaaccatttcatctcactgaaccagaatttcataggcatggcagctcttgctgtggcatctcagggtcgtaatttgttttctggcaattctatctactttgaccttcactacatgttgacatcatggttgtagttctaggtattgaagcatacagggcatcatctcagggaagaaagaaaaattttccccaccttttttggccaggattggatggcatgtcacatctaagccaattacaagcaaggggaaaagatcatcgtggctgaccatttggagtagggtgtatttttgggagtcaaccaccgagaccactgcaataaggcagattggaaggaaggatggagccacctkacactatktwacctccattcaaactctgcagagtggactctttgtaaggctgcttggttgatggagatagcagcacatctgccattttgtacttcttgttacaaggcggatcatgaccattttatagttcctgttctgtggccactataattggcttgagattcctatgtagcttttctctcttttyctttcttttcgttattttgaagagactgagtctacagttgcaatggaagacattgagatgaaagaaaatctctactcattttgattcgcagaaagctacaggttgtatcttataatgactattgcagaaaacaatgagcctccagatcttggttttaaaaaaatggtgcctctgatgaatctctttcctgggcaatttgttgactttgttttagctgccacccttgtatcagcctgtagttaattcagactagaatacaaataccagtgttaaaaggacaaataactaattagggggcatcccaatctgttccttgattaaggaaataattctcatctgataagacaagaaataatcagcaagatgttatgtatgttttgaggcaatgaaaagtgttcttcctgatgaaagtttgttgaattaagacaaacccgtttattttgtgtcttcatctacaaatccatgacatcagctgcttaggtgcttataatcagagccacaccagaaagaagaaacatttctatcgttccgtttcctgaaggaaatatgtgagaactcatagctgccactattaattgggataatcttctggtaaattcctggtctgggcygggcaaggtggctcatgcctgtaatcccagcagattactcgaggtcaggagtttgagaccagcctggccaacatggcgaaaccctgtctctactaaaaatacaaaaattagccaggtgtggtggcacgcacctgtaatcccagctactcaggaggctgaggcacgagaattacttgaacctgggaggcagaggttgcagtgagctgagattgtgccactgcactccagcctgggtgacagagtaagactctgtccaaaaaaaataataaaaaaaaacttcttggtctgaacagcctacctaaactgtttagtaatttgtttttctgaatgattgcaatctgtttaaaatgccatgtgcaactcagctgagaggtaagtgctcagcctctgcctttctcttttactgacttctggcccttttcctgcaaatgaatgaacatttgatgttgcagcaggaacaactcattatgctcatgaaaaagcacaaaaactgtctaggaaaatatctactgatcatttaaccatgaaccatgactaacagttatctaaatggaattaagggtaatgactccaagaggttcataggaaaaaagtgccatttcctagcagtaacaattgagtagttttttcctccttcttttatggaaacttttaccccttaagctccaaatgcctagtaagagttgttttatattccatggagtatgtccttctaaaaagcttgataataccgtcctcagaaacatgatatagagaaatcagaataataaaacttgaggttgaccaaattagtaaaaagagatttttatttttttaattaaaaaaattttcgacaataaacatgtcacttaattattatttccatgataacaaatcatttcataaaaacttaatcctacttgagcacatctgggagctgccaagtccccacctataggatttaccattaaactcacacatccagataacgggaaacagaacagagttctccactgtcacagattctccatcctgcacgagaggagctcatgttgtggtaatctttgtaattttccgacttgagatgatttttttttttttttttttttttttttttttgagatggagtctctctctgttgcccaggctggagtgcagtggcgcgatctcggctcactgcaagctccgccttccgggttcatgccattctcctgcctcagcctcccaagtagctggaactacaggcacgcaccaccatgccaggctaattttttgtatttttagtagagacggggtttcattgtgttagccaggatggtctcgatctcctgatctcatgatccacctgcctcggcctcccaaagtgctgggattacaggcatgagccactgcgcccggctgagatgatttttaaatactcctaactcaagtcattaatggcattaactkttcccccgtctgttgggaacagcagttgcttcatatgcatttgtaaaaatattttctaactgttcaagttcagagcatgtttcttgccttttaattttgtttttaatatagttrgggaaggcagagatctctgatagacactattcttccactgtgctttggaattaaaaaagatgagagtggtagatacttctttcactgaagtcaccttttgagctttatatttagagtcaaaggaaaattaattcctcacagagtacattttgccttgaaggtacaaggaagtgaagtactgggcataatatcctgaaacaggtgcctggatcctccgcttctgctcagcacctctgtggataaatggatatgtgtctgaaaaactcattcctgtgcttgcagacccagggcacccagagctatagagagcattttcttcattttctgtggaaaactaacctaacatatccaatcaaatgtactttttatctttatttctgggttatctaattgtagatttttttttttttttttttgagacagagtctcatcccgccgcccaggctggagtgtagtagcgcgatctcagctcactgcagcctctgcctcccaggttcaagcaattctcctgcctcagcctcctgagtagctgggattacaggtgtgtgccactatgccgggctaattttttgtatttttagtagagacggggtttccatgttggccaggctggtctggaactcctggcctcaaatgatccgcccgcctcggcctcacaaagtgctgggattacaagcatgagccactgtgcctggctatttctgggttatcttttttacttctcagcataaatgatggctcagcaggttagaaactatgacatcatcttggttcaaaaataaccttctgagttcattattttgtttctgtttgacaagtagaatttgagaaaaaggtcatttaatttttttttaattttatgtmttacttctattaagaaccaaatagaaatagaaataaacagtagttaagatgagctgaaagcctaaagtctacttgacagtacaaatcaaaaccccaatattcagagttctagcttcccaattttgcggtctcaagagaattgcctgctcgattggtattcatataggcaggtgctaaaggattacctgacttcaaatccccaacckgacatctccttacatctgtcacattaaatatagttctgtttcttcaccttactcactgatgtggcatttatcaaatcctcacacaaaggygtaggttggaaagaatgacaagatcacattatttaatagactcctaaaatctattaaaaataatgaagtttaactttagatttttttttttcatttagggctcaaatgagtgttcggcaacatatgcatatcaattggggggtttgtaattcagcaaaggggtattacctgtagtgatctgtactttaaaatattggtgtatgggggaattgtgtcgatgctgaatttttcatagaaatgacaagaccccctattttgttaaccataaaaaatgtaactgaagagaaatattatagccttaaaaacacatgtagtaagtaaatgctgtggctgtataaccaatcatgtaaagttgcatttagaattatatagtatcatgcattgttcaaaattgtcatcttccccagttctgcctagttttactataacawtgcatcaaatgaataaacagatatgtccagattacagaatgaagaagggttttcttgaagcaaatttcttaggtatctgattacccaagctgccactcctgggagctttcctctgacgttatasaaagcatatctattatttacacagaattgtttatcttttcatctctcacaaggaagttgtttcttccaaaagtcaaaactcctactggacataagtgatggccggctttaaggtgcacagccctgcaggcgatgytgcatttccaaagcaaggctttctgcccaactcaaaacctggtatttttttctgggctgttttcagctgtttttccttttgttgtttattattagagaaatagatgacataagtcattggatttattttaaacaagcatagcaatatatgcacccatcctcaaagtaggcattgtacttgttcaaataatggaacatttttggaattctcctcagagggcttattgcccactcaagggtatgatggctcatcatttcctattgaaggttctggtttctggttgtctcaccccctcccatgtcactcacctgggcttcatccagccttgccccactttcttggcacttgagttgactgttgttgagtctgtgagcaagctgatcctttctgtgaactctggaatctacaaccacaaaaaaagcttcctgggaactaagtcaatcttttcctacaactcagcctaaaccaaacatccaagagaacgatttttctcctccgttaatcagaacatcttctgacctccgttttcctgaatatcttagatgtcttaaatgtcacagggttcttccctgcatccccacctcccatgctttacccacccaaggaggtgatgtagtcttgtacttcaatttgcatctcttcatgtctactccaggaaaaatattagagtccccagatgtcaatagttattacttagttaacagccacactgagagtactcattatttttatctgactgcttttctgctgcatataatgcttttgcattgacatccttcaaatactgtatggtgggtaccattaacatagaagcaaccttaaatgataacactaatatttggaagccttggaattacctttctttccctacctcccaagtcctgttcctttgtatataaaattaatgagatcttttaaaaactgaaagtgtatgcagggcttttacttgctcaaaagaaacttacagttattctatactttttaaagatggtcctggagtgttatttccatgaagtcaacagttgttgtgtctgtttgtgctcaccattgtggatctcatgcttagagcagtgtttggtacctagtaagctctcaaggactgtgtagtctgcccttgggctgctctgagaagtttaaagctactattgacagtgcctgtttgtgaacaagaatatgagagagtgggcattccatatcttgtcctcaataatggggaacttataatcatgttgggcatagcttgctcggagtgattaaggttggaagctgtctaatgtatttgtacagggagaattccatttctatcacatgttgattggatacagatttttaattttgcccagaacactttaaaatacctctgattggaagtcatatcctgtccacacatttgggaaaacagaagtaaaaatttccctcttgtttaacgactatctgaccaattggattaagagttgtgctgattttttactccatttaagcattctgtttgttgctatgcacattcagtgatgtgtggaaaccaaataaccaaaagtcatgggattaaacagcacagttgcctagctggggctctagaagaagggacasagtcttagtttcttgaaacgcaacttacctgcagagaacgaatgaagaatgatggcttttcaacatgtctaggcaacattccagcatatgtgacaaagcattggcatatgtcatccagtggagggcaccagtacttagtttggttttacagcccatgcctgtgtcaaggtcgagtttaaaacaagaccaaaaaaattaccttaagggagtcaccagagtatcaaagaacatttgcactctcaaggggcttagtgaccatccagccagatgtccattttatggacaaagacagtaagtgctgagaggtccttgagctggtcagcaccaaataattagttaggaacagagccagaactctcagtcaggagcatttcctcaccatactactacctgttcctttcttgcttctcctctgaacatgattgacccagaccctaactaggaaggastggtttctgcagtgggatctacacaggctacattggaacagccagggtgaggcaacattcttcctgttgagggattttgctctggaagccttgccctttgaaataccacaatgagcctttgtggcattcctcagggaaatggccaagacactcatttccatttctgggccattgtggtgcctcgggtggcactgagatagttgggagaagatttgggcttaagattttaattagttttgctcaagacttgatgaagtgtcaatgggccaggaacaaacagcaccttttgtttattgtactatttagatttcattagggcatttggaaatggagtggaaacaacggaatgaaaaataaaacaacaaaaggtcactatgaatgctcaaagtctttggaacatttgaataaagtcattggaagtaattttctgtaaagtcctctagtcttccaaagctcccaattcaaatctcaggcaaaatcaacaccttccatagtcctacatctacatatttttgaagaaataactgttctccctacatgtctattgttattcttatacaacagtaagcgtacatttttggtacgttaaaaataaactttttattaaaatataacaaaaatagagaaaagcgtgtaataaattttcacaaggtgaacacaaatgataaatgtcatccaggccaagatatagaacattgctgtccaggcagaagccttccccaagaccccttccatttactccccacagtcctacccccctgctcacaaaggtaccaatatcctgccttcagtcaccaatttagttttgtaagtttctgaattttatataaatgaaatcatatagtaggtactatttggtgttcagtttctttcattcaacattttgtctgtgagattcatttatgctgttacatgtagcagccttgtttattttcatttttatacagcattttagtacatggataaaacacaatttatccatttacttttgatggccttttgagtcgtttgtagtttttggttactatgaagagtgcttctatgagtgtctgggtacacgcattttggtacgtatatgcactcatttgctttgggcatatacttaggagtagaattgccagtcataggggaagcacaggttcagctttagtggatacagccaagctgttttcaattggttgtgctaatttacattaccaacagcagtctatggaaaatccatttgctagatagcctcacttgaagttggtgttctggtgaggctataatggcattttattgtggttttaatttgcattttcctgatgactaatgttgttgaacatcttttcgtatgtttagcggctaaacattgggattttttttgtgtgaagagcttgttcaagttctatgcctgtttttctattggatggcctgtcttgtttttattaacttttagtggtttttatatattctagatataagtcctttgttgaatatgtgcataacaaatattttctcccaatccattgtttgccttttctcccttcccttccctcccctcccctcccctctcctcccctctcctccccttctctctctcttttctcttttttctttccttccttcttcctttcttttctttctttcagacagagtctggctttgtagcctaggctggagtgcagtggcatcatctcagctcaccgcagcctccatctctcaggctcaagccatcttatttcctcagcctcccaagtacctgggactacaggtgtgccaccatgccyagctaatttttgtatttttagtagagacagggttttgccatgttgctcaggctggtcttgaactcgtgagctccagtgatccacctgccttggcctcccaaagtgctgggattgtagatgtgagccaccatgcccagccttcactttcttaatggtgtctttttgatgaactgaaattcttacttttaatgcagtagaatttatccatcatttaatttatggttattgctcttgtgtcttcttaaacttcttttttttttgcctgccataaggtcatgaagataagtctccttttcccccctagaatctttgttgtagttatgcctacttttacagctacaattcctgtagtttattatgcatgatgtgaaacagagatttaagagttttcttttcatatagattctaattacgcatgtgcattttattgaaaaggcaatttcccccctcattggactgatgtgtcayctttgtcaaaaatcaagtgacagtttctgcactctcttttctattccataggcctattggtgtatcaggaacttatactatgaccctcttaattgctgtagctttataatgtatcttggtatctgctcatgtaaatcctaaagttttttcttctagattttctcagtcctgctggaatatagatttgtttgggaataacttacttagacctttataatattgagtttttcaattcatgatcattgcatagctttccactgaatagattttaaagatttctctcaataagctttccgctaaattagattttaaagatttttctcaatatgtataactttcagtgtaaagttcttgtgaatctttgtcaggtttattactggctattttcttgctttattatgtaggctacaacctccagttgtttgaataaaagtgatcatagaggcatattttctatctcaggagaagatcttttcgtccttcaccattaagtatgatctttgctatatggtttttctatgtactctatattaggacaaaggaagttttcctctactctaattttgctaaaagtttaaatttttgttaacatgagtaactgcagcattttatcaagcgcatttgtgcatttgttaatatgatcatatgacatctctttttccttatgtgatgaattacattactattattattatttttggcttataaacaacagaaacttatttcccacagttctggagtctgagaagttcaagatcaaggtgctggcagatttggtgtctggtgagggctttgcctcctggtttgtagatgtggkttttgtagatgcctgtcttttccctgtgtcttcacatggttgcagggggatgggccctgtctagggcctctttcataagagtatgttgacagattttaaaatattaaactaatcttgaatttcatttctggaatcaagccaacttggttgtgatatattgttatttttacatactgttggatttgatatgtgaatgtttgatgagacttaagcatctgtcaatagcctacagccaaagaaatacatttgaagttgaacaagtgggtttattgctcattgcaaagaatgagactgcacacaacaggaaccacgggggtatctcagtcagagagaattaggaaggatttagtataggatttggtgttttcagggagggtttaaggaagtagagctttgctccaatcatgctgtcaggaaacagggacaattctatagttgrgtgtcttaataaatcttatctctgaggctggaagaatgcatcgaggctaaakatgtgatcagtaaagaggcaatagtcccttatagtagccaggatgagaggatgtccgggcatttttatggtttgaacaatggtcttgattttgtctgtgttaagacatgattatgaatggtcttagtttgtcttgatccttcatggttacggagtacccttacctgctgttggtgttctatgaaatggtttatgttgaacaggaggacaccaagacctacctgtgggagccaggccatggacccaccggtactggtccgaggcctgttaggaatggggccacagagcaggaggtaaatggaaggcgagtgagcattactgcctgagctcggcctcctgtcagatcagcagtggcattaaattctcataggagcctaaactgctattgtgaactgggtatgtgagggatctaggttgggagctccttatcagaatctaatgcctgatgatctgacatggaacagttttatcctgaaaccatctcacacacatgtcagtggaaaaattgtcttccatagaaccagtccctggtgccaaaaaggttgggcaccactgctttcagtgggagaaaatcctcctggtgaagttgttttagccttgacaaagactctctccttgattggactctagttaagctcctctgaatcctgaaaatcttggtgtgctttttctgtagaatcccttttgactagggcttgaccttggtccctgttcttgtttggtctgcatagtccagtcacagcaagaatcatgctaattctgttcagagagaatcccccacgcttgatatctgatcccccttaatatcagattaaattgctcagctcctaccctcaatatctaatcatcctggcctgccttcaaccagaatcctgccacgttcgtgtagcaagaacccctgccctccacccctgatgtctccctaaggaattctccatatgctgacctttcatagtgctcacttctgttcttcttatgtcttttttttgcctcttttggactaattatttttaagattattatttcattttcccctctattaaatatttttttaaaaataaagatatccctctgctattcttttgtaagttatcctagagattaaaacaatcacttttgatttattccagtttaatataaatgagttctttacatttctcaaaggactttaactccatgtatctccttcttttttgttattttttgtcatgctgtttaatcctatacatatttaaatctccatattattactgttttgtacaattaatattcatttagatttaaatacatttaccttgctcattatttctatatgtattctgtgttgcagtcttctgtctgacccattggaggaaaccattgctgcgtgttggatccattgttggtgtcctccttctctttggtatcttggcctttcaaggacacttctgcagcttcagatcccaatttgtcctcccagtcctgtaaaattgtttgaagctctgctggcttctctgcctcttagcatctgcccccgccccgtttcttagtccctagcccagtatcaagaattgaccaagaattgccccgaaggtgcaatcagaccaagaattgccccacaggtgaaactggaatgtggagagctgggctcacctctggaggcttcctgtcttttgtggatctggtgcccaaattgtgtctggttgtcttggtggttcctctatgcctttaaacagtttttttttttttttttttgagacacagtctcactctgtcacccaagctggagtgtagtggtgcaaccttagttcactgcaacctctgcctcccaggttgaagctattctcctgcctcagcctcccaagtagctgggattataggcatgtgccaccacgcccagctaatttttatattttcagtaagatggcatttcactatgttggccaggctggtctcgaacccctgacctcaggtgatccacccaccttggcctcccaaaktgctgggattacaggcatgagccaccatgcctggcctaaatgatttttaaaaatataattcatctgttctttaggtttttctttagttttctttaaactactctgtcatagccagaacaaaaagtcctgtaattatattttttgtacatatattctctggcatgtgagaagcctttgactgtttaagaaacaaattagcatgtgttgcttaaggagtctatggagagaagtaacagggagattgccttttcccagttaacccactgccaactccaggccctctttctcccgagtacccttatagtatggagagagcatttccctcatctctcacgtctgctgtggctccagagtttcacgaatcatgcagggtgactgcctgagtgtgctgtttctgaacctgcgagggccctctagccttaaaatatcttcatatcctccccaccccagctggccacagatgccagcaatccctttgagaaagaacagtctctgcactatgaggggactcaggagaaagagggcctggggttggcaatgagttcaccggaacaaggcaacctccacattacttccttagcagagctttaaactttccagaactctgagagcccagggcaacacacaggctttgctgaatgacagataggagattcttctgtaagagcaggaatgggaagcggggaggcgcgttatgacagaggaaaagaggcagaaaagagaaaaacagtctgccaacattatgatcatgcctcagcagtgtcctgggggcagaggcaggtgatctttccattgtcacaataaccagggggaccaggtggctttgacgccctgtatctcctatgtggctccacagtcccacagtcaataggaaactgagaasgtgttgccaatgcattctctgattatctttattcctctgccactgcccctgcaagctgcaggagtgaaccccctttcatcctcctctgatctttggggttttctcttactaatcatttgtcaggagcacagcccttttgacaaatcgactgttgctgaagcgtggtgtgcttttcgtgtactgtaaattcttccctcgtctgttgcgtgtgtatggtgttctataaatacattaattggtaccacttttaatttaactgtcagtgctgtctcttttcttgacaagcgtatattaaactctcttatgatggaacaaaataaaaccacccagttacaggggcctattttggctaaagtggaatgtaacaggaagaaaagttgtagttatggtggggaaagactcatcagtgatagtttgtgtaaaaaatttagagtaaaatttccttcttagatgtggggggaaaatcctccaggaaactactgaaataaggaaggtaaggtggaattrtcagaacagctgcaatttaggaaatgggctgaaaccaatttcaacttcattttagcattcatcaagtcatacttattttagatgactttggttttggaggagtttcagaaaccatattccttatatgttcctttctgccttgaaaggctgcagccaattcacaacaatggaaacccaactggtacaaatgttcatttcaaatgtcttttacactagatagaaattggaacaaactagtcgtacaatagagtatatttttactaactcccatctagatggcatttaaggatatagtagcaaataatcttaaatgtctgctactctgtgttctaaagtttataaaaccaatgttttgagatttggcaattgactaaaatttagggtataatgaggccctttatttctagataaatttaggttgatttcatccaagcccagtagactggcgtatcagtcaagattctgccagagaaacagaatcagtgattgtggggtctggcaagtctgacgtccctagagcaggccgtcgggaagagccatctggagtctgtcaggccagagctgatgctgctgtctacaggcggaattttccttcctctgggaaacctcagttttgctctgaaggccttcatcarattggatgaggctcaaccagattattgaggataatctcctttctttaacatcaactgactgtagatgctaaccacatccacaaaataccttggcagcaacacctaggctagtgtttgatcaagtactggatactgtagccttgccrtgttgacctataagactaaccattaccgctggtggtgaaaacwcctcctcggtttgaacagaattatctgaaagtgttgctcggtgtatccactacaaatggcatcagtcctgaaggcctggactgcatggtctggcctccaactcctaaatggagtccttcttgtggagtgagagaagcccaggtcaggctgtccttgttctcttcgttcctaatactttgacaggggcatgagctcagggtgctagactctagggcacaactttcctatttttcatgaaggctgcacagaatgaatatctgcatcaatcaaccacttcattctttgtctctgctctggagaatgtcatgtggggaatggcctttaagaatttgcagtctgtgttcagttctaaagaatgcttattttaaaaatatatcaaaatgaatacaatttctgtaagtatggattctttacttacaagtatgtttccttatagaacaaagagaatgtgaaaaaagaatatggtcataaaactgtaaaatgtgcatttggccaaccaatatttaatttatttattattaattattttagagagggggktctcacactgtcacccaggctggagtgcagyggcatgatgataactcactgcaacctcaaactcctgggctaaagtgatcctcttgccttagcctcccaagtagctagtactgcaggtgtgtgccaccactcccagctaatttgttgttgttgtkttgtagagatgggggtcttactatgtttcctaggctggtcttgaactcttggcctcaaactatcctcccaccctggcttcccaaagtgccggaatcacaggtatgagccaccgtgtctggccctgatatttattttatagaaagttccattttttatagctggaacaattttaaatatgactcaatgtaacttctttagtttgtttagttattttataagtatacattagaatgtacaaaatgaatgcatgagaataagtgtaatacacagtcaataaggaagaaaatagatttgaatttaagcttagatactattccttggtcacttttgactcagcaaaagtgaaatatgaaggaaaaacatttttatttaatttgtttgttaaatatagttggtattagagaaattcttcttcttcttccaccaaaagccactttgaacttctcttctggtatgtaagctccattttatcaaatgtaactttaaaatacaagttctgttgttatgaatacattcagcacccattaagatgctttgatattccctatgacagatattccttgtaaaacacttggcttgtttttatgtctccaaactctatcattgtacatgaagaggaaagggaaaaggaaagttgaaatattttgatctttattttcacaataaaattatcttgggttctaagaagcacaaagcaactttgcaatattactgcctgaataaaaagcaacattgtccacattttgtgcaaatgggaagtgagtccaggtattcacagtgcatatccagtgagctgaccagagcagracccataaggaatttgcctgggagcagcgagggcgtcatgctggccgaccacagcaacctttaaacctgtggtggtaaaactcagggtttgggatctgctgcatggaaaggaaaaattttaaactagcctctttcatcttgattgagggtggaaacataaacgggagtgtttgtgctygaacctcttgaaaccagtttcttggaaagtaatagttaagtgttttcttaaaacatcatttgcaattgaaaatgcaaaccgtagggctcattagtttgtccatgggtggtcttcagaggctggaccaaggctggatgtttgggtgttgtyctgtgtgagctgactgaggtatgggaaggcctagacacattgtttttggggaaacttaaaaataagtaagtcccatgatttgtctgctttcacctccgttcaaccctagaacatttggctctggtgttagtctgttttgcattgttatacaggaatatctgaggcttggtaatttataaagaaaagagttttattttggttcacggttcagaggctttataagaaacctaatgctggcagctacttctggtgagggccttaggaagcttacaatcatggtagaaggtgaaggggaagcaggcgtgtcacatgatgagaaagcaagagagatgccaggctcttttaaacaaccagctcttgcatgaactaacagagtgagaaatcacttattaccatggagagggcaccaagccatttatgagagatccacccccctgacccaaacacctcccaccaggctccatctscaactttgggattcacatttcaatatgagatttggaagggacaaacatccaaaccctattagctacacagtgtcccagtgaggccacactgcacagattcacaagctagagaagcccctattcagcaaggatgggctcactctcacctctgaacactatacaattagcattttgctgacacggccagcaaatgtgagcagctctttatttatgggtgaaaaactgccaatcacttctccactaggtggagaagtctcatttctattgtcaacctcatttcttcttcttctttttttttttttgagacagagtctgactctgtcgcccgggctggagtgcagtggcacgatctcrgctcactgcaaactccgcctcccgagttaaagcaattctcttgcctcaacctcccgagtagctggggttacagtcatataccaccacacctggctaatttttgtattttagtagagacagaatttcaccatgttgcccaggctggtctcgaactcctgacctcgtgatcctcccacctcggcctcccaaagtgctgggattataggcataaaccactgtgcccagccctcatttctattatcaaattagaatcaacatttttggttatgaaagattcatttcacattgtgatttagaacacaaccgcagttgtgtgtgtgcacacatgcttgcacatcaaacttaaagtttcacagaccagctctctcctgcttacctgtgatttgctctggtatttcttatcctatcctattcaatccatcccatcctaccctatcctatgcatcttctcctatccaatccatcttctccttctctcctctcctcttctccccttccctctcctcccctcccctccttattctaacctatcccatcttatgtcatcccatcccatcccaccctatcytattctatctgtatcccaagtgctagtcatgactcactacatttatattacgacactttaatatctgatggatctacttccagcaaataaaaccagcaatggtgcaacttcatgagcactggcagaaaaaggcactcttctgtatgaaacaatctgccgcccacagatatactgatttctgacaatgtgcccagcccttttcctcccaagtgagaaggataaagagaagaggtaaagcacactccttctgtatgatacatatatacacaggtgtgtgtgtgtgtgtgtgtgtgtgtgtatacttaccataaatagtccccaaacttgactttcctttccctgaagtgggataggaaagaggaaatcartatcagttgaatctgcatagtgcatggattggtgctggggatagaaactcttttttcaattctcacatttcatcaaagctagtagtaaacagaagttactatcagagaagaccttgagtaaactaattggtgatttgaattaatgtcttgatatggcattaattttctttccctgtcaattctgggagacattctaaaagcccttagaatggaaattaattgcctagcttttcctgtgatgttaatagtactcccttgggccttcaaaagcaactttcaaaggagaatgtgatttgttgcatagttctgtttatttttgtttttccagagtttggacttctttattaaaggctgtcaacctaaggctttgaccacaaagatttagcaccatgtttttaagaaaaagaaaatcaaaattggggttaacgaaaattaaaaatctttgagactccttgtaggtctcttgtacagacacttgttttgcaactgtctcttgcctgggtgcgccaggtctttgcggaccagctcgaccagaggaaaaacaaaataaacattaccaatggtggctgtcataaccggcaacctctttttttttttttcctaccagacaaacctctttttttttcctccattacaattttgtctgtgtttgacatttgaatcaccctagaatgtggaatactgtttttgttgcagctactgggtaagtgtctcctacctaccttgtctggaaaaagccccagatatccccttctcatgtgcccttggcctggaggcactgcccttcctggcttccctagctcaggctttggagcccacatagtcaccagcatgaaattcaatccctattctccggcacctgaatagataggagttcagcacatgctccaaatagcgcgcccggggacctgggaaaggtgaactgttaacckgcagcgggcctgcctagccttcaaaggtcagatgacatgaaatgctcctmggtgtttgaagatattagtcacatagtaaacaaaaatacagagattcttggaggaggtagtggttgaagtattagaagcagacatgtcagaacagaagtatcctgtcatccttgctttgcctcataaacaggcgggtacagaggctgggacataattcctaagctgctcctatgactttatatctcaaaatactcaacatcgatttctgggtttcccaaaagttggctccaacacttatctccccttttctatagatccagtctcttcaaatactggctcttcgtaccgtgcaagcatgtgataaacctctcccattttggaggaaggccaaggaggggtggcttgggcgagaagggtgtccagaatggtgcccgggagaatctctgtgggagatatttgactgttacttcatattaacttgagtggaaactaaaaaggccstctcctcttctcccctckcctcaggcctttccagcaggcgcgatggcggaagccccgtgacggtggccatggcggcggcggaagtctcatcaagcccggcggccttgtctctgggctgggccttctcgagctactggccctkctagccccagttgtggggtctcagcctgagctggcgactgaccggcttctccggcaggaagggctgaggctgcaagctcccgcaggaggcactgcccaaactcctggccagactgacacggcccacacccagctgggacgaggctgcccaggaagcacccctgccaggaagcacccctgccaatgcccttccagccctgggcattgggatagactcttgcatcatctcactgaggcatggaggcctgtcactggtgcagaccacggacktcttttaccccttggtggargatccctacatgaaggggtgcatagcttgtgccaacgtgctgagtgacctctaggacataggcattactgagtgtgaaaacgtgttgacgttactcagccttagccagagtatgagtgaggaggaatgggaaaatataatgccactcatgatcaaaggctttcgggacgctactgaggagggaggaactgcagtgacaggtggacaaacgtggtcaactcttggcttatcatgggtggagttgccactgtggtgtgtcggccaagtgcattmataatgcctgataatgccgctattggggatgtgctggtattaaccaaacccttaggaacccaagttgctgtcaatgcccaccaatggctggaggatactgaaagatggaatcaggtgaagatggtggtctttggagaagaagtagatctggcctatcaggaagccatgctcaatatggctaccatcaacagaactgctgctggattaatgcacaaatttaatgcccatgtggccacagatatcacaggctttggcattctaggacactctcagaacctcgtgaagcaacaaagaaatgatgtgtcctttgtcatttgcaatctgccagtcattgccaagatggctgccatcagcaaggccagggggcagtttgggcttcttcaaggaacctcagctgaaacctcaggagattactgatttgtcttccaagagaacaggtggctcactttttttctgaaatcagatcttccaagtacagagagggtcaccaagcatggattgttggcattgtggaaaagggaaatcggacagcctggatcattgacaagcctcgagttattgaggtccttcctcgtggggccactgcccactgcccctgctcttgctcctgcacattccaatgtgtcctcagagcctagctcatgaaatgaagtggcacaagttgtttagagcttagggcctttgtaaacaatcatggagaattctcaagagttgatttaagaaattcccaaagaagactacctgcatagtggttgcagctgccctttctaggtgatctgaattagcccatcaaagctgcctgtgtgtgcatcccaaggccagaagtaacattttgaactttgtggggacatttgttcatctcccgggtagaagaggagcagaaaaacttgtttcctctctccaaagtaagatgaggctattccagtttgagggatgttttttgcattgggttgattaatttctgcacagggagtgagattatttattaaaactgcatacacacacaaaaagtaaattgcacaatgaaaaaaatttagatctgaagcaaatgagtttggaccaatactattgataaatctaaattgttatgagagatcttatagtgcaatgtcagattctttattagatttttctgaagtactggctctttcctgctctggacaagaattgagcagcttgtttaaagactgggaaaggaggacctgcaatcatctgacttgttaatgatgtctctccctctaaaccccattaaggaccggaagaggcagaaagagccctagagcccaggccttggtggtcattaagatgttaaatcttgtgctgaaaatttctggtgatttaatcaataaagagtaatttctagctgaaaaaccaaaatttattccattttataacacaaaaccctcctttgactattctccctttcctcccaacagtggcttctctttctttttctagatctgtatgtctcaacctttggtgtacatcagaatcagctacagaacttgttaaagcacacattcctgagcctcatcctcagagtttctgatctggtaggtttggggtcgggtccaagaatgtgcatttctaacaagttcccaggtgatgctgacggttggggacccactttgggaaacaccactctaaagagcaccctctgcattcaytggctttgcttgctctttttccattcactacccaacctgctgtcacctgtctgctgccccacaccactgacctccaaaggtcaaatccagtggagctttgtatcccatcttacttgagccctctgtgacgttggttccctggccacatggctctctttcttcctttggcttccctgacatcactccttcccaattgtctccttcctttctggctgctctttttgagttgccttttcaggaacgtcttctcctgcccatggtgtgtttcagtcttcttccaggtgctgctcttgtcctctgcatttttcactctgttttcttcctggttgcctcacccatggtacagctttgactggcatgccagtaaccctcagatcaacttctccactgcaaggctctcttctagctctttatctgcacatccagactcataaagytagacatgtccccaggtgggcttattatatttgccctcaaacagcctacttgtttgacttatcttcaggaagggcaactattttaccctgagccagaagtctgtmtgtcattcttactttttctccctcacttttattcctgacattcaattcatcatcaagatctctctcatattgccctcctttcatttttcattgctaatgcctcagtttcctactgtttgctgatgttactgagataatctcccaaacttaattctgcaggctggggcaggatggggtacttcctgggtattagctttccagtgtttccaggcacttcttttttttttttttttgagatggagtcttgctgtcgcccaggctggagcgcagtggtgcaatcttggctcactgcaggctccgccccctgggttcacgcccttctcctgcctcagcctcccacgtagctgggactacaggcgcctgccaccttgcctggctaatttttttgcttttttttttcagtagagacggggtttcaccatgttagccaggatggtctcgatctcctgaccttgtgatctgctcacctcggcctcccaaagtgctgggattacaggcatgagccactgcgcctggctggcactttttaaatactggcaacatataggagtccctcaaatcaggtaacattttgctattccataaattctggttttgccatttgatgctatatcattttatacaataagacattttattttattatttttttgagacaaagtctcactgtgtcacccaggctagagtgcagtggtgtcatcacagctcactgcagcctgaatctctggggctcaagtgatccttctgcctcagcctccagagtagctgggactgtaggcacacaccaccacacccagctaattttttttgaaaaattgttttgcagagatagggatctctctctgttgcccaggcaggttagaactcctgggctcaggcaatcttcccacctcagcctcccaaagtggtgtgattacaagtgtgagccaccacacctggccaagaagaattttactactaataaaagtaatgcgggaggcatgcattcttagctccatttaagatgaggaaactgagcctctgagaaggtaatagagttagaaaaaagtggagccaaagatacaaacaaggtctgcaaaaagcaagttttgtaaaatgaaaaatgtctagctccttccatgtagaattgcagagtatagttccattcttttgttgaagtgcagtaagttttaataaatacatatatttctgtaataaagcacattcatatagtaaagtgaaaaatgtactaaagccaaatatgatctggtgacccatttctatatgcaattttgttttctctctctctctctctgtatgtgtgtatatgcatgggtgtgtatatgtagttttatgaaaattttaaaacttttatttggaaataattgtagattttcaggaacttgcaaagatagtacagagaggccctgggtcctctttatccagtggttacatcttatataactatagtacaatattaaagccagcaaattgacattggtactatataagttatgtatagttccatgccattttgtcacagccatagatttatgtgaccaccaccataatcaagatatagcactactctatcaccacaaagatcttcctcatgctacctctttataatcatttcctcttcccttcaccattcctaatccccagctactactaatctgttctccatctctataatttgtcattttaagaatgttgtataaatggaattatatggtatgtgacctcttgggactgactttttttccactccataatgtccttgcgtatagttgggtaatgtttttaaaatcctctttgccaatatctgtcttttagttgtctccctctcactgatttcaagatttatttatttacttttagtatgtatgtatgtatgtacgtacgtattttatttgagacagagtctcgctgtgttgcctaggctggagtgcagtggcatgatctcggctcactgcaatctctggctcccaggttcaagctattctcctgcctcagcctcccgagtagctggggactataggcatgtgccaccacgcctggctaatttttgtattttttgctggagacggagtttcaccatgttgcccaggctggtcttgagctcctgacctccaatgatccacccgccttggcctcccagagtgctgggattacaagcatgagccaccacgcccggccacctttagtttttacaagattaactaatatgtgtcttgacatggatttctttaggtttattctgttcagaattcacatagcttcttctttctttaagttgtgtcttttaccaaacttgggaaaattttagttattgtattttttaatacctttttagcccaccttctttctcctctccttctgggactcaaatgacatgagtgtttgatttctttgttatactcgtataggttcctgagtttgttcatttttttttcagttagttttttttttttttctgttgttcagattgagtaatttctattctgctgcctcagcctcctgagtagctgggactacaggtgtgcaccaccatgcctggctaatttttgtatttttagtagagacaggtttttgccatgttggccaggctggtcttgaactcctgacctcaagtgattggcctgccttggccttccaaagtgttgggattacaggtgtgagccacagtgcctggccaatttctagtgttctagtctcaagttcactgattcttttctctgtcctttcccttctgctgtgaagctcatctattgagttttttttttttttgtatattttagttctaaaatttttatttggttcttatttacatcttctatttgctcagattttctcttttttcatttgtttcaagaaagtttttgtaattgttcattgaaggctttttatgatggctgctttaaaatctttatcagacaattccaacattattatcttggtgatggcatctgtggactgtcttttcttatttaatatgagattttcctggttcttggtgtgattagtgattttgtattttaccctggatattttgggtattacatcatgagactctagttcttacttaaatctgtttagcagcttcctctgacatgtgctgcagggaaagaagtgctccccgttgttactgccaggtgggggtgaaaatctagtttccccacttagtttcctttatgcctccaggggcaggacccccattactgctgggtggaggtggattgcaggctccttgtagacctcagctgacaaccactctggctgggaaggagaggaacgtctcactattgctccccatgtggcctccactgacactgtttgaggggtgcttaccaccagatggtggtgagatttctggcctcccaaaccctttcgataagctagggaggaggaggaatgccttattacctctgggtggaagtggaagcccaagatccccatatggcctccattgacaccatgaagggggtttcaygttgctggcgtgggtgacaatcctggctcctcactcaatcgtctttcataataatgggatggaggagatagagtgaggtgttattgttaccgctgggagagggtggaattccaggatcccctcttggcctttgctgatggaggaggaggtggggctctatttttctgtggtgtatggctggggtagagtggctattgtccaaaagttttctgtcttgctatgtcgtaactttccttgttcttttttcttttcttttctttttttttgagatggagttttgctctgttgcccaggctggagtgcagtggcacagtctcgcctcactgcaacctccacctcccaggttcaagtggctctcctgcctcagcctcttgagttgctgggattacaggcgtgtgccaccacgcgcccagctaatttttgtatttttagtagagatggggtttcaccatgttggccaggctggtctcgaactcctgacccgaagtgatccatgcacctcagcctcccaaagtgctgggattacaggcatgagccaccgtgcccggccatacctttctttgttcttcggctagaagcagtagcttctcctgggggcttttttagtctgcccctgttactgtttttcagttgctggcttttctggcaccatgtctgggatgagtgaggcaaaaagaaaacccagggaacttgtcacagtgtggtcctcggggttccaggcccttgtcagtttgccttcatttcgtcacctttcagaggcttgttatgtttgttttatgcataacatctggggttttcaggtgtactttaacttcatttgtttagataaaaggcagtcgtgctttcctaggaatgttccggaaaagctgcatactgatggtctgtgggtgctaaagtgtacgtactgcttctaaaggccccaggccttcccaagcgtctattcctgcatgtcttacaggcacttaagctgacagatcagcctcaggttccttcctctgtttccactattacaaccagagatcctaactatcagtgctgtcatctgaggctgcaccttggaaggccatttagatagacccttcctcacacaggcgattattccccacgtctaaccgacgttacttcctgagcgccttttgagctaaccatgtcctgtctatattcccttgctttatttgagccattatcatctctcacctgcactgttgccataacttcttaacacatctgtttgcatccgctttgtcccctctgagccactcacccatggttctgaaatgcatctttctaacatgaactttttcgacccttcaagtctggctctgggtctccccaagaccttttagccagggggcagagaacttgtgattaggcctccatctctagcctcaccctcagccacaaccttctagaatattcctgcacagtgtcactggtggccagctatcaatcacatctccaaagccttcccctggacctttgcacacagtttttcttctgttgtgawtgccrtcacttactctttcctttttttttttccaatctgrtcctcaaaatgtaagcatatgttactttatttgggaagatttcctaggtactgtacttctgacattgcacttagacaaggtattatagttatgtttatttacacatctaactctcctggagactattaattcccttcatagaggggacatgtctgaccacagagtagcatcgtgtagtgcttaaaaacaaggacaccggagtcctgagtttatattcagactcctgcttattagttctatggtctcagggaatttatggaacgtctttgtgtctcaaatttagttacatgtgaaatggagattattgtgatgactgaatgaggtaatacatcgaaattgcatagcacagtgcctgtcacaaaataagctcttaatagttgttagttatgatgatgacttactttgctgtaatttaccaaactattctcccactgtggaatatttgcattgcttctattttttttttcctatcatagctaaccctggtagaaaatgtaaaaatcaaaacacmagagatgactagaattgggattacttctatgcctttgtatctgaagttgacaaaatcaacttaattttctatctatgtttgaagtggttgctgaaaaattttggtattctttgtgacctcttccacgctgcaaagcacattggagcttttaagattaattaaatttttctctcccgcctagctactggaagagaaaaatcccaaaggaagcacatgacaagtgaatttgtacttgagcaatgggtagtgtgaatgcattataattcagtttctgtatttggatttttctgctctcagatgagtatacttgaggttttgaagaactccctgaccttgtttcttctatacctatctctaccccaaatagctgggtttgtaaacacaaattaagtgaaaggcacaaatttcctctgtgctaagggaaagctcatttgaggagttgggactctactttcattattaaagtgatactggttttagcctcttactcatttcaggctgctataacaaataccatagatggggaggcttaaccaacatttatttctcagggtcatggaagttgggaagtccaaaatcaaggtgctggctgattcagttcctcatgaggaccttcatcctggtttgtagactaatgccttcttgatgtattctcacatggtagacagaaaaattatcactctgtttctttttataagggcactaatcccattcatgagggctccacactcaagacctaattacagatggttcccagcttatgatggtttgactgatgactttctgactttacggtggtgtgaaaattatacagtactttgagtatccatacaaccatatgttttttactttttggtactgtattcaataaattacatgagatattcaataataaagtaggttttgtgttagatgattttgcccaactgtaggctaatgtaagtgttctgagcatagaagctagggtcagctaagctatcatattgagtaggttaggaggattaattgtgcatatatatatatwtttttttytgcgayaaaatcttgctctatcacccaggctggagtgcagtggtgcaatctcagctmgctgtaacctccgcctcctgggttcaagcgcttcccatgcctcagcctcccaagtagctgggattaccggcacataccrccacacctgtctaatttttttgtatttttagtagagacgaagttttgccatattggccaggctggtctcaaactcctggcctcaagtgacccatctaccttggcctcccaaagtgctgggattacaggcrccccaaagtgctgggattacaggagacttaacaatattttaaactcaygatgggttgatcaggatgtaaccccatcataagttacacagcaaacctccccaaaacctctcctccaaataacatcacattgagtattagggcttgatgaatttcttgttaggggaaataaacattcagtccatagtctccttcargagagggaggtaggtaggttttaaaaaaattattatttttatatgtttgggtgtacaagrgcagctttgttacatggctatatcacgtagcggtgaggtctgggcttttagcgtaaccatcaccccaacagtgagcattgtgctgaataggtaatttttcaaccctcaccccgccatyactctccagagatagggaattttctgaaagatctctggaaatgttgcctcctgagacgattcagtgttaggactacaccatctgatttcagctcctatccccaaagcatgttatatttacaattggagtttcaaggactaaccaaaagcatgttctatatctgcccagaggtttcttattaagcagagtgaagcctttctcattgtttcctattcttattcatgaataatccctcaaagtttttcatgcttaacaaaaatctgttatattgtaatttagtgctttcgcttcatgtccttgttagagtgggacgggttgaggatgaagatgaatgattttcagctttaaaagttcccttaatatactctttccttatatgaagataataataataattattattttttgagacaaagtcttgctctgttgctcaggttgcagtgcagtggcacaatctcagctcattgcaacctctgcctcctgggttctcgtgccttagcttctggagtagctgggatgtgccaccatgcccggctaatttttgtattttaagtagagatggggtttcaccatgttggccaggctggtktcgaactcctgacttcagyctcttaaagtgctgggattataggtgtgagccattacgcctggcaaagataattactttgaagggattctgttgtctccaaggtaactaaactcaagcttggtccacccatcaacaggatttcagtttcagagccacctctgggtctgcacctcccctgtggggcctactgtttggccttgtgcagtgctttggatctctgctttccagatcaggtttggaaatcagctccatagcgtgaacagctgctttccaactgtacacgctattgtgggcagattatcttttctttgctagctgtttcctctgcctgtaaagctctttccccagagtaaagacctggacacaggagcatgcccrgctttcaaagaacaacaaggggcagttgtagatagtatacaagtttaagtcatcaaaatccaaaatgcgggcacatttaatatcatttacatgtgkattgtaatgtcttctctccttactaattcttaattacaggttatcttatttactgaaaactccaaaatctttattaacttatatgtttggcaatggctaactcaacctataactctcccctttagtctggtattcataatataatttttattgcctcatttataaacaaacacaggaggccagacacagtggctcatgcttgtaatctcaccattttgggaggctgaggcaggaggattgcttgaggccaggagtttgagaccagcckgagcaacatagggagaccccatatgtactaaaaacaagaaaatagccaggtgtggtggcatgcacctgtagtcycagctcctcaggaggctgagatgggaggatcatctgaacccagcagtttgaggctgcagtgagctatgatacaccactgcactctagtctaggggacagaggaagaccctgtctcaaaaaaaacccaaaaaaaaaaacaaaaaacaaaaaaacagaacaagacacaacacaaactaaaacaaaccccaaaggaaattattactgatgagtttgcctttaggttatgtgctaatgatttgtagaattccacatcttgatatgaggagaaataagtaaaaatctatcgatttaaataatgcaagtgaagtgctaatttatttctatagtatttctcaatgctttaagcaaatgccacagttctatgaaagagggacttcgatcactaagtgctgtggtggagacacatttcccaatctcctttgctgttaggtatggccatgtgactgagttcagccaatagaatgtgagtggaagtgagtgatgtcacttccaggcctaagccataaaaatctcccaggtgtttctccttcaagggcaacctcagagagaaaatacggaagacagtggggccacaagaaagaagaggcataggcccctaaattattgcttgaaagagagtcttgttgatcagaaacattcagaatttacatgaacaaaaataaaccttggttatattactctactgagatttgggggtttatccactcatcrctggtaatctcgtagttaatacaacagttctaggttttttgcttagatttagttcttattttccgtttccagactagcaccgtcgttaagaccatgagctttggaactagacagagtttgcatgggatcctcttactagttacataaatcttttaaattttcagaaactcagttccttcatccataaaatggggatagaaaaatcttctagttaggattgttgtgagaattaaataggaatatttttcacagtgcctagcacataataaatgaacagtgatgggatagaaattttattttatttttatccttctcacattaataaaaatgattctgaattagtgtattttaattattttccctatgatttcagttttttttattgtcaggtaatgtgctatacatttccatctacttgattattttcttcttctttgcctaaacattcaactcttcacttggaaaaaaattcatccttcaggttctaaaaaattatcacctgtggtagattttagtttcccaaaatacaacagtgatatttcccatctcttctagagccttataatttctccattcagtggytgacaggactttgtgaccatgtgaatctcatgtggcagaattgatgttgtgtgacttctgaggctaggtcacaaaaggcaatgtggctgccactaatattctctcttcctcctttttaaattaattaattaactggttgtagagacaagatctcactctgttgcccaggctggggtgccatggtacgatcgtaacttactgcaaccttgaattctgggctcaagcaatcctcttgcctaagtctccagagtagctagaactataggcacatgccaccattcctgactaatttctatttttattttttatagagctggagtctcactgtattgcccaggctggtcttgaattcctgagctcaagcaatcctccagcctcagccttccaaagtgctgggattataggcatgaacattgtgcctggtctaatttaatttttttatttagagacagagtctggctctgtcacccaggccaacatgcagtggtgcagtcatagctttctgcagcctcaaactcctgggctcaatagatcctactgccttggcctcccaaagtgctggaattacaaatataagccactgctcctagacatcccctctcttttctgctttctccccctacacgaaacttaattaacatccagccatgttctgagggagcccaggtaacaggaagatgctgtgtataggtgttctagctaacagtcccaagttatgagcgtcaatctccagaaatatgggtgaaggagccttcagatgattctagtgaccaagactttgagcagccccagctgatgctgagtggagcagagacaaaccagccccagtgggctctgaccaaatcgcagattcacaatgctcaatctcattgactgtcagggaaatacaaatgaaatttacaatgagatactactacaggtccaccagaatggctaaaatttcagggccaacaatactaaatgctgataaggatgtgaaacaactggaactctcacccgtgccacagtttttagactgtagagttgggagtctgaattcatacaaccacttttgaagactgtttggcagtatctgctaaagattaacatacacatattttctagcccagcatttcctttcctagtacatattcaacagaattgtgtatatctgcacaccaaagacataaatatcctcaaactagaatgtatccaaatgtccatcaatagcagaatggattaaaaactcatagtatagttccacactgaaatgctgtacagcaaaaaaaacctacaactattgcaacaatataaataaatctcaaaaatggtattaagtgaacaatgccagacatgaaagggtcctattgtattaatataatgttaatataaaatataaatgtataaatttgaagttattaatatagtctaataaacttcaatatgtgaatttgaagttattgatayagtttaataaacttaataaactagttttataaaaaagtttataaagtttaaaaacaggcaaaacaattattgtcttagaagtcaataatgtgattaccttcagagaggagggaggacagaatgattggtaggaggcatagcaggtctcttgagacccttcagtgttctagttttgacctgggttgtggttgctcaggtgagcttgctttgtgatcattccgggagctgtacacttggaacttccacacttttctacatgtgcattatgcatcaacaaaaaaatctaaaaatgtcaactagaaataataaatatttggaaaagttaaaaaaaaaacaaatttggaaaagttaaaaaaaccaaattgtaggttcaggagaaaactaaatgtcatcatagtcctaagctactaaatttgggggtggtctatgaaacagcgataaatagcagaacacctcctctgtgaagccatccttatgacctcttggcttgcctgcttcctcaggactaaaagmttttctctgtggtcccttagcattttatttattttgctaggacttagaagtctgtgaagtcttcgagggcaaacatcaaagcctattcttttttgtatcacctgtagcatttaactcagtacctgctatagcgcaggtactgagcaaatgttgattaaaggacacgagtttattttgcctttctttgtcagagctgttatgccacagatagaaatttccactctgtattaacttctcttgtgaaatggcatctggaacacgggtaagtcacaggaagctcaaggatggtgatgaccgtcccagagtttgtaatgagagtagatgggaaagccaattgaaagacttgaaagaatgtcattcttcatgaatgtctagcactcattaagcagcatttacctgtcattcctggtgttctgtaaagcagctgtaaaacttgatcattgcttccagagaagctaaacgttacatagccctgattacctttatcagaatatcctttgtagtttgtagaaagaggtcttaacatttttataagttctcatggctttaaatgatgctttttttttttttttttttttgagatggagccttgctcttttgctcaggctggagtgcagtggcgcgatctcggctcactgcaacctctgcctcctgggttcaagcgatctcctgcctcagcctcctgagtaactgggattacaggcacatgccactgcrcctggctaatttttgtatttttagtagagatggggtttcaccatgttggccaggctggtcttgaactcctgacctcaagtgatccacccaccttggcctcctagagtgctgggattacaggtgtgagccactgtgcccggtctaaatatggtctttttaactagatcaataaaactgtgccgcaaaatgttctgatacccttagaaagcaaaattctccttctgcatatgtgttttttaagctctatcattagcagctttgctacaagcaaacttgtatttattttaaaagcttcaaggttacttatttatcatgaatggaaagattacttagctgaatgtccagagactcagtttctcatccctgctctgccattggctggctgtgtgatcttgggcaagtcctttgttttttttctcccattttctcatttccacatttatgaaatgaggaatgatggccttcggggctttgtccaagtctagctccaccattccatgagcaaaatgatagcaacatctttgtagatgtgtaggtggaaactcaaagtgagctataaactttttttttttttkgagacagagttttcctcttgtccaggctggagtgcaatggcrcaaacttggttcactgcaacatttgccaccctggttcaagtgattctcctgcctcagcctcccaggtagctgggattacaggtatgcatcaccgtgccaggctaattttgtattttttagtagagatggggtttcaccatgttagtcaggctggtctcgaactcatgacatcaaatgatccacccatcttgacctcccaaactgctgggattataggcatgagccaccgcacccagccaagctttttgatccgtagaaaaatgttggtgatgtagggaatattaggattttgaaattctgactatcctctcaacagctgcacaagactaacctgttcatcgtctgttatttttgtagattacaacaatccatttaactactatgaaacggttctggagtgacactgttgtgaagaggaaattccagcggagctactggagcaagcctttgatctgccatattgaactcctccagctgtgcggattcactgcactataagaaaaacatttctacgaccactttaaagctaaactcatttcaggtttgtgctgaagagagattgagaaaaggctaaaaggctagcccaggcttccattttgagacagcaagagtacccagcaatatgacggacgtaactagtggcaagcaggattgtgtgggttttttctttgaagatcttctgtagtaaaacagaatggaacttgtctatttatgacatttttcaatttttctgggcagtcaatgaaacataacattaccaacatcattttctctcacctgatctaagagatttttctttttgtcattttttaatacttcacccgttacaaaagtttttccacctcttacattttgcagttactaatattaggaaatgcaatgccaatttgtttgcaagccatgtaaaaggaacatcttaacaggatagcaaatgattaaatacatggtatattgtgtggcatatatttggtggttttgtgacctgaaatgatctaatgtctagtgtttaatcttataccatcaaagtaaggtcatctttgccctatttctttrttgctctttgtgctcatatatgtttattgaacatttgtgtgtatttagcagtgacagggatgaaaatagtctgaggtttagggaarcattatttttcaggcttcaagaataaaaccgatgttttccagggcacagaatgcctacctgtgcctaggtgataaggtctccagcacaatgagctcttttgttctgggaaacaggcccaggcttattctactacttccccgttttacaatcttgctaaagttgacctttacctatcttgtggtgctttttcaacaaaaataaaattcttaactgggctcatttttatgactgactataaaacctccctttcaacttcacctgttaataaagggaaccagctcttccttctcctgtatgcttgggaaaaatagagtaaaaacaataaacaaaatagttactggaaattttagactaactgaaaaaaaaaaggtattgaggttagtcttacaatgtgtaagattctcaaatagtccttaaatataatccttaatttaatttttaaaatgctgtgttttcttaaaccacttctctctctttcacatcccctctaccaccaccctgcgggtcttttgcaatagataactttccctggtagaatgttcgtaggattcacttttgatatgggttattttttggaacaatgacagattaattgatgggtggttggggtaatctttactatttggtactgctatctttaaatacttagtagataattgctctgattaaatttgtctgttaaacacagtagctttgataaacattgcaagaggataaagtaatgcaatccccttttaatacaaaatattttatttgaatgggtttttaatcaataaagagcaatttagttctcagagatgcatgggcaattcccattgatttgtaygaaatccttggattctttttagagtgatggatggtttagtgtggctgtttaaaaataaaattttattcttgggctggagactccatgctggagagagatggtatataatggatgaaactggtctcatggaagtccctgatgcttcatgatatttaggggaccaaatatcactgaatgcttggcttctgttttgaggctgaataactgtattaatctgttttgcgttgctataaaaaatacctgctactgggtaatttataaagaaaagaggtttattcggctcacatttctgcaggctgtacaagcatggcaaccgtatctgctcagctcctggtgaggcctcaagaagcttttcatcatggtggaagatgaaaggggagcaggcatgtcatatggtgagagggagcaagagagagagcggggagttccctgactttttaacaagcagatctcatgtgaactcattactgccgggagagcaccaagtcattcaggaggatcctcctctatgacccaaacacctctcgctaggcctcacctccaacgttggggatcacgttccaacatgagatttggaggggactaacatccaaactatatctataatgtcttccagtgattctctatcatgtgcactccagtgttcccataccctagacagtgatacattttattgctgtgaaacttctaatgagttattatatgtaggtgcttagaatgctgtctggcacagagtaagtattatgtaagtgttagaaataattgttactagttattccaaggccaactccagccttaactcatcagccaggtgagatggaaatggaagcatggcttaggaaagaaagtgtatcagttaacattagctgtctaacacggaaatattaaatgcaatggtttaaaaatagcgaccatgtatttagctcatgggtctgtggatcatcaagttggactgggctcaggttggcagtttttgtgcttttggctttgcttaacataaacatctctggtcagtataagcataaacatctttggtcagtggccaggtcacctggtgtctgactagtctaggatgggctcagggggatggcttgtctttgcttcacaggttagcttgagcatgatgtcatggtgaagccaggagagcaagtcacaaagacaggcttagattggccaaagaaaactccaagtccaacccagattcactgggtggggaaataaactctacctattgcaaaatcatggtggaaaatgagtggatagaaaagagtgaaggatctggccatctttacactctgccacatcagtggctgctgcgagagatgaagtggagaaggaattagaggactgggatgtgcatttgtgtattcatctatatgtacaagtacatgccttttgtggatgaggaaagaatacaaatgactccagagtcatgatttccggtgacttaggatttcctatttgcacctcccgtgcaaataggaaatatagcaggagaagcatttacctttgaatgtatagagtttaaaacagaaatgacatgtttaacagaaagtatccagtaaggggtccagaaatccacagagaaaccaggcctacacataagatatttaggatgtgaacagatgtaaatagatgtaaacaacaacaactacatgttgttttcctagccaacatgtggttagagaattacgtggtttacctttgagtctcctcttagyggacacactctttccaactgttagttcatgtgattcgaatgagcccaaccctggccatctgccattcaggcctggccaatcagcacattccagccctctggtcattgggattggtttaggaatggcattggaccaacttggttctaataaaatgaaatcctggcacttttgttgaatacattggaactttcttttccttctacaagagcaactaagctggagggccatagaactgctggaggtcgtattatcagtagagcagtagagtctgcctaggagggaagccaacagaaacaaaagtatagcagagagagagagrgagagagagagagagrgagagggagagacagatgcagtttagatccctgaatccagttatacctaaagacatatctccttacaaacttttcaattttaggaaccaatacattttctttttcacttgaactggtttgaattgggtttctgtcatatgttgctaacaagaaaagagaaaagaatataaacttagaagamaattgcattttgtggggctgaaggaaagttagagtaagtaataaaagctcatggaactaagaaatccaagaagatggagacttaacaaaaaggaataacagtgttgacattgtcacatgtcagggagcaagggctccacagagagtcttgacttgggggccaggacacctatgagggagtgctcttggcagcagggtggaagaaaggaaggtgccctgccagragctaaggaaagagtgggcagtttcctttgcccataaaagggcytcgtagtcactcaaacttgaaaccttggaatcaactcttcctcctcactctgccacagcccacacaaccaaacagtcatcttggcctacaaattctccctccacaattgctgttggactcctaccttccttcacatttccacgccatgagctggctccaggtgcctagtgttcctttcctggaacctggcctctttgcatctcccgtgcctgttgtccctccacctctgtcatccattctttattctgctgccagattatttgtcctaaggctcagttctgattgtgaaatagccacacacagtggagtccctggatggggaacccagcaccagctctgacaggctatgggatcttggaaaagattctgatcctctctaggtgtgggaatctaatctttgaagggaagggttgaaccaagctctgacattcattgcctccccattgcctctaacataaaattctagccctaacctaactcttttagccttacctcctttagcatacatataactcacctaaaatgaaatacttctcgtgcctgaatgccctcaccttgtaccttcctacttctgttcattttacctggaatcatttgtcttttcctacggaaagcctatctgtccttgaaggccaagttcaaatgccatctgtgaggctttcttgaactctcagctgagagcctcttacccatgttcttggtcagggcactttgctttgtttcattgtttgtgcatgtgtgctgcctcctgccatattgtcaagggcttgaggatcaaacttccatcatattcattgaggcagccctcaaggcatctagccgagtagctagttctcagtaaatgactgagtgaatgaaaacacaaactttcttgctggtccactcagccatcctgcagatcctcccaaagcatgtgactgcaaaatcagatgttgtagttctgctgaatagaattatgtgatagtttaaaaagggccttttgagtgtaaaccaaagtatctgagacaggtctcaatttaraggtttattttgccaaagttaaaggccatggcctgtgacacagcctcaagaggctctgagaacatgtgctcaaaatggttttattataggttgcttttatacattttagggggacagaagttacaggcaaagacataaatcaatacatggaaggtgtacatttgtttggcacagaaaggtgggacatctccaagggyagggaggcttcctgctcacgggatgattcaaatatttcctgactggcagttggttgaaagaggtaagctttgcctgaagaagtaaaatcagcataaagaaatgcttggattaagataagggggcggatcccttgaggtcargagttcgagaccagcctggccaaaatggtgaaaccccgtctgtatggaaaatacaaaaaaattgctgggcatggtggcaggygcctgtaatcccagctactggggaagctgagcagaagaaacatttgagcccaggaggggaggctgcagtgagtggagatcacaccactgtactccagcttgggcaaaagagtgagacttcatctcaaaaaaaaaaaaaaaaaaaaaaagataaggggaatgtggaagccaaggttcttgttaaatatattttgggataaaatagtttgatttcctttagggccgactatctgtcatgtgatgctataccggagtcaggttggaattggatgtcttattgctacaaagaatctgtttgatcagtcttacgatccctttcaatgtgaatggtggtcagttgtgcctaaactccaacgggaggcatgtccaacaccccctgcttcctgtcatggcctcaactagtttttcaggtttctttgggatccccttggccaagagggtgtccattcagtccgttagagggcttagaattttacttttggtttacatgagctccatggcccaagtatgaccccactggcccaagtatgaccccattcctgcctttgcaaggtgtgtgtcagcaaagtcggtgttgggtgaaagtgttatggaggtcccttctatggttccacactgctccacattgagaccaatcaagggtggccttctccttagtgtttgcaagataatgatggcgtattctgaatagaacacwktggtctccctctgacacagctcttgacaatgacaggagatggtgtaaaccaaaaataaaattctaacctccccaactgactgaatggaccccctctcttggccaaggggtcccaaagaaacccraaaaactagtttgggccatgacaggaagcagggggtgttgaaaatgcctccctttggagtttaggcaaaactgaccaggattcacattaaaacagatcttaagactgactaaacagactatttgtagcaataagatacccaactccaacctggctctggtacagcatcacgagacagatagttgccaagaaggaaatcaaactatttcatcctgaaatatatttctttgacaggttttggaatggccctgcaaagccaggaaatttctgggggaaatttgcattctatagagaatttccttcccttactaggcctttttcagagagtctgacactgtttaaggtccaaaagagacatttatcatctattctctctgaatcctatgacttagaggcttcatgcacctaacaagaaccttggcttccacatcccctttatcttaactcaaacatttctttatgctgactttacctcttcaggaaaagcttacscctttcaaccaattaccaatcaggacatcttcgaatctttctatgagcaggaagcccctctactcttggagatgtacctytgttttgggcccaaccaatctacaccttccatgtattgatttatgtctttgccttctgtctccataaaatgtataaaatcaacctataaccaaaccatcttgggcacatgttctcagaamcttttcaggctgtgtcacaggccatggcccttatatttggctcaaaataaacctcttcaaatattttggagagttttgcttttttttttttttgtcgacagtgcaagtgccagtccagaggagtaaagcagaaagagagacaaggaagaataggagaaatgacaggtggaagtgcgcagtatggagatgccaatgttccccataaccctttttatagcaagattatcaactccagatctgtaaacttgttgacatgttgtggcgagactggatattgacacagccagtgcccatagccagtagctagaattatgtggctgtctcctaccttcaacagtgaaccttgagaccttcctctggaatgctggttttyctagggggctgaggggaaacagacagctggacttgggtgaaccttcactycctccttattatcctcccctctccgcccacagcaacttaaatcattaaaatcccrtataattaaaatttcatccaagttataccagttatgtttgctggccacagtggagtgtataaatatcttagaaaggcataaagacagaggctgcttcctgcctgtggtttcccccttgcacaggatctgcctgctaccgtgtatgccatcaacagcctggggaaggctgagctcgcagttcccaccagccctgctctgaccagacctttactccatagtgttatccacagggcttgggtctcagggtgacaggttcttggtgggggtgaatgcctttgttctgttcatgtaggactttcttctctctgtccctgtcattctctccctttctgtctccctgccgcctccatttagaatttggtttttgattttgaatatatttaaattaaaatagctcaataaatgttttattctctcatttaactagagaacaggagtttatcttccttcctacccatccactttgtcaatacaatttgtattgccatttccttgcttaaaaatcccaattaccttgatctgatcattacacattgtatacatgcctcaaaatatcacacgtacccccaaacatgtacaaccatgatgttttaattttaaaaattaaaaaacccacggtgtacatttctaccacaatggttttgtgttacttgcaaaatggggttacaagtctactacagtttcattcgttgcgaattttgagcacatgtcacatactctgggctgttaggagctgtcttgtcatagatgttctagcagctccagggagtcaccaaagggttgaaccacagatgggtccctagtgtggggttctaaactctgtgactgggaccaccttgtgttatgggcagtcagtgtgcctctaagtcatgtattattatacttggttgggggtgggtatcatcatgttggttgtgactttgcaatggcatcacctcaattgaggtatgtgtgacagctttgggattagcatgtgtcttggtttgggttcctatatagcagaccttgagacaaggatttgagtgccagtagtgtatctaggatatattcccaygttaagtgagtgaagaagcgagacaggaagtgatcgaagccaccaaaggatgtgttatcaaaccagttaccaccacaaacaacaggaggtcaatttctctgggggagctctgggaagcagtggggaacatgcctccgaattatcccatttgaggctccaggaggctgggcgtcatctgacacatccccagactgtcctggttggggagagttccatgggtcagggtgctcttggatgtccagcttgcctgcatgttgaaagtcagataaaagacttcaggtggcattgctgatatttgcactcagcagcctttcacacacagggctgagggctatgagaatatgaccaaggattgatagatacgttatggcgagaaagatccctgtttagtgcttatagagcaccctgtacagttgattcttgttatttgcaatagttagctttctataaagtcactatgaacaccaaattagcaaatactgaaccattgcttccagaagatgtacagggttaggtattggygagcttgtggtcacatttagttaactgatcaatagatcacattattttataggtttctgttgaaagacagtttatttagtatgcagtattaattcattaacattggcctcgcgccaactgctctacaactcatgtctgaacgaatctcatctaacacatgcattttctcaaggcacattgcagactttttgtgcttaggaatactagacagcacgtgaacactgtgcctgtgtggcatttcacacaacaaaatcaccaacaaaatgctcagaaatatgaaaaatgtgacactaaggcgaccatgaaaaggagacttgtgtacagtaggagagctgaaaccagaaggcacagtggcacctggttggaccttagctggacatgtgcattgagctgctcaaatattttgctggtctgtgtatgtctgcaaatgaccatgaaggtgcctcaaggactggttttggagttgcaaatacattttagggagaagttccctaattagaaaaatatgaaatctgtgaataatgaagctcaactgaattttttttttttttttgagacagaattttgctcttgtcgcctaggctggagtgcagtggcgcgatctcagctcactgcaacctccacctcccaggttcagcgattctcctgcctcagcctcttgagtagctgggattacaggcatgcaccaccatgcctggctaatttttgtattattagtagagacggggtttcaccatgttggccaggctggtctcaaactcctgacctcaggtgatccacccaccttggtctcccaaagtgctgggattacaggcaggagccactgcgcccaggcagctttatttcaccttatgacaaatatggtaaaagctaccacagtgctaggtggagcctagaaaacytgggcctgtgaaatatggccttgcgttaccatgaggctaaagaggtgattaaggcagcctgtgcaatcagccagaagtctgtccaagagtcatcagtccataaacagtcatttaaaacacctgtaggttatgctacttaacaaagaaatcttttgaatcagaataatttggctctggaaaatttggattttctttatttacatagacatatagaggtcagcwactgaattagatgaatattcataggattgttgaactaaacatatttttagttactttttaaatgtgttgtacatggagaaaggacattagaaatatgacctggtttggggataaaaagctgaaacaagagatgttaatttgtataagtaagagagaaaataagatatatttcctgtgtatcactatctttwcaggtaaaaataaaaatggttatagaaacatgtacattctaaatgtgcaggtggagcacctgaggtcaggagttcgagacaagcctggccaacatggggaaatgccgtctctactaaaaatacaaaaattagccaggtgtggtggcaggcgcttgtaatcccagctactcgggaggctgaggcaggagaatcacttgaacccgggaggtggaggttgcagtgagctgagattgtgccactgtgctccagcctgggagacaagagtgaaactgggcctcaaaaaaaaaaaatttttttttctttaaaatgtaagctaagccaattaaggctgaatgctatgtttggtggaagcaatgggaagttttgggtaaagggaatagcttttgtgactgaccttggccatctctaaatggtatgtggtcaggtaaagttggttagaaagttagagaaatgggccaagtgtggtggctcacgcctataatcccagcactttaggaggccaaggtgggtggatcaactgaggtcagcagttcgagaccagccaacatggagaaagcctgtctctactaaaaatagaaaaattagccaggcatggttgtgcgtgcctgtagtcccagctactcggcaggctaaagcatgagaatcacttgaacccaggaggcagaggttgcagtgagccaagattgcgccactgtactcactcactccagcctgggcggtggagtgagaccccgtctcaaaaacaaacaaacaaacaaacaaacaaaaaaacaaacaaaaaaggaaattagataaagtgttaaaaacatttcgtttccattttcttgtgaaggattttcattgcttttgtctgatgtctttcttcgtataattttagctggtgcttggttacatataggaaaactgaagatttatttctggataaattttgagggtaatataataacaattattctatgatgataataagtgacaataaacatcacccatgagtttcttttcataaaatctcactaagatacaatcttccgtagtatttcaaaatcaatacttgcattcattcattcatttcatccatccatcaatcatatactgagcacccactttgtgccaaacagctgctgggtactgaggatacagaagtgaactaaacctgtaataatccctgccstcattgagcttatgcagtagcaggaagagacagataatgaacaaatatatataaaacatggtatatcagttgctggtaagagcaatagaaaacatagagcagggaagggagatgggacatctttttcctaccccttcagaagtctccctttgacggggatgtcctccctttgactcgaggcactgctactgagaccagttccttgtagactttgaccagctatccaccagggcaatctggacagtgccttgccctaggccttgtccttcttgcttcccgctctgggacttatctgtgctgagcctggcacattcacgggaactggctctgtactcagatacgcacaaccccaaagtgcaggcagtcacctaggagcccccttgaacaatggagggcaggaaggggttggtaaatgcttcttgctttcttctcctggagggacagctctgagatacatttcatagggtccctcagaaggtgcctggaaggatcgatcattgtgtgcagacagccagctggattgcacatctgtgatggcccttcccgtctttcctctttcactggtccaggcctgcccctactccctgtgatctccttttcaaatcaacccctgcatgcaagccttcacccaggctctgctgtggtggacactagaccaagatggggaatgcagtggttgggatgatgttgcacatataaatatgagggatcaggccaggcgtgatggctcaygcctgcaatcccagcactttgggaagccgggtcaaggaggatcttttgaggtcaggagttcgagaccagtctggctaacattggtgaaaccctgtctctactaaaaatgcaaaaaaaaaaaaaaaaaaaaaaaaaaaaaaaaaattagccaggcggggtggtgcgtgcctgtaatcccacctatttgggaggctgaggcaggagaatcacttgatgctgaaaggcagagactgcaatcagccgagatcatgccactgcactccagcctgggtgacagagcgagactccatctcaaaataaataaataaaataaacttaaaaataaataygagggatcactgagaaggtgcacttgatcaaagtttcaagaaagggagatagtagtagtcatgcagataactggagggaaagccttctaggcaggggggaaaatggcacaggcaaagaccctttcatcagtgtggctggagtggagggagaggaggagaaaaaggagatgcagacagagatktgagagagacccgggtctcatctcatggggccatttttaggacatgggttttgttccaagtgagataacaaatttattttcagatattctgtgtgttttgcctatttcatattaattattttatgtttacatggtacacttggatttccaatttataggcaggtaacttgagtcttttaaaaatattgtttgcttgatgggagctgtatgttctcattctcgttttgtgtcttccttgggttgctaatgaagtacagtttttggggattgtaccacagataytgatgtactaaaytgatgtttgttgattctggagtatgattcttcacttcatttatttagcaagtatttattgactaccactttgtgcatgggaaattaatggaaattgaaggaatggtgtggattaacctcaatactttctttgaaggtttttcattgtgataaaatatacacaaaattttccattttgaccatttttaagtgtatagttgagtggaattaagtacattcacaatgttttacagccatcactgctatctatttccagagctttttcattatcccaactgccagaagctctgtacccattaaacactaactcccatctagctgcccctgacaatgactctctctttgactaaactttagttgggctcctctaagccatcttctcaactaggccttgaccttggcctccatccttgtcaggatggccttgcccagttttaaaaagaatcctgctaagtcagcttatcaggaactctccactcttgatatctgatccctcttcatagctgatcaaattcttcattccccattatcctccagataatattggatcaatctggcctgccttcagcaagaattctgttagatcagtttagcaagaatccctccctactcttgactcattttactaattttctactaattttctatccacaggcccctatgtatccttggtgtcgtcagaattgagctcagttctatactgaggtttctttttccctcttgcaataattcctgaatcaaatccttttaaaactatggtcagcctctggttttctataatatctccagcctttggtaacttctcttctaccttctgtttctatgaatttgcctattctaggcaccttattgtcctagtccatgctggctgctgcaacaaaataccatagacccggtagcttataaacaacagaaatgtaattctcacagttctggaggctggagtttcaaaatcaagatccagcgtctggcgagatcttgtttcctggttcgtagatggtgtcttcttgctgtaacctcacatggtagaaggggcacacaagcgcccttggtctttttcataagggcagcagtgccattgaagagcacttcactctcatgacctaatcacttcccaaaggtcctgcctcttttgatcatcccattggtgattagttttcaacatataaattttggggaacacaaacattcagactgttgcattcatatatgtggaatcatatagtgtttgtccttttgtgtctttttcacttagcaggatatctttagggttcatccatgttgctgcatgtatcagaatctcatgcttttctaaggctgaatagtagttcactgtatgtatacaccacattttgtgtatccattcatctgttgatggacacggatggggctgtttctacctttcagctattgtgaataatgctgctatgaacaatggtgtacaagaatctgctcaagtaaatgctttcaattcttttgggtgtatacctatgagtagaaatgctagatcacatgtgattctatgtttaactttttgaggaactgatatatccttttccacagtggctgtataattttacttccccaccaaaaatgcacaagggttccaatgttttcacacctttgccaattcttattttccatttttttgataatagtcattctaatgggtgtgaagatatcttattgtggttttgatttgcgtttccctgtaactgatgacggtgaaaattgttgcatgtgcctattgactatttgtgtatcttgtttggagaaatatctattaaattcctttgtccatttaaaaattttattgttgttattgagttgtactaacatttttttttaatgagaaataccagtacttcatagatagtaaatttaaaagggactatgatggtgaattttatgtgtcaacttgcttggctcatggggtgcccagatatttggttaagtgttattctgaatgtttttagaagagactgacctttaaattggtagacttagtaaagcaggttgccctccctaatgtgggggagcctcatccaaacagtagaaggcctgaataaaacaaaaagaccaattctcccctgaggaagagaaaattcctcctacctgactgcctctgaactaggacgctggctttttcctgcctttggacttgaatggaagcactggctattcctgggtcttgagcttgctggctcttaaaatggaactaactaccccatgggccctcctgggaatccaacttgcagactgtgggtcttcagacttgtttgtctctataattgtgtgagccaattccttatggtaaatctttctacatagatagaatcatctattttattggttctgtttctctggagaagcctaagacagagactcatttattgagatcaattgtattttctgttcaaatcctttttgttatagaaataatttgatactcatagtgagtataaaatacaatctgcatgggttattatgaattaaagttaagtaaatattttcatttgtctatttttccactagtacatttttactttttaggtgacattctgacttttgtctcaggtccacctaagtggtttggggcagcagttgagtgatgggtatagaggcaggccagtcctttttggggcctgaatgtcctaaatgtcaggcatgagcttggctcactgcaacctccacctcccgggttcaagtgactctcctgcctcagcctcccgactaggtgggtttacagtcacccaccaccatgcccagctaatttttgtatttttagtagagatggggttttaccatgttggtcagactggtcttgaactcctggcctcaagttatctgcccgctttggccttccaaaatgctgggatgacaggtgtgagtcatcatgcccagctgagcaactattttctaagttattataggttaattgcttttttgagaaattagaaattaaacatttaagttttaagctcctcataaaggccattttcatcttatttgttctgcaggattgctttaaatttagcaacatcatctcactggcaatacatgagttgtatttcttgaatacaggaagctacattcacttcagtgaaggcttgacgtcatcaggcagcattagcatcacctgggacttttcaagcctcacctcagacctactaaatccgagtcwgcattttaagaagctccccaggtgattaatccccacaataaagtttcagaagcattgatttaaaggatccacgtgtcctgttgtgtccggaattggtgggttcttggtctcactgacttcaaaaatgaagccgcggaccctggcggtgagtgttagagttcttaaaggcggcgtgtctggagtttgttccttctgatgtttggatgtgttcggagtttcttccttctggtggggttcgtggtctcgctggctcgggagtgaagctgcggaccttcgcggtgagtgttacagctcttaaggcggcgcgtctggagttgtttgttcctccygtgggtttgtggtctcgttggcttcaggagcgaagctgcagacccttgcggtgagtgttacagctcataaaggcagtgtggacccaaagagtgagcagcagcaagatttattgcaaacagcgaaagaactaagcttccacagtgtggaaggggacccgagcgggctgccactgctggctcgggcagcctgctttcattctcgtatctggccccactcacatcctgctgattgctagagcccagtggtctgttttgacagggcgctgattggtgcgtttacaatccctgagctagacacaaaggttctccacgtccccaccagattagctagatacagagtgtcgacacaaaggttctccaaggccccaccmgagtagctagatacagagtgtcgattggtgcattcacacaccctgaggtagacacagggtgctgattggtgtgtttacaaaccttgagctagacataaaggttctccacgtccccaccaggctcaggagcccagctggcttcacccagtggatcccacaccggggctgcaggtggagctgcctgccagtcccgcgctgtgcgcctgcactcctcagaccttgggtggtcgatgggactgggtgcgccgtggagcagggggcggcgctcatcggggaggctcgggcgcacagcagcacacggagcgggtgggaggcttaggcatggcgggttgcaggtcccgagccctgccccgcgggaaggcagctaaggcccggcgagaaatcgagcacagcgccggcgggctggcactgctgggggacccagtacaccctccgcagctgctggcccgggtgctaatcccctcattgcccggggccggcagggccggccggctgctccgagtgcggggccctccaagcccacgcccacccggaactccagctggcctgcaagcgccgcgcgcagccccggttcccgctcgcgcctctccctccacacctccctgcaagctgagggagctggctctggccttggccagcccagaaaggggctcccacagtgcagcggtgggctgaagggctcctcaagcgccgccaaagtgggagcccaggcagaggaggggccgagagcgagcgagggctgtgaggactgccagcacgctgtcacctctcactgtgtttgtttcacttgaagtcttttaacaaaataaaataaaataattttacagcttggaggaggcttagaagttatctggtctgattttctcatttcatagaggaaacaaaactggaattcaagattaaatgacttccccattgtcatgctgggcttagatatggggactcattactgctatggatatttttttcctgttagaattgtctctccatattcccagtgttaattcaaataaagttttcacagactttaaagttggcagggcattagcactcaacaatgttattttgcagatgagaaaaatgagatctggaaaggtgaagtaaaacttatttaagaaaatagagtagatataattagtaaggacaggcaaaatgatgctatgtaacaaacaacactaaaacctcagtggttttattattttattttattttattttattttttgaggcagagtcttgctctgttgcccaggctggagtgcagcagcatgatctcggctcactgcaacctctacctcccaggttgaagcgattttcttgcctcagcctcccgaatagctgggattacaggcatgtgccaccacgcccggcaattttttttatatttttagtagagacggggtttcaccacgttggccaggctggtcttgaattcctggcctcaggtgatccacctgccttggcctcccaaagtgctgggattacaggcatgagccaccacacctggccacctcagtggtttgaaacaacaaaactactcatgcttccactcatgttatatgtttacatggattgacctagggtctcaagttctaccaccatcccgttattactataggacccatcctgatgggacaggtactaactggaggattgccagtagcaatgacaggaggaatatcacrgtgaaacacacactagcttttaaaactaaccagaaatgacatatgccacttgttctcgtatcattggcccaaattagtcatgtgaccatgcctgagaccactcggacaggaaataaaatcattggtgtgcttgtaaatatttaaccactgatttgtagcctttgctggtttcttgttataaacactccctttatggctgtcatcaagctatcaacatgatgtcagtgaatgtgttggtgccagagatgtatacaattgcccttccttagctgatgcaagccggtgagagtcaactccataacaccactaaataattctctcattggaatgatattgatgaagaataatacgtctatcaaagaaaaattgggtctggatgtggtggctcatgtttgtaatcccagcactttgggagaccgaggtgggcagatcacctaaggtcatgagttcgagaccagcctggccaacatggtgaaactctctactaaaaataaaaaattagccaggcatggtggcacatgcctgtaatccagctactcagcaggctgaggcaggagaatcacctgaacctgggaggcagaggttgcagtgagccaagattgtgccactgcactccagcctgggcgacagagcgagactccatcataaaaaaatacataaataaaagaaatattgtatatgaaaatagcagcaggggatatagaaataaacacaaatatcaaatccagcacggcagctaaatcagaagggagtcaatgacccatagaatgatgaagttatgacaggtcaaacacctttacaacacatttcaaatatttttgctgcatgaatatttgcactcttagttattgttgcattagtaaacaatacctggaatttaaatctctttaccccaggtctttctgtttatacttgagatgggactaaacttgtgtggcctccattatggatgcatctcccttcaggtctcttctttctttgaactattcccattttatccaaaatcaggcgctgtagtgagccatctgataggaacatcacattcccttttgtccccctgtagataataagatgtgcaaagatgagctttgaataaccacagcaatgccagatatatacgcatgtggaaagttctgggaagtctccacataaacatcttaacaaggagacatcattcctcaatttgatacccttaaaatggcttttaaggttatctttcattttccttaccgtatagcattatgcaattctttattttttaatttaattaattaatttatttatttttgtttttgttttagagacagggtctctgtctgtcgcccaggctggagtgcagtggcatgatcatggctcactgcagccttcaactcctgggctcaagccatcctccagcttcagtcttccaagtagctgaggctacaggtgcatgtcaccacatccagctaattatttcattttttaatagagatagagtctcactgtgttgtccaggctggcctcaaactcctggtctcaagtaatccttctgcctcagacccccaaagtgctgggattacaggagtgagccactacacccagccaacattatataattctatttactgtattcattcaatgtatcagagacgcttttaaaaggaacctgaggtttgaaaagggtcaaaatgtctaggatctaggttaataattttctttagctttttctatatatagtccgtttaataagatgtagttgaagtaattcactaaatctgtgtgatgttaacaagttgagaaattgatggttactgttccattctttagtatccccttagcacaatcacacaaaaattgactgtaatagctagtccaggagcttagcaatcaaccctgagagcggaacgtttctctgtcatcatggacttattgttgccatgccaacaagaaacttagaagttgcttgaggtttcagttctctagaaacttacaatcaaaaccaataatagcataaatgcacatcttggaatgtaaactgattgcactttagaatgattttcaacttacagacaaagcataaaaagtaaaattgatcagttatagaccctctccaaatatggttttggatttaaccaatactaatagttaaaattgattgagtacttattacataataagcattgacatgttttacacacactatctcatttaattctcatagcaacattaggaggtgggtactactattatctcctgtgctttatagagatgagaatactgaagtttggagagggtaagaaacttttccaaggtcacaaagctagtgagagtataaggctgagactcaccatcaggcagatggactctagtgtccactctgtcaccactatccttttctacttcccataaagcaagaaagatagggcctgtgccaggcagagtgagccactgaggtggactgaccatttaaagtcaagagtatagaagttgagggctgaaaggacaattttaagccacttaataaatgctttgatgtcttcaaaagtctcttcacttttccttagtccatgcccacagtctatcttcttctagaagaggatttgaagcaaccatcatctccactaaatggttttttcagcctgtttgcaccatgccaggaaggggactagaccctgccctgatgtctctttggggcaatgctaaccctcagaatgcatgaatgtttataaactgaaaaatcagaccttttaattatgtgctctgatgcctacaaagtaattctgttcccttagaatggctcacccaactttggaaagcagggatcttctccctcaaagagaagaggcttttcttctccagcttaaatagcctcagttgaggaatcctttatcatcccttctgctttcctccagacaacattcagtctgtcgttttcttttctcagtttaaacttgatagtttggtttagcttaaagcatttcaggattatcacttttcccagttaccaacgcaaagcctctatttggagagaacatggaagcaaagcagaaattgtgctctattatcctctgccatcctcaattcttccacttacagtgctcattcaacataacagggattctgtaagaggggggtggggacatgtcccagaaggtcttccatcttgctccaaagaaaatctcgaaagtttagaccttcgcttcagccttacattatcttggttttagcatctctggctctatttctataggtgtgtttagtgttatgtcctcgcctttgcatagattgtgactttgctgtccgattttcattctcatgggcttctcttctgtcttgagccatctcagtctgagtgatcctatctctctttccttggaaacttggcgtcagtctgagcatgtgtcaaatctcacatctcctggaagttcctcattattaaggagaaatacacccaaagtagcagttcctttgccacttcctttattttctgagaagtgaaattgtaagccaaacaagtaaatctagacacttatcagatgacctgattttcagatggaaatttccagaatttgggtgtaattggagcctctccttattttccataacttgctaatgtgccaattttataatcaatgtccagtgctttaaccaaattctccagcatacccccactacagtacttcctttattcctctctctatatcacacacacatatatgtgttatacatccatatttatgtttatgcatacatgaacacacatatatatttttacccttatctagatttttcttctataattttattcttgtattaacaggttttcccaaaggttggaataaccatatgttctagtttgcctgggatggtcttactttacttgttgttctgggagtaattaacaattaatacatttctcttttgttatcaaaagtgtgctggtttgggtgataaattaaacaatcatcctatcaaaacttccattctacattctgtgtcctgtctcagagtctgaatcctaaattggaaatagagaaaaaaaaaatgcctgcgtcccctggctctttaatttcctgaccagcacttccagctctcaggtttttgttttgttttgttttttgtgtttttttgatatttaatagctgcatgctcctggctacgtgaagtccttgtagagctggagggtgccatctgtcctgatgtgtccttttcctcttgggttctttgatctctgtttcaacatgctgattccctggttgtttcatgtggggtgtgtgctcacggctgatttttacaggtctcaattcacagtagcaggatgggctacatctgttgtacaggtgaactagctctgaatgtcttcttgtctttctctctttttcatcagtctgttttcttagaatcttggatattctgaattattttctttgttttgtcctggagtgctttgttgcatgtaacaagcaggcatgcacataagaattgtctccaccttttcatttgctcttcaagcagtgagaccagcttggctgactggctgcctctaagcaggaaaagaaactcaatgccacagtccatagaaacagtcctctctgcttctctacttcttgaaatataaggtttattgaatgtcaagttcatggcttctcccctgacaactcctggagcaagttcctctttgacctcttccagggggagggaggcagcacaggtcagtggtcaagaccatagcctcaaagtcagaaaactttgggtttcattcctcactgttggcctcacatagttacttgatttctgagctgaagcctccttgcttgcaaaatggggataacaattcttacatgatcggatttgagaaagagttaaatgagatcatacctagaatatgctgagtatcgtacctggcaattaatgtatacttagtaaatatttgttattcttataattactattattagttttagtgtcagaactataatgaactattgattcatcagattctatctcatgaaggtgacagcaacctctaacacaatgacacgaatcacatggccaacagtgaggtttgaagagcacctttgttctgttctcctgggtggctatcagtggctgagaatgccagtcaatcaaccagctratagaccaagtgatgaaataaaaatgatcctccaggaggaataagttctagtatcctatagtattacgggatgactataataaacaacaatttattgtacrttttcaaatagctatttattgtacattttcaaatagcaagaagaacagattttgaatgttctcaacagaaagaaataataaatgtttaaggtgatggttatgctaattaccctgatttgatcattacacattgtatacatgtattgaaatatcacactgcaccccataaatatgtataattatgtatcaattaaaaataatgatgataaaaatgattctctatgtgtgagtaattggagtggcttttttatttttttttgagatggagtctcactctgttgcccatccttcatcttctgggttcaagtgattctcctgcctcagcctccctagtagctgggattacaggcatgcaccaccacacccagctaatttttgtatttttagtagagatggggttttgccatgttggccaggctggtctggaactcctgacctcaagtgatccacccgccttggcctcccaaagtgctgggattacaggtgtgagccacctgtaattcgtgcccagcccctggagcggctttaatttttgttttgcatatgcttccctttttaactcaacaagaaataacatccactgtagcttttcttctagaggatggataacatggaaagagtgatgggtgaagagaagccaagatttcaagttgatcttgaatttgtagcctgatcaaatggaatcttctatgaaggtctattgctatgcctaagagtgtgaactccaagcgaaatttgagtgtttctgctcacttacattttcccttgsaggtcaggagaaagacccccaattcccaacactcctcttccctagattcccagttccttgattttcttcccattacacattgttttccaggtactatcccagttagtgcccataaccagtggaatcagtgcttactagaagggcctttgacgactcctttcagctggcaaactaattagaggatcctgttttccttctgtagcccctactactcattacatgaagctttgtatgtatgtagcattatttctttttatagccaacctcattttttattttacactgtttgattatctgattatttctgagcaacatctctaggtaggaaaaaaatggataaactgaggctcaaaatgcttaactaactccctgaagatcttacaatgagtcagggagtgagacaggaatagaaaccatgatgctagccttctaaactgtttttctgaccactagaccacacttcctctccagactatgaaacactggaaaatgggactcaggcagcgagtaaatatggaggcaaacccacagaaacacaattttacttgtacccaaatcatgtcatttagcaaaggaaaacagcaaaacaccccagtcttttcgatgtcatccaaaattataatctaaacccacaatggatatagaataggaaatgagtctgccctgaattgacatttttccatttaaaataaatttgaaaaaatttcagtcctgatatgtttttcctttatatgaaagaaggatctaaatattcagtttgatatagatttcacggtatacaaataaaatacctttatgactctcattctttgcacaataaaagcctaaccaacaaatatttattgagtatttaaggctttgtgggaacagcaggtatattagacatagttattgtctttagactcaaattttattttagtctatttttatttcaatggcaaaatggcaattactttcgcaccaacctaatagttggacagagaatacacatacccatgaagagctgaagacagctgacgatgaatagcaactaaggagggtgataaggaagcagcctgtgacgtgcaatggtgaacaccaaagcgacatgtacaaagatttcggtttatgtcccaactgtaccaccagctaactcttcatcgtagctgaatcagatctcagatcctatgcatcaacagacagcgatagcaattgctggctttgtctgcccacagcgttggtgtggaagccagcatgagaaaatgcatgtaaaaagggcagtgagctggaagatgaaatacgggtggtatccgaatcatattaaggttgcccaggcaagccttctccctttgggtttagaatctccaatgacatagcttttgaagactgttcgtcatgcccaaatggaaattaaaacaagaaattaaaaacagtctcctctggaaattatttttggcgatgagaacagaaaaccacacgatattttccctttggcaaatagttccttgtctcatcacttggaatatgtgtgagtgagaggtatctgaacacctcgtgtgaaatcttctgataatgagtgtgaagagaggacttttccatttggaagagcaaggcatgcaatttggggaaactgagtccttagactgtgacagagaatgccaaaaagccctcccacctgtggttcccaggaagcaacgacaacagtacttcatcacagaggctatgtggcaagcaacaagaatcctggaatgaccttttcatggaaacaagcttgaagctatgttctgggcttccatctgtggataaagatgggtattgttgatatgggaaacttgagaaaaggcaggaatttactttaaaacttttaaagttacttttaaaattaacttaaacaattttacttttgcaattagacagggacaacttaccacagttatccttaatttataaactgccaggacattttaattttagaagatcattaagatttttcttactggagaaaacaactaacattaaaacttttaagatcctttgactaatctctgcttacattgtcactttttgtatagtagtagttcattacactttatatttaacaaaaaacagatttttttacattgactttgccacctttataatgatatcaaaagactaagttatcttctatctaaaataaaggaattagaatacaatccctgtctttttcttgggatagtgcatggcccaatgtaagaagaattgcagagctctcgtgccaaaagtagaataatgggcaacatttagaaaacaatgccctggcgcctgccagccctcatgcacatgttttaagggtataatttgtatgaaaacccttgtgggtgggtcataatatattagcaccatctagtggtgatgggcaaagctgtctctcttcaccagccccgccctacctctcaaacaagtcacagccaaagcagagctgattgtgctctatttatagcctttgacctaaatttattgccactgttcactctgaaaattaaaggtgctgcacaactggattaaaaagatggagaagtgtgaacctaagtgtaatgataatactacttgcattataatgatcgcttgtgtttattgagcactacatacatgatcaatgtcgtacacaatgcttttcataatcatcttactccatcggcacgagaatctgtttggcatctgttatcataattatgcctattttacaggttaggaaactgaggtccagagagttttacttacctaggttacacattcagtatttagaagacaaaaaccttccttggctcactgactcttcaggttggtaccgtgagacgcaccatcactaggatgctatggagtaggaggagctcgggagcttccacaaactgagaaagcacctgcagaaagggaagcaatggagcacactaattaaggatacgcactccagggtccaactagaacggggttcgagtcatgacttaaccagttattaattctgtgtcctcggtaaaattacaatatcttcttagaacctcagtttcttcttctgtaaaatggagataataatacattattcatgggggaggagttgggagtattagttgagatatgcatgcatagggtgtggttcataggagccattgaggggctattattatatttctattttaatttttttagattttgtatatttctcttttaatttatttgaatgcaaaaatcaaacagtgatcagagtcgtctatctctctcctaaggtctcaaaacactcattctgtgtatggaaagaaatggaacaagaaggatttgttttagtgtacaatagcaaattgatgtggagaggaaagtaatgtaactgcataccttaatctgtagctttttatggaatgaaggagtaacttgttcatcaatagacagtgttgctgccattggcaagtcttgctcacatgcagagtccagagaaggttcacacagtggtcaagtggctcttctggactgtgcagaggtggagatgtgggaatgatccctgtttcctcttgaggctacacccttgcaggaggcacttggcttatattttccactctcagagcactgcaggtagtgaccaccatggttcagcagagaaatctctttccttggaattcttccttctttctttgtgctcttgtctgtgctcattcagcaaagactgggtttgctgctggaggggctgagagcatggggtgagttcagggggaatttagatctggaggtgaaagtcaggatgtgagtgtaacatgtgtggggggagctggtctcagtgtggcttatctaaaagaaaatcagagccttaccactgctcaggaaagccaggagagccagacccctttctgtttcgcttggcgtgaccatagctccattcctgctctatcctttctttctttccctttctttctttctttctttctttctttctttctttctttctttctttctttctttctttctttctttctttttctttctttctttctttctctttctttctttctttcttccttcctttctttcttccttccttcctttctttctttcttctttctttctttcttgttttcttctttctctttctttctttctctttctccttccttctttctttccttccttccttctttcttcccctccctcccttcccccctccccccttccttccttccttccttcatttctttctccttccttccttccttctttccttcctgcctgcctgcctgcctgcctgcctgccttccttccttccttccttccttccttccttccttccttccttccttccttctccttctccttctccttcttctccttctttatcttcttcatcttttttttttttttccgagatggagtctctctgtcacccaggctggagtgcagtggtgtgatcttggttcactgcaatctccacctttcaggttcacaggattctcctgcctcagcctcccaagtagctgggactacaggcacatgtcaccatgccaggctaatttttgtatttttagaagagacagggtttctccatgttggtcaggcaggtcatgaactcctggcctcaagtgatctgcctgcctcagcctcccaaagtgctgggattacaggtgtgagccaccacgactggcctgatcctgctgcttctgtagcccaagctctttgaatacagagtgtgcctcaggtgaatatcatgatgtcatatcacctgtaatgcactctctacccagtagtcagagatgcctgctgcaaacaggagtctgataaagtcactttcttgcctggacccatatggtgatttcccattgcttactaaaatgtgattttactacacctaatctaaatcttactagatcttactaaaatgtgaaaaatctgtaacttgacttagcagggccatgtgtgatgtaactcctgcctacttctccacactcatcttcagcttcatctggccctctcagcttcctcctcatactccagataccgtgttcccagaatgccccaagctccttctcactgcagggcctttgtatatgctgtttccaccacttggacagtcttcactagattctctggtacttatccttggacacgtgacttcccaaaccttgttgcatattagcattgcctagggagcttaaaagtatcccgatacccaggcttcaccccatgccagttcaatcagaatctctggagtaaacagccaggcaaaagcattttttaaaggctttgcaggcaatttcaatgtgtaggcaactttgagaaccagttcttagcttaactgttttcttcttacggatagctcttgtcctcatttccctgtctagcttggattccctcattaaatgttcccatagtagtactctgtatgttttcaacaaacactctgtatttgttcagtgtctctcccactagactgtaagctccacgaggctgtatctactgtgttcacttctttattcctagtttgtagcacagagcccagcacttaggaggtgctcaagaaataactgtgaaaagaatgaaagctctaatgtggattgctgatggttctctccagaggatggggagctgtagtttggttatctggctcaggcttgtgcatccacatggtgagtctatgacaggtcaatatgaagagggggacctccccattggggagatgaccacaattccatgggaagaacattttcctgcctctgggaatgcatctattctagrtcatggcaaggactagaaatatcaagggttacatgtgaccactgggctgccctcccacaactgtattggtctattaccttatttttaatttgtctttagcagagaatatttaccaagaaatatattttcaacactcaacagccaaagaatattcccatttgactgctgaatattgacagtgtatttcttggtgtatattccctgctgaagacaatgaattaagagtaagttaataggccaatgcatttgctggagagtagtcttgtaacatcaatataaccttagaatgtgctttacagagagcagaaataggtttagtttatgccttcaacgtgccatcttgaaggatagcatagatatgtgctcagaaggataaaaaaattaaagacatggtttttatgtatagtacactgtacaattaaagcacattaggtgcacgacaagacaatcctgaagtccatttcaattgtgtgtattttcttttttgcatccccttctacagatttgttgcatgatattacaaacatggaaaatatcttattgaaagggaatctaaaaagtcataatatctaatgaatagacgtcggaacatcatttgccagtagatactgtttcagaccctttctgcaactgtggatgattcattttatgctggtgtctcagtttctccacccctagaacaagagtaataaaattggcctttaattaaagtctctattattttttttaaggctccagggaagttaggtccaatggaaaaatgaaatacttgaggatatgacttagtctgtgctaagagttttataggcagctcaccaaagatttttttccaagtgatttgcacgatatgcaaaatgtattttaagccaaatgtctcggaccgggcgacatgcacaataacctgtcccaaaagcaattatcacatcaggacacacccactgggattcaatgctcctatttaaagtctgtccaaacactacagcccacatctataatggctttggcagaagggtgagaaccagcatctgcaaaaaccttatttaactgagcaggaaatggatgttttccgtactagagttttaaaagtcaagaaatacctattttgtgaacaggatttaggatttcatccctacaagaagaagaagtgagagcaaatggacaaaaattaattccataaagaaatcacagctctcctgcccattttccaatgggaattgagggttatttgttgaacacatcgtcttgggaagtaatctccttaaaacacagggattgtcctaagcatgcaaacatattttgatctctctagatttctgagatcttaagtatagggtcggctcaggctttgcctttttcagaaagtctttgttaataactcctctcctgtgccctctgggttagaagttcttttatactgcatacctatcactgggtttccatattgttttaaaattgtcctcttctccattagattgtgtcactaacagtcgtgcatacaacttcattcatgctcctgctgtgcccagcaaagtgttgtttagtaagtgattgctatataagtgaagagaggaaagaggactgccgtggccattctgcacttggcagagtgtaggtggggatatttggaatccaagcaaataaagtcaggcaagggctgctcttgtttgtgcatgactaatgtgtcccgctcggttgcgtcatccagaggctgagtgtctggcatgccgggaagcgctgtggttccctgcaggcggtgtgttctggccctgctggattcttgtagtggcctgctgcagtgatgtgggaaggtgggaggaggcacacagtgaagcccagagccacttccaaataatcacagcctgtcctctttaagggcttcttttttcttacctttaaaagaaaatactgccttaacacatcattctttaaattcttttctaagaggaaagaaacatcgacaatcacttaaaaaagatggtcgagagttattctgtttcagtgtgattccaggggaaagctgtcttggtccaaagcccaggaggtctttggttttctgtggaagatgcacggtagaggtctcagagttaagggtggaatgtttaggccaaggcatatcagctggtgggctaaggatgctgcgtcacagtgaggcttttggcatcgtcatcaaaggtggtttgatggagggcagaggaaaaagatggaatccttcaaagccatgatagtggacttgggaaaggggatgaaaattaaaataaaagaatcaacacagatgtcttggtttcttaaactaaagaagtgtggggtataattgttttcccaaggaaagctcaaattcactggaaaatatgcatgatttacataactatggtgtatttaaattacttcaattcttaaaatattaagataaacttttatgtgaggagagtgcctttatttaaaactgttgcaaattacatcgatgactttctataaccgtggtagacatgttcatttcacataaaagaatagacctgtcagtattcatggaaggctgacttctgcccagctttatctgtgatgattcagttcctttggctcagacccaagaaacatcaacctttgtaactctctgcccctttgtatttactttctaaaactgtgacatttgccaagggggtaaatgaaactcaatagcagcagctaaactgcttgtccataaaaagacattgttttgagtagaaaaggaattttaaaacgtattaattgacatgttgttgctgcaacaataaagaataagttaataatttctgtgctcatactgtagcttgttttctttttcttaaatttatactgtagcttattttatataaactttggtttttaggtcatgttcttaccaatcaacccatgaatagtaggacaaaatattacccaagccagcgccagcatattttatacacctaagatatgaggcttttatactgaatgggaggttcccttatagaagagttataggggcggtggctatatatatataatcttctctctctctctctctatatatatatatatatactctctctctatatgatatatattatatatatgtataaaatccactatgtgtcaggtgccacactaaatactttatatttcatttattcttcccaacagcccaacaaagaggtattgctagttggacatgcaacagatgtctacatgtgaaaacagatccaaagagggtgagagacctgccccaggtgccatggtttgttggtagcggagctgagatttgaatggagatctagcgtccacctcagcttgagttcttacccacttcaatagagtgtttctcataaacaaagccctacatgaggcacaaaagatgtttataagacatttgcactgtaatttaggaaacaaacccaaacaaaacaatgaatacacaggaaagcagcatcaacataataagctgtgctgtatataataataataataatgataatgatacaggaagccgtgctgtatctatctcaggtgtaataataataacatgggaagccatgctgtatctcatatcttagcttacacatctttatttgcaagccaatgcaaagtgaatttgaagctactttttggatggtgtcatttctttctagaatatttaaaaatagaatcgcttctcaaaaggcctatgacatttgaaagattcagattttcgtgtttcttatgaggatgggaaattgttaatgctccataattgacacagattggggaggggtgaaagataatgggcagaggaggattacgcaggaggagtttgaaggttgagggtctggtccttttttcctcccttctttcctaaccccaaaagtgaaagtggagaagaaatagtttgatgggcatgaggcacccactgagcacctttcaaaatgattctgctgcattctcatgggtgttaaaatgtcctgaaaagaaagcatggctccttaaagaaaaactatatagtgttttttttacattcataatggctactggccattaaaagcacttggcttggaaagatattcacttattggtagatgaaacagcccatcatgaaacagtaagatcccactattgggaaacgcatccagagggcgggacagacacatgaatgttattgtagtggtttgctagggctgccacgacaaagcaccacagcctgggtgacttagataataatcctagaggttagaagtttgagatcaaggtgtcagcagggttgcttttttctgaggcccgtaagagatggacacctcttccctttgccttcatatggtcttccctttatacaggtctgtgtccaaaaatttcttcttcttcttttttttgagacagagtcttgctctgtcacccaggctgaagtgcagtggtgcgatctcggctcactgcaacctccaccccctgggttccagggattatcccgccttagcctcccaagtagctgggactacaggtgcatgccatcaggctcagctaattttttgtatctttagtagagatggggtttcaccattttggccaggctggttttgaactcctgacctcaagtgatctgcttgccttggcctcccaaagtgctggaattacaggcatgagccactgttccagaccaaaaatgtcttcttcttgtaaggacatcagtcatatctgatttgggttctccctaattatctcattttcatgaaatacctctgtaatatctccaaataggattgcattctgaggaactaggggttaggtcttcaagatatgaatatctggaggtatcatcagtccacagcaagcatctggatgcggagccagggtgccagccctcgctttgctggggcaagcaggcagtgctgtctgcagggcagtgcgttctgggcaaggaggactcactgggtccacctcccaccccagtcaaggaaattggaagactccatgtcttggttaactgtctgaaaattcagttaattcttggatttcagatttcttaacccagttacaataactttttgatatgtactcttgaaaagaaagacttcttgaaagtcattgtgaaaacaaaaattcaactccttcaaaaagcactaaaagcagtgtaataaacaaaaatggggtggaggttgcagagttgaaggaagatgtactcacaaactatggttccacagatatttttcaagggcctgccagcatgaaggcagcagatgaggctcttgggatgcaaagaggaatcagacagaatccttgccctcaaggcacaggtggagaaggaagatgaacagagttccagggctgtgggatgagggctgtcctagaggtacctcctgacaggcatggacaggtggacaggagtgttccaggtggaggccatgggataggcagaggcagaacagggcctgctgaagtttggaaactgggaatactttggcctagttggggaagtggaggatggaggggagaggtgggcctcagaccttgcaaaggatgttagactgtgctgcagatgggatgaatcctttaaagattgaaagcaggtgctcagaaagaggtactggtgtgcaggagggggacaggagctggtaagtgagaacacagagtctatctaataggttcttgcaagagttaaggagaatcatgaggaaggcttggacaaattattgcagatggtgttaaagaaaaagctattcgctgatacttgttaaagcacaatatggaagacttcagtctggackgtcaccataggtatagggaccatggcaatgggattttgcagtggcagagagagataggactcaattccaaatatggcacaggcaagtggcaatttagagcaaaggattggggtccaggtcagtggatggaaaagtactgagaggtaacatcaggagtaagagaggaattctggtgaaactgaccatataggattcttgctgaagacaggccaggatgatcagacaccacttggggaatggtaggggatgaggaacctgatcatatattgaaggtgggggattcttgctaaagtgacttagtagggttcttgttaaaactggattttaaaaggaaatgtacagatgggctcaggagaaggttcaggagtctgactaaagtttggtccagcaaagaatcactgtccactgagagagggggtaaatattagagacatttagaaatagaatcagggccgggtacggtggctcaygcctgtaatcccagcactttgggaaggccaaggcgggcagatcatgaggtcaggagatggagaccaccctggctaacatggtgaaaccccatttctgctaaaaatacaaaaaaaaaattagctgggtgtagtgttgtgtgcctgtagtcccagctactcaggaggctgaggcatgagagtcgcttgaatccaggaggcaggcagaggttgcagtgagccgagattgagccactgcactccagccgggagacagagcgaaacaactccatctcaaaaaaaaaaaaaaaaaaaaaaaaaaaaaaaaaaaaaaaarccaaaaaacaaagaaatagaatcagaaacttgatgactgttgggaagtgaagaatgagagaaagaaaagagtctagaatgtacagtattcagtgacatttatctaaccaggatttagtgaacttccaccctgtgacagttacggcatcagactttgagaacacaatggtaggtgagataaatcaggttcctgttatcacaggactgaagtcaagtgaggatggacggtgaccaaacacccaaatacagtggagtgagagatgagatggtggaatgccttccagatttctgtcttggcatctgctgggaccaccaaagttagaaagcccagaagacagaagagaaccagcctggttttggatttgttaggttgaaggtgaaatatgcagaatgtgatgcattatttcctgccactggaaaatacaactattcttccaaaagggagtcttcttaaagggaagaaaaaatattgaggaatttcagacatccctagttttgctctagagtatatatttgaggaacaatgttgccctctagtgttcatctctrtgtttttattccatgctgggaagggtagagaagagtccaggcaaagtcaagtctgccttcttatttctggtcctagtgacacttttataagtgaggttttccattttcacagaagtgaaaatattactagtgctttcttttggttacgataaatattccaataattgggagagaccatgaaagaaaccattttgatcaatggcagaaagcttgtgtacctagcagatctttgacatggggtcagagccaacccaatgtccagtgacagctaaacacagtttacactgtttttgggtgtttgtaaaatgttcaggtttcccttagcatcaagtgctaggtacctgacatatatgtggcaaaactttatactgactatatataatttggatttttattaaagtcattctttcaaaataattttttgaaataaaataatttttaactgtaatttttttctcatcttgctatgagtatgatcaaataaatttttattttgaacttataaggagattgtcttttgagaagtagaagtcaagatggtaatactattctttgttaatcattagaggaaaagggctatatgaataaaaatctggcagtatatgtcatgtgctgtggcacacacctgtagtcccagttacttgggaggctgaagccggtggatcacttgagcccagaagtttgaggccagcctgggcaacattgcaggacttccatctctagagtaacaaccaccacaataacaaaactggtgacagaaaggcagagtctgcagtgtgtactctcccctccccctcttgaaattttcctgtagaagctgtgaacatcccaggcctctctggctcatgaaaaactgtgtaattgtgtaacatataaaagctcacagcatgggcagccagacatacctggatgagccctggatttgctagttttcgctgagctattgggcaagatgtgtaaaccctccaagtctcagtttctggaaaatggaaacagtaattgaatttatcttctagagatgtgaggactaaacacgatgaagtatgtaaagtatgtaaagcatttagctcagtatcctttaaccattaacaaaggagaacatgacacataatgaattgtttgcaatagcgagttttgctaacaagtaaaaggggactccagaataaaataagaatcattttttgcctttggaattattgtcagcaatgatatcaatatacattctagatcctaaagcaaattctataacccaaactgtaaaccccttattctgtctcttgtgagcaaaacagccatgacttttgttctctgcactgagcaacttactcttttctgttccttccaaaattgccactattgctaaaacttatgaaccatatatgcaatccagagttaacccttttataggagtagatctcccctttttcatgaatatgattacatttcctgactctagaaactcctttgccttttaatttccagctgatccattgtttaggattatcttcccatcaaagttggctcatgatgtcttgcctatctttattattttccatggatgttggaacaaattttctctctttttttttttttttgagacaaagtctcgctcttgtctcccaggctggagtgcagtggcacgatctcggctcactgcaacccccacctcccgggttcaagtgattctcctgcctcagcctcctgagtagctgggattacaggctcccatcaccaagcccagctaatttttgtactttttttagtagagacagggtttcgccatgttcccaggctggtctcgaactcctgacctcaagtgatcttcccgccttgacctcccaaagtgctgggattacaggcgtgagccagcgtgcccggccagaacaaactctcaagtaacttaattttttctttgaatatagtcttgaatcaatgggggctgggggttggggaggtgtatcagtctatcagcctgatatgatgtaacatgcatcttttctaccaagcctctttctgggagcttatggaaactttagtgtgctgaggaatgagattggaaatcatcctttccagcaaccactgatcttagtgactctgcaccacttaagactcttccagttgaatgttacaggagcccacctccaattagcttgagtagctaagggaatctttgggttccagagacttgtgtctacagtaaaatcactttagggatatcttgatctaagtgctcaaacaatactatcaggattctatctggggtttggcaggagttcccgtgtccattgtatggcatacacagttataattttgtcttcattgttatgttttaagattcagtctccagaagagcaatgtatctaatattgggtctcttccagctttgtgaatgaagagttcatctcccagacatttcttgaatgctgctcactgcctrtgggagagctttggcttttgaatgtgctagacaaggctggccacatcattcatagggctcagtgcaaaatgaaaacgcaggaccccttgctttcaaaaagcaagaaaaatgaatgccattaaagatactaaaatatcatgcctgtaatcccagctacttggggggctgaggcaggagaatcacttgaacctgggaggcggaggttgcagtgagccgagatcatgccattgcactccagcctaggcaacaagagcaaaactccatttcaaaaaaaaaaaaagatactaaaatataacctttcataaaatatatatatgtatatatatatatatatacatatatatatataaaacctttcattttcttaatttgtggtctctttgtccacaattcatggtgttttttattttgtatttaatggcatgctcccttgggcatggggatactggccaggcaaggctagaccttcacaggcacccaggtgtccatttctgtgacttgcaaattccctgtctaaccatttgccagcttctggaccagatgccatgccccagcactggtaggaggagcaggtaagtcaatctcctttttttccacagcccttggccccagtccaccatgaatgggtacattagtctgttctcatgatgctaataaagacatatccaagactgggtaatttataaaggaaagaggtttaatggattcacagtctcgcttgcctggggaagcctcacaatcacggtggaaggcaaaggagaagcaaaggcacatcttacatggcagcaggcaagagagtgtgtgcaggggaactcccatttataaaaccatcagatcttgtgagacttatccactaccacaagaacagtatggggaaaccacccccatgactgaattatctccacctggccctgcccttgacatgtggggattattacaatttaaggtgagatttgggtggggacacagccaaatcctatcaatgggcaacttctaagggctaataacctcaatgccaggtgcctcataccttgatgagggtaagtgggagagacagagagagagagagaaagagagtaagagagattgcctaaggtgttgtcatgctgccacccagggtgaagacagctgcagccatggtcctctgagatgctgcagggtactctcccacatctgggcccacgctcccactgtggggagagagcagcagcaatcactggttgggacctgggaggtgggggtctggtgggggtccactggggggcaggaagccgggatcagcaggagtggcctactgagatccggccagggcaggccgggaggtgggactgcaggggagttgaggctccaagccctcaagcttgctccattgacccattggacttacaaagtgcaaatgcagagataaagtttttaagaattttaagatggtgaccacagagcataaaaccccaagtgtaggagtcctctgtgatggtaccagttctttacccctaaagctggcccagggcctgggtttgtgtttttccaaattttcttcctttcatctaggccttcctgttctacacctacaaaggactctttacactcagtcgttgccagaggacaaagacccaggtctgccagggcagctggttctgctcatgcttgagctgtttctagatctcttcctctgttggactcagactttgctgagggaattcatgtcattttcatgaaaaccatgactttgaccttaccatgtgctggttgtccctcagaagctacagaagaaagacccagccatcctctcataagaaaacattattaagatagaattgttgcctggggtcttgatcaagtgagctgagaagaaattaccagcagagtttaaaatatgcccctttgccttcaaatgctcagaatctagttcattccrtgaggcaagagggaaatgacattttcacacttattttctttttctgtttttttttttttttttttttttgagatggagtctcactctgtcaccacgctggagtgcagtggcgtgatatcagctcactgcaacctctacctactgagttcaactggttctcttgcctcagcctcccaagtwgctgggactacaggcgcgtaccactacgcccggataattttttttgtatttttagtagagatagggtttcactgtgttagccaggatggtcttgatctcctgacctcgtggtctgcccgcctcggcctcccgaagtgctgggatcacagtgctgggatcgtgaggcaccgcgcccggcctcacacttcttttttatgggcatttcactttgtctgctcataagggctttgcgcatgttctctagactatattgctgagtcatttagtttctattttctatttcctacaggttttcaaaaatgtcatgtggtgttttccttgcctctcctgtaaccttgtttgacttggttttgggaaagacatttttatcagtgtttagtttaacatcttactcatcatgcttgagtctggactttaggaatgaaggtcgtatcggaaaataatttctccgtttggtgccagcattttcatcccttgacaaccctgagttccagacaaataatgtggtgacctagtgacttttctctttttgcttatttttaaatttttaattaattaatttttttgtagagaaggggtctcaccatgttgccaaggcgggtcttgaactcctgggcttaagtgatcctcctgccttggcctcccaaagtgttgggattacaggtgtgacccaccatgcctggcacccagtgacttttttattttcgaggtcagtgacttgcctttaatgtcttactctatctaacttttgagattccaagtgtgttgaatatttgaggctctgttgtgagttcccaaactctgaagaaaacagtaataacaataaaagcataaaagcagctttccccccattttctgaaagacagtgtgataatctgagcatttttttcatcagtggaataattgtacctgtaaattgagttgaagatctaacgtcaattcaaagttctctattgaagttgaagatctaatgtcagttcaatctctatcaactatctgcctggcttcaggatgacccaagtggctaatatttttgctcagaaggagtcccccctccccacccagatccgaaggctttgcctagttttctactattcagttcactgctgattgcatgcatactttataagtctgcagcgtttctaatgtaccaataaactccctcacaaaaaccagacccttcaaatgggctataaattaggacagtttcaacctgcttttttcctgaggtcttaatcttccactgaagacccattttccttaaatagattttataagatttttatggaaaaattatatttagattttaccactctcctgcatataatcacatattttaacggaagagtcatgcatttattcaacttagaggattgcaggcagtaatttgtaccttgagtttttatctactcaatgttacgtatttcttttggtaaagatttgctttgaggaacttttgttggctttgtcaaagaataaaccttgaattctcgtttcacatgtatgttctttattttgaaaatagagccattcgggaaacccatgccatggctcacagtggttggacaacattgagagcagtagtgaggttgcgtaagtgcagtgatgagaaccctgggggcaacagttggaagaactgagatatagttwgaattatgccattgaggccttttatttaatagcttccctttttgtaaaacagaaaaattaacatcaatcccagcttcccagcatctgactktgtatggaaaggacaggtaaaacaaaaggtagacatggtttgagttttatgaaaaaaaggcggtcaggcggggtggctcacgccagtaattctagcactttgtgaggccgaggcgggtggatcacttgaggtcagagtttgagatcagcctggccaacatggtgaaaccccgtttctgctaaaaatacaacaattagtcaggtgtggtagcatgcacctgtaatcccagctacttgggaggctgaggagggagaatcgcttgaacccaggaggcagaggttgcagtgagctgagatcgccccattgcactccagcctgggtgacagagtgagactccatctcaaaaaaaaaagagtaatcttcagatgaatttaatgaaacgagctcggtagctttcttaaaaaaggatctccttaaaaaaatatccaaatgcatgtattgtttgctgcattttctagattactaggcacagaacattttcatgggaaaagcaaaggtgaaggagaagcagagagaggagggtctgtagtggagtgaggcgctcagacttcctctgtcataaatcatccctttgtccctccttcccatacccacaaggcaaattcctatccttccctgaggagagctgggttcctcaggtttgaagtaagatctaacaatagaaacagaatgtaaaggaacctggggacccccgccaacccagggctgggtgcactcttgagcaatgaaaaaactgcagatcatgtaggtgaaagtgatttcaggggagcaggcagaggctctttggcagctgttcttacaattggattgcagttttactttgggactttggggacacacatattttcaacacaatccattccactggaatcgaatgaatgcattattgatatgatgtcaccggctccttatgaaattaggtcagctcttgacattcaggtgcacggttaacatgtccataggtcagccctgatttctttattgagcagtttcagatgccatctaagactctcaggatgtcagcacttctggccactgctgcgaaagcaaagaaaatggctcccagctcagtaatgtctggggaccaggctgccattggcggcattctgaaatgaatagtgtgagctgggctttatctaccacaaacaatctctggtatgtggaaagaaatgtaagcagcccttccaagagacttctttcagaggaatggaattaagattcatatccaagaaaagtgagaggctcctggaacagcagattttcccacaccttttctttgtttcagtttaaaacaacccttgccacagtgaggatgggttgcactttcttgctggcaggacgcaggcggttgttctacagtagaattaattttcttttagaagccacaagagtcaaagcagaatgtgtgtctgctttagaaagacattagcttccgtgtctcttgttatctgtgttctattgtctctgttttgcctcccaggggacatgtttggttgtcaccactgggcagggcggtattgctggcatttagtgggtagaggtcagggatactgctaaatgccctacaatgtacagaatattgctccactccctccaaatatgcagccccaatgtcagtggggctgctgttgagaaaccctgctctattagggcgctttttcttccattcactatgcaccttctctgatagcagacttagtgactacataaggaaatgagagatgccagctgtgttttgccatcaggaatgagcttaatatttattatcagtttgcctaaagttaatgttatgcaatactatttgcttaatagctcttcttttcttcttagtttttaaaaacttataatcagaaataatgaagatttaattttaattttcttttatgaacctaatgatcattacatacatatggaccaaattctcaataaaatattatctaacagtttatccagtattctagagggggttgaaggtaattctgttgtgttgctcattattgcaaatactggaactaagaataatttggtggctaaggccattgttggttgtatacagatgccttgctggtgcagagcagtgctgggctgcagttggggtggtgaggggagtgagggcaaggcatagcaccagttgaaaatgttatttccagtcttatgtgagttaaaaacattgggatgaatattgcattttactccccaatgtaaagataacatttccactgctcatcattgaaaaaaataattgatgctcaaggaaggtgagccctgtttatgttggggctttgagcagctaatgtgcactcctgggcgtaaaatcatctcagtttgagaagcactattataaggggaagaagcagtagaaaaaaagacagaaagacaggccgggcatggtggctcatgcctgtcatcccagcactttgggagggtcaaagagggcggatcacttgaggtcaggagttcaagacgagcctggccaacaaggtgaaaccccgttcccactaaaaatacaaaaagtagctgggtatggtagcacacgcctgtaatcccagctacttgggaggttgaggcaggagaatcgcttgaacccaggaggcagaggttaccatgagatgagatcgcsccattgcactccagcctgggtgacagagtgagactctgtctcaaaaaaaaaaaaaaaagaaaagagaagacagaaagacaaattactgtgaatctgaagcaggtgactggcttctgcagagcatgtctttttatccacctgattattaaggatctcctctgtagtgaatgccctttggtaggcatttacaggagacacaatatctcacagtctgagaggttcatatacatacctttccccagatgtccttgtcacctgtcttctaaacatggaagtccctgaccatccagccaaacaattagtaactgcccatgaattagtgttgatctatacctctggctatctgtcacttacttccatcatagtggacgtgtactgctgaatgtggagtggacctcctctgcccagtggagaatattttttcaccttgtctttctgtgtcatccctcagtggggtggcagtgctgcagctttccactttctagtggtaccagcatatcatgctgaagtttttcttccttagtcagttggtcataaggaacaccctgggaggtcattggtgtggattgagggacaggaggcaattttaactggagttggtgttgaaggagcctgagactcctgctcacattgcttatttgtaccttctggatttgcctgagcttggtctcttttatatctgtgtccatcaggatccatccagagaagaaccagtaggagtttaacatatatgagatttgttacagggaattggcttatgagatgtaggagctggttgagcagcctctgtaaggctgatgcatttgcaagtccactgagcaggagtgtcaggaaggggagatcatgagtagattgcaaccttgtgagcatgagctggaaccctatgaggatgaatgaaaacctctggtcttgatgaccctttatcatggaggttataaacacatattcctggccccaaactcagaaaagctaaggaaggatgtaggataaggtagagtatttgcaggtccagatgccgctttatgctaacaaggtgagtcaatggatgagcaacaactgtacatgcactgcaaatagctacatcttcttttcagccttccaagaatcccaagaatctcgctttggctcaccataaccagaaacatacgagagagggatctcagggaaatgtggttcagtctaacccaggtgacatgttacgaagccatcgtgataccattcccatatgttggtagattgcttcttagcacagtcttgtgactgggagggtcagacaacacctggcttatggtgggaaactcaggatgctgggtcacctgacacccaaggtgtggtcttcagtctttcctcaggcccagtaggaagccagaagctgtttttcaaaaggagagcagttacatctccagatttatcacatatctccatatgtaatatattggatcatgggctttttaattaattaatttatttattttactttaagttctgggatacatgtgctgaatgtgcaggtttgttacataggtatacatgcgccatggtggtttgctgcacctatcaacctgtcatctaggttttaagccctgcatgcattagatatttgtcctaatgctctccctcccctcaccccccaccccacaacaggccctggtgtgtgatattcccctccctgtgtccatgtgttctcattgttcacctcccacttatgagtgagaacatgcggtgtttggttttctgttcctgtgctagtttgctgaggatgatggtttccagcttcatttatgtccatgcaaaggacatgaattcattcttttttatggctgcatagtattccgtggtgtatatgtgccacattttytttatccagcctatcattgatggacatttgggttggctccaagtctttgctgttgtkaayagtgctgcaataaacatacgtgtgcatgtgtctttatagtagaatgatttataacattttgggtatgggctttttatttttttcaacttacctgtggttgttgatgtaccaggacccagtatatacgtgttagctgctagaactttatagcatgttttgatatttatagactttcatttcatactttttttgcccttatgtatagagttcccagggaattttccaactctgtcctccaatttagtaacttattcttcagtggtgcctattttgatatttggcttatttgaggatttttgaaagttatgctcctttattccaaggtctctaattggctatttgtcagataactcatttttattttgtagatgagatagcttctcctataacactgaggttattaccatatttcctttaaaatccccttttgtttgctgcattagcttaatttcattgtgcatcagtttttccatttgttgtcttttgtgtctaagtgttagttttcctgaaatgttttctatttcttgcccatgtactcattttcaaactgagtctcagtttgcacttgtgtgattgtgttcctgttgactgcaacctgattctactgactttggagaaagggataggatgtgctttcaggtggagcatatgagtgctttgtttttgagtttcctgtttctcctatttgtcagaagttactattggcacaaaccagtctttccaacccaagcattcaaactaactgctagagtctagggaaaaatccttccttctgatttgagatagggagtgagggaatggtgagggcagaatggaacccactggctgctctaaatcctctaaatgtgtttccatagccctgatgactttcctagttccatagaactggacatccaggctgagagtacaaaacccaactttgctcctatttttcatagttcccttcacctggggcgagttttgggctgctgtttactctaccaaaccaacctcatttgccttcaatttctggagaattagccagatttctggcccactgataattcttttataatgctggtgaacaactattgtcctgtacacacacacacacctacactctttcccatcttcctgtatttctgggcacttgggacagaagaagaggtctatgttctcagtctgccaccttgatctaatttgattcgacgtttttcaagtgattcagattgctgtctgttattctataatgactcaaaccacaagttatcctgggcttgttcatgtcggatgaaatattcacagtcttgcagcttaaagacattagagataaagctaccggaacataatgacttatagtaatgaggtttcatttgagggtaatatgaacaactggggactcttgtctttgctctctgaatttcagaatactttcacattgggaaaacaggaggcagtggctggttccttggcttttgttcgcagactctgcagtactctgtcggcttgatggatgtattttctcattgctggtgataattctgtagggggtgattcaccagcaaatggaggccaaattagtgcatttttctccctctacatactcatgctcattggctttgctatttactcctaatgtccatttcctctactcaataaatcacctttgatgagaaaaaaagtacaaaatattagtcatgtgaggatttggatcatgtttaatttaacgccaatgaaaaagttttctccttaatccagtagctctctggagccacagtctgtgcttgccaatggttttgtgtatgcactgactgaaacccagacagcttgctcccaaaccagcccagagctcagaggatttgtgctacattcctacgccggcctgagactctgagcctgggggttaaactgtaaatcaggaatgactgaaagcaatactttgctaaattcaatcatcttcctctttcaattgacttttctattgttctatttttctattctttgattattgaccaggacattgtgggttcaatgttacactcatacctaagattatggggcacaggggagctatgagaatgcccagctgccccatcacttctacagagaagagctggagagactcctctctgggtttaaattagattcttgcatatcaaggaccaaggggcagactatgagctgccacttgctcatctccgtcaggtcttgtttacacacacagttagccagagaacaacaattacactggtacactgctgtgtgtgtttactcttaaacttcagttacatagtgaggcgtgaagctgtgaactgagggtgtattcatatgtatgttgacgaggctcacctgcagggctaagcacctggagcctgtggcagcagactctgagttagagtcacaggttggattctccagaagcagcggttaacatggagttcgaggtgcaagattttatcagaaatctgcagccgtgaatggaakggtgagatctgagcagaggaagctgtgaaatgatgctgtaggcccaagaaatctggctagagttgtcttccctgggccaaaatggtggcatcttcttgctcctgccttgctcagtagctgggtgtggtttgcgacccagggtcaggtggctctggtagctgaggtggaggcagagaaagcttgcagctgggggctgtctgctgatggggctccctcaaatgagggcaagtccctcctccgagggcgatctggtgagtgtgttcctgcctcaggtagagcagctgatgagaacatttatcctgggaagaaagaaggtagctttttttgagtaaggggtcctaagggtaggacaattgtgagctcatgatacctaaattatttctcagctcagctttcttatctgatcagattctaaggaagaaagaggttatagtaggaagcaagtcacatgcaggagctgtattgctgtaagcctcattaaaaaatgaagataaaaggcacttctgattttggcttaagagcagaattcagtacaggagggagagactgaatatacagactatggccagagcagagatgaaaatagaactatgacctacaatgtgccacaaccagcccaggataccaacccattatccacaacttaggaagtcagtctgctatgtcagacttgtaggaagtcagattcctatctccagaaacaactcaggaagccaaacaacttctgttacaatcagccctaaatatccagggcttaataactgacagtgtccccaattttgtcttcccttctaacttaggaccaaccagagaaagccaaaaatgcccccctaaccaatcacataggatgtcccacttctagttaattccacctatggctttccatgacaacagcctccagtcaggacatgtctgagcctttccttctttttccatcaagctttccactcctctgcctgcctttgagtctctgtcaaagcccaagtgacggtggttactcccttgctatagcaagctcagataagtagcctttgcttgttctcatttggttggactttgtttatttccactggaaggaagagggcttttctgaccaatccaatgtgctaattaaaggtaccagaggaggaacaacagagtcaggatttgggggaggcctgagaagcagccagagtgccatctacctgtagggtcagggcagagggaggggattctgggttctcatgggaagcaccgaggggccccttgggtcctagcagaggactttagggctgccagtctagcactatgctgcaggaactgagcccaacagtccattcttattttactgtacccacaaaatgcttctctctgagaaaacttgggtgtattagttcgttttcacactgctctaaagaactgcccaagaccgggtaatttataaaggaaagaggtttaattgactcacagttcagcatgactggggaggcctcaggaaggaagcaaggaaccttcttcacaaggcagcaggaagaaaaagtgcccactgaagggggaaaagccccttataaaaccatcagatctcattagaactcactcactatcacaagaagagcatgggggaaaccacctccatgattcagttacctctactgggtctctcccttgacatgtaggaattatgggctttatggggattatggagattgcaattccagatgagattctgggtggggacagagccaaaccatatcagtgggacatacctagcaacaaacatctggttaaatatttgtcaaacaattaacacttgccagacctagtgctyggcacaggggacaaaccaatgaaccaaacagtaatctcacaaactttattttccctacatatggtgcctctagcactagtgagcacttaatactatttttatcttgtgaaaaatcagctagaaatggggtggctagtgtggctttgagaagtttcattcctgaaggaaggaatggattcagaaactctagtagtagctctgtcctgtgtgtgtgtatgtgtgtgtgtgtgtgtatgtgtacacatttggatgttatcttgggctaactgcttaacatctgtatacttcaatgtcttcgtacaaagcatgattaataataagtctccttctcatagatttgagtgaaataataaaagaaatgtagatggaaaatgtagatgcaatgtaggtgcaaaagatatttttatttctctcccttcctcccatcaccaactggagagcttggaaaagggcaatacctgtgagcatttccagggtggccaactcttcttagatttaagagtgtgacatttgcaattctgggatcctatttccagtccagttcaggtctctctacctccatgawggtttctctccttcttggcttctttctttgctgggttcctatgtctcttcacctcaatacaggtaggaaggagggtgatgtgattgagatggtatcactggactggtctggttggctggatgggatctgctccctctctcgttcccgtaagtcttcctctacagctttgcgaggagtttgtggaaggagacatggtttcctgaagaggagggccatacctgggttgaggatggagaggtccatgcagtcctccactggaatcacaaggcagtctctcacctgaagtgctgcaagagcctctggctggtctctctgaagccactctgactcttattttccccagagttgccagagtagtattttgaaaatgtaatatttttcatatcacacccctgcttcaatgacttcttactgttgttgtcagataaagccatcagggcatccccagattgaatctgatgttaccttaatatctaaaaattgtggttctaaaagatagaaagaatacgataaaaattgaggatgaatggaaacagtaactagatttgttaacttcaatcaagtggagaagccacctgggtgggaggtagagactaaactgacatgcaaattagtcaatgctgtgactttgatcttagctacaaaaaggactacaaaatgcgatttggcttggcagtcagagtgggaagaagaattgcccttggatgtgtgtagctgcagctagtatcacacccagagatgaagtctgattattaagcagtttcagcatgccaagaaactctaaatattcccttggaaaagcatgctcaaagttgtttgaggcattataatttttcgctttgtgtaagcccctttaactccagggagattttagaattcagtatagatataaagaaaataaaaacataatagttttgacrtaatttgtgtacatttgttatgctaattacctgtagagtataagaataccttacatattattgtgtcaataagttaaccttgtgatttcagcttagaaatacaaaaatcagtacaattaatttaaatttgcatttctttgaaagcatactaagtttatacacattactgggacatttgagagactacaagaatcattatatttgtaatatatttattataattacttaagcatatactyaggaaagttcaaacagttgtaaaattggaaataaaatcaaaaatttatacatgcagtgtaaagtgcttcaaggaaataaattaattgagtttttaaatggggtcaaatatcaatcagcctccttgcttattaaaatgtgttaatatttgaaattgaagaataaagtttcttaaaagcttacagtagagctaagtttatgacttgcaactttaataaatacaatatttatttaaaaatggagtaaactctgaattttaattttggttcaccaaaaacctttcatttcctagctccgagaaaaaatctaaatttcttagcaatgccttcaaggtcctccatagtctggatgtggtttgcatgtcaatctgcttctcatgtccctgctcctccctataaatacactccaggcagacagctccatttattaatttacttttcaaacacaacaaatccctccctaccttttggcctttgcacttgtttttccctctgtgtgaagagacttcccttgggcacagaacgggtatttttttgtcctcctgccaagctcaactgagctatctttcccaaggtaaagtcacagcaaggtcatcttgcttaccctatttgagctggtcactatattctggattctaccaccctatttatttctttcagatgaatcatctccatgtttaatgatttaaaacacttacattatttatttgcttttagcattctcccccagtagaacgtactcatcatgagggcagggagtttgtctcatttggcaaacaaatcattggcaattagtaggtgccaaacaaatatttattcaacaaataattaaattgtatatttatacttaaagcaaagatgggatcacactattctctctctttagtaacttccttttctcagctaacattactgaataatttttccaaattatatatacataataattactaaagactataacactctattatatggatgcattatagatggcagaatgatgagcagaagttttaaattttaatgaagtctaatttattatgaagtaatggatagagaaatagagaaaatagtatctttaaactaatagaaactcaaggaagaagaaataagtaccttaaaatcagttattaaaagaatcagaaaaaagatgttagaatattctttttccaaaaggatgttagaagaatttatcttaatgtaacagaaacagttaactktaaggaaaaagaaacaaaacaaaacaggctgagactgaaaaacaataggagaatctgaaagtggaaatgagtgagaagaaggagttttaataaattaaacctttaatattagattaaaattcaaatggacataaaatggcattgtggaaaataaacttgagaaactcttaaggaaaagaacaaagctgagaaaacagtgacatgaaaaagtgtagagagagacatccaacataaaaattatagttgtaaattagaataaatgtaaccaaagcccccatataaaagagaagaatgaagagttgattatgcttcttaaacattctcattcttaaaccaaagagaaatacatacttagggaaatgctggttaaaattttgaaatgggctgataaaaaaaattacccaagatttcaacaaaaaatattctgcttccgcagattctgaagaccaaaacacaatggggaaaaatctgagtatggagggaaaacttggtttggtcaaagaatttgatgcatagagatgtccttcatgggaaaggcaacagaaagatattattaagaatgcaagttttcagaatataaattaagaaccagagaatgtgaatatcatatattcctgagttgtaagtgaaaatgttaaatcaggaattctttctattatttgttggctggttgactcaggaggccattgatgaaattaaaaacttctcttcctttgtctttaactcttttttctgtttttttctatatcagaaaacatgttactaaatgcacgtatttcaatgcactgttctaattaacttcttgacatatctaataataacataaaattactgtacttttcagtttccagcatttgctaaggatgcaacaactaagaatacagcagaacatagtgcaagaataattgttraacaaaaagccttttttttttttttttttttgctttcacaaaagcagaattgcatagtgctccacaatggccattcagttgccaaggaatttaaccatttttgatatcttatagtaaatggattgagttacttataaaatcatcaaatagcagatatttttgcttacagaatgcttgtccaaataatactccattctggatctgtacatattactcagttaactatcattaaaagaatatctgtatatctatacctctctatatatttcatcagctataatatctgtaaaaaaggcattgaaaaaataactttggccgggcacggtggctcacgcctgcaatcccagcactttgggaggctgaggtgggcagatcacgaggtcaggaaatcgagaccatcctggccaacatggtgaaactccgtgtctactaaaaatacaaaaactagctgggcgtgatgatgcgttcctgtagttccagttactcaggaggctgaggcaggagaatcacttgaacctgggagtcagaggttgcagtgagctgagatcacatcactgcactccagcctggccacagagcgagactccatctcaaagaaaaaaaaaaattaacttaatggaaattcactatacaattactatcttggcagacatagatgtaaamaatttaaaaatttttgtacatcattttggcagttttcctcttcacttttgtaatacatattttgtgtcatcttgatcatttccatcagcatataagcatggtgttggagatcttctcatcttacaaaacttgtcttgaccttatttcctgcagagctgtcatcccatctctgctttcttctcaagaccttgggagacttgcctatatacttgcagtctccaatttctctccccagttctgttttaaatcaacacaaatcaggttttgcttcactgaaacatttcttgtcaaggtctccagtgacctccatgttgctaaatccactggtcatttcttgttcttcattctattgactcccagcagtgtctgacccattggctcaccctctttcctcatatacttccaggataccatccttcctggcttcctcccacagcaccgccctttcctgaatcctcctcttttcctcagctttttacagctgcagggctcggtcctaaatcctcttctcttttctattagtattcactcctttggtgatttcatccactcttaatgttttaaatgatattgaactagcttcccagtactacagtagcaaactaccacaaatttggtgatttaaaaccacagaaattattctctctcagttctggagggtagaagtctaaatttggcaggcttggatatagcgattctctgaggggaaatattctcaggtaatgaccagaaagaaataaaatctccatttgagggcaactataaactcggactgtaagggtctccagaaaagtaaatgcagttcaagagcaaaaattggctcccatttctccccttggatctgcaggagcggaggagcctggagtgtgaggtcagcagggctggaggggcgctttctgtggagcttggaatgtgagcaggacaggagggcgggggctgtggagactttgccttcacttgcctgctctccccagcttctcattctctcagagcctccagtcaatactgatacaatcccttggttctttcattatggctactgtcttagtctgtttgttgttgctataacagaatacccgagactgggtaatttataaagaacagagatttatttcttacagttctggagcctgggaagtccaaggccgaggggctggcatctggtgagggccttcttaaagcgtcatctcatggtggaaggtagaagggtaagaaagtgcaagagaccaatggggcagaactcacttgtatgacaaaaccactctytcaataatggcattaattcattcatgacagtagagccctcgtgactgaatcgcttcttaaagttcccacctctcaacaccattgcattggggattcaatttctaacacatggcaggccacggtggctcatgcctgtaattccagcactttgggagactgaggccagatgattgctggaaaccaggagtttgagaccagcctgggaaacagtgggattccatctctaaaataaataaagaaagaaaggaagaaagaaaaaaagtttcctacacatgagccttgggagacacatgcagaccatagcaggtactgtttaaaaccttttcatctgcatgattttcttgagtctcataattgctttatcttgtggttggtaagactgaagatttcgacaacatttttcccgatggaaaatctgatctttggaaaggttaagacttccacagtgccatgataacagatgagtggggcctcaagttctgaacaaaagatgctgctcctctctgtcttaggatgcttctttattttatgttgagtctgaatgtcttcggtcctatttccatgttagaattgagttctttgtgaattttcaaaaagtcagagttgggaaaattttctttttctccctttgcctgccaatattttgagttggcaatccatccataacacattttaccctttatgagcagaagctgctttatttcctgcttaaatcaaaaagggatcttaccacaagggcctgcaataagcacattgtaaataaacagttgtaaaagatgcattgagttgagaacagtgggaaattgatctgactgtattttatgaattgtgttaagattttcagcatggataatataaatgatttacaatttcttacacattggtatagaataagtcatagaagcaagttatttacttggattttccaaaaagtgatatttcatccccttcaggtcaaagaaactagggacttacgattaaatcttctagtagttacagcatagactttggagtgagactgaaccgaacttgaagttcagctatactatgaggaaaaaactatgactctcaaacattttacctaatcatcagtttctccatctgtatcatggggataatatcaatacttgttaggatttaaagggagaattttggtgcagttaacggtcttggagccatggactaaggatgttgatttttcaccctgcttgggttcttctcatgcctacatgttcctaagaggtttgtgacacccggagcaatggcagactgggctcccctcgtaattagtgactataaatgtaattcctttttttattttttaaacrgagtctcactctggctcactgcaacctctgcctcctggttcaagctattctcccacctcagcctcccaagtagctgggactacaggtgtgcgccaccatgcccagctaatttttgtatttttagtagagacagggtttcaccatgttggccaggctggtcttaaactcctgacctcaagtgatccacctgccttggcctcccaaagtgctgggattacatgtatgagccaccacatccgccctgtatatgtaatcctgacagttcaacaaagagctctggtaaaaagctgaattggcacgtgcaatgctttaggctgaagagtgtcgtcttaaacagccccagaatctacgttctgggatctgcatacacacatctacatgtgcatgtgagaaaagagaccctggactttggtttagcctgttatgttcatgttatgaagcagtggaagtctaagaaagagaaaaaggcacagggccattagtgaaatgtgtccccgtgaatatcctaggctctgagtgatcacactggaaatccttccttccttggggtggcrggcaagaggaaaaagggtatggtcagatgtgcgcatcacatgaagagggccaaagcagctactgccacaagagttgtagtgaaaaatgaatgagagaatgcattaaagcccctggcatgagctgcctattggaatttataaggggagtgatagatatcccccaaaattcccaccaaagaatttcttttaaaccccgttccatttttttgggtcttttccaccactttgttgctctctgtctctctatgtacgtgtatgtttggacctcactgaaattttcctaaattgaatctgttttttcgtatttgagtgaagccaaataaattcccaactgcacamtaaaggtgaaggccaacctcttagcttctaggtctctgttcacacatcagttgagaactcattgaatacatttcaaagaagaattttatttggttactcaattatttttctagcaggtggtattttcctagaagaccatgtactctactgttcaaattactgaaatctgtaagttagacattgtcagctcatgaaatgcgctcaaactaatggaaaaatccacttgttgagcactgctctcttattctgtaattttcagtagctttgaggacattgttggaagtggtggagtgaagcttggcacctttccccattgtacagcttgtagcccatttcaatgccgtttaatgcagtagttctctagggggatttttaggtaatgattaggaagaaagaaaatcccttttgagggcaactataacctctgatttcattttataaacaatttttaagatagtcatggagtgataaaagtattatactttttactttgtgtttactatggtgtagtctatgaaacgatccaaagcaaatatttacttttcacactgcttaggatatagttccacaatgttcatgggaaagagagtaactatgtgagtctatgtgagtttactgcattgctttccttcttttctttctttgttttctccttgcactaggctatagcacgggtagatgtttagcttcaagtttaagtgagttactttttgtgtcagacacatatatcaatgcactaattagaggaaattctgccaaaaataaaaaaggcctagcatagtttccctgtataggggattatatgtggggtgatttacagggagtcttcaaagcatcataagtctagtgcattccaccccttgattgccatgcacaggggcccctgttcctatttattcagttgtaaggatgcctcattcaaacacattctatcatacatctagccgtataacaccaccctttccccagtttattctgccctcaggtagaggtgctgttacrggattattttaaaggctttttgttttccttaagagtctagatctccaggttatctccacgtatatctgtcttctaaatcaattccattcttatgtgtattagtttactattgctgctgtaataaattacaaaaaaatttagaggtttaaagcaacacaaatgtattgttttacagctctggaggtctgaagtctgaaatgagtcttacaggctgaagtcaaggtgtcagcagagctgtgttctttctggaagctccaggcaagagtccatttcctggccttttccagctgctagaggctgcctgcattccttggcttatggccccatcactcctatctctatgtccattgttacaggttcttctctgactctgatcctcctaccttcctcttatgaggacccttgtaattacattgggccttctggggtaatccaggataatctcccacctgaagatttttaacttaatcacatcttcaaagtcccttttaccatgtaaactagcatattcacaggttctaaggattagaatgtgaacatctttagggaacgaactatcatttggcctrtcatactatgtaacttcttgatattatccaactaattgacaacatgagaaatatatccatctccagaaaacctcttatagacagcagggaagaaattaagtaatacactaaaaacaactaccatattaagaaaatactgttggtatgcactagccctgttttccctgagttctttgtgtagcagatgatcctgatcatcattcctgagtggactacatcctggtagttctgtttgcgtagggttgtagaggtttattgttaacctttgccactgtgcacagttgtatcagaaaatatcctgaaagtagtgaatggttggtacaagctaagttccatccttactgttcctggctcccaaaaccttagtaactagggtcaactagggtcaaaatcttagtaaccaggcaatctgaaaagcaccatttccacttctagcctcagtccaatgggcttttagcttacatgttagttaccttgtctataggatrgtattgttttataatccctatttacttttatctttggtgcttttaagwttttctatttgtctttggttttttactttcactctaatgtgtctagatgtggattttttaaaaaaaattctgtttgaactttgttaggacttatattttggggttggtgcctttcatcagttctgattctcagctgttgtttcttccaataggtccatgttgattctctctctctcttccatctgggattccaataaaatgttactagacattcttagtaaatattccatatctcttactctcttttctgaattatctatttttaagtctctttgtgctgcattctgcataatttattttgctctatcatccaattcattaactctttcttctattatgtccagtctgatgctacataaatctatttatttttaactatgtgtttttattttggctattgtttttttcatttctacaacttctatttggtcctttttaagacttttatgtgacttatttctgtttgtaatccctgaagatattttcaaacctatgattcatttaatagttatttttcaatctatgtttgatcatttcaatacttgaagtttgtgagaatctgttaccatttattttctctgctaattcttatttatgtttccttgtgtgcctggttatttttgactgtattatggtcattttccttgaaaagataattttggggattccccaagggctaggaacaaaatgtcctcctccaaagagctttttgctttgagaccaggtgtctgaagcagctaccaactttagttgaggcctctcctcaaactaagttcatagtctgaggttctctggcttgtccaggtaaaaccacagaaagactagttatgaggtcaccatttctcaagaagatttttttttcctccttatttttcttctcctgtcgtgctcagtgccaaggcagaattctctgcagtctcctggggcacagtaggggcaggtttaatcttggttcattactactctgagaacataaccctcttggagtttcagcttaatgtggggagggtatcctgtaagactcctcaccttgggaaaactatgggctttgacttttcctcttcttactccttctgagtctttagaattgagaaccaagtgggtggtattgactgatgtcctcaggacaagagttgctttcacactccaggattcagcgcatgttggattcagactttcttccagattttggcctgataattggtgtatttggtgtttttatcttttatccagattatttttttattaggggaatttgtccaaataactcagcctgcaattacttgaaacatgtcttagtcatggttgctttgttgttgcacttaatgacactatttatttctggaagattgggagtaaagtcagcagatctcatatgtatctgttgatagctttgtttctttagcttccaggtaaattccttggccagaaccagtgttgcatagaataccatgtgatatacaaagcctcataagccttcagataatgatgccatggcagagaaggtaagaaaggaaaatccaaatagctctcctctccatggcaggaaaacctctatttgtttaacctgccacaaagacttgtccccttgaggtgtcttgtccccttgggtcttatcctagggctgggtaggtcaccattgctggaatacaggaacttgcagtggttgtagccacattaatctttgagaggagactctttattatcaagatcatgtagagtccgctgtgccaacatagctgcttcattcatgagtccattggacaggaactgactgactgcagaaggcaaatggttaacatttgcaaattggttcatcctggtaaatgatggcagtctccctacagtggactaatgggagaatgttaggttagcctctcccacaggtttctcaaagatttcttaagtccttttatttagtctgctggcccaaggagggtgagagatgtgtggagcagagccacccagccaatcgcagcttggatcagcagactcccagctgatagggagatgtatgagtgataccaattgactgttgttttaaaccactgagttttacaaaaatagcaaacacaaaaattcatcagactcttagtgggcattatttctattttattctcacaaacctcatgtgcttgagtgggacctcttcaatcatcacagggattcccgtctcacctgactgcctccatgtatgcatgaatgcatgtatatatgtaggtatttactttaggctgaagccttctattatttctcctttgctttttacaaattgtatatacttaaggtgcacaacatgatgttttgataggcatatacwtagtaaagtggttacaaccgtcaagcaaattaacatccactatctcacatagtaacctattttttttttgcgtggcaagaggacctataatctactcttttaacaaaaatctccaatacaatgcaatgcaatattattaactgtagtcctcatgttgtacctatgatatctagacttgctcatcctacatacctgcaattttgtatcctttgacctacatcttcctatttcctctccctccaccaccctgataaccattttattttctacttctgtgtgttcaactttttttcatgctttttctttttattagattccacataaaagtgagatcatacagtatttttatttctgtgtttggcttatttcactcagaataatgttctccttcatccatgttgtggcaaacggcaggatctccttccttttttaaggctgaataatattccattgtacatacagttgcattgtttaacagcagggatatgttctgagaaatcactgttacgtgattttgtcattgtgcaaacatcatagtgtgtacttacacaatcctagatggcatagcctactgtacacctaggctatatggtataacctattgtcgctaggctacaaacctgcacagcatgttactgtactgattgtaggcaactgtaacacaagggaaagtattgtgtatataaatatgaaaaagatatagtgaaagtacagtataaaagataaaaaatggtagacctgtwtagagcacttaccatgagtgaagcttgcaggactggaagttgctctgggtgagtcagtgggtgaacggtgagtgaatgtgaagtcctggacattcacattctctgtataaacactgtacaaggagggcacactaaatttatttttaaaaattgggccaggtgtggtggctcacacctgtaatctcagcaatttgggaagctgaggtgggcagatcatgaggtcaggagttcgagaccagcctggccaacatggtgaaacaacgtctctactaaaaatacaaaaattagctgggcatggtggcgggcacctgtaatcccagctactcaggaggcttaggcaggagaatcacttgaacccgggaagtggaggttgtagtgagctgagattgtactattgcactccagcttgggcgacagagtgagactccgtcttggaaaaaaaaaattatttattcagtaataaattaactttagcttactttaacttttttaccttataaacttttaaattttttaaacatttgattcttgcggtaacagcttaaaacacaaacatactgtaaagctatacaaaaatattattttcatatccttattctataagctttttaaaatttttactttttaacctttttttgttaaaaacaaagatacaaacatgcatattagtttcctatatagggtcggaattatcaatatcactgtctttcaccttcatatctttgtcccaccagaagtttctggggcaataacacctatagagctgtcatctcatgataacactgttccttctggaataatacctgctgaaggacctgcctgagtcagctttacaactaacttaaaaaagtaagcagaagaagtacactctaaaagggatagcattgtaaatayataaaccagtaacagttgtccattatcaagcattatgtactgttcatatttgtatgcgctcaacttttatgcaactggcagttcagtaagtttcctacaccagcagcactacaaacatatgagtaatgcatgtgctacaatgttatgacaactacaacatcactaggtgacaggaatttttcagctccattataatgttatggaccaccattttatatgtggtccttcattgactgcaaagtcattatgcagcacatgactgtatatatatatatatatatatatctatatatatatatctcacagtttctttatccattcatccatcagtggacagtggcctgttttcatacctggctrtagtgaataatgctgcaatgaatgggagtgcaaatctcttcacaaggtagcattctttgcttttaattactgtctcttgggatcagtcagctccagtaacaactatctccattgctgctaataatctcgttttggttactctctgctatttttatattccaagtcatgtccagagagtatctgttatccatagtctcttaatggaaaaggtagggctggttggcgttccttcctttcagtatttgctttctgtcttctgcaggcatcaaaggaatcaacatcagtcatcatcatccagggtttgattcaacctccagtcactaaatgtgcatcttaagtaagctgtcttcattgcaatgaatttgagttggtctgaagttatattttgtcctccttccataagctcctgtaaatttcttagcaacatatcctctccctagtcttcaacagtcttcctggcacaatacttataacttctgagtagaatttctccatcctatctcttcacatattcctaagccatatgactcttgggcagactgacacacttactgttcctaccctcttgggcagactgacacacttgctgatttacgggaaatgtctagagcattccatagtttggggttcttccattgtgacttctcagatcaaactttttgccagttagaatattaatgttaaccaaaaccctgaacatctgtgaatccaaaagactgcgataatcagcagtgcttgtccttagcctgtggctctggtttgcctccttggatgtctaactgagcagaaagttttccctacagcggaaccacacaatggccagccctgtctccttatgtgcttccctctgggcaacttggaaccagctgtcttcttcatagtgtaaacagcctgatgctatgagaaactctcttctacccttacttgtgcttcttattccttttgagttgccctttacctcaaaggatccgaagcaacagctattatttgctttgcatggcaaggcatggactgtttgcttttagtgttgcagtggggaggatctctacctcacaaccctcatctacttcagatgataatgctcattttggaggagttgttgttcagagtctgcaccttagcagtcttctctgtcttagggaattgaaaatgatactcacagactgcttcactaatggttgtttgttttgaggatgcaagtgggctcaggttagaacatgaaactcatcaggacatcaggaactgtaaccctctcggtcccctgctggtctccttatctttctcatggtccacgtgatctctctttctggtggagtctctgttttgttctgtgagtctactctgtttccatttgtcaccaactagccaatcctctccttaacctctaatgaaatatcttgaggaaaccagtcagttgacttgattaattaccattgtcctagttccttttacacaaggcctccgctttggtatctgggtgccgtgggtcagagactcacacctgtcctaggcagtttaacctagaatgggaacagaagtatggtggccatcacaagggacatgctatatagccttatttcccaacatgttcccagggtcacatattccctaaatgaagtctatggattaagcatattttccacattggtgtgcatcatgaacgattccttcggagcctgtccactagcctggtgctcagtagggccattggtctccaggcctgtcaggcactgtgaccacctttcctgggtactaaaggctatcccgtctggtagagcaccactttccctgactcgatctggccattgattcccacactctcactcttctgagctagagctcatgacaataccaatgaacctatgagatttttcttgcttccctttattacctgaggatgagaggcaaatctaacatcaggacaggttttatggattatcaaagtaggaagttcattcatttatttttactcagtacatatttaaagaacactttgaaaggcattggggctcacagcagtgaatgaaacagccataatctagtagcaaataaaaatgtcaattaaaagggcaatgagtggtataaagtgaaaatataagtactcatcagagagagagagagagggagggagagagagacagtgcctttgacaggtgttgctcgttcattcactcatttgtgcatttatcaaaacatattaattgaacacctactatgtgctaggcactgatctgcttactagagcatagcaatgaagaaaacaaaatctataccctacaggtttttattaaaacaagaaaaccaataacatgtgaaggtgttttcagtgggataagccatataggaaagcagggtaaggggtaagaaagtgatggaaaaagaggcattacttttgatacagtggccatggcaggcttctctgaagagatgacaattgatctaagccctggtggaagcaagggagggtactctgtgaatacatggtgggaagcattccagaaagagggattaacaagtacaaaatcctgagtcaggagtgcgcttggcacgtttgaggaatagcaaggggtccggcaaggagtcaggcacagagaagaaggggcgaagaggcaaagagaataactggagacacagcctgggaccagagcatgtggggcctcccacaccatggaaaagaccttggattttattctagtgaggtggctttgtgcagaggagtgacatgatctgatgtacatcgtgaaagagtcaacattggcaaccttgtgcagaacagattatagttttgaatgaattactgctgtttttggaagaaattatatgtaagcctatgtatttataggctttcaaatactactcatgatctaggaactgcaaaataggcttagttccatttttctcttaaccagaaatgttatagattgctatgccaaggtggaggcagatttattggcataaagtaactaaaccatgacacttccactaggaagaccaaatagcatctttataatggctgggactttatagatacaaaagtacaaaatgatattacccccttgtgagggttaatactgagtgtcaacttgattggattgaaggatgcaaaatattcatcctaggtgtgtctgtgagggtgttgccaaaggagattaacatttgagtcagtgggctgggaaaggcagacccacccttaatttgggtgggcaccatctaatcagctgccagcatggctagaatataaagcaggcagaaaaccgtgaaaagagtagactggcctagcctcccagcctacatctttctcccgtgctggatgcttcctgccctcgaacatcagactccaagttcttcacctttgggagttggactggctgccctgctcctcagcttgcagacagcctattgtgggaccttgtgatcatgtgagttaatgccccttattaaactcccatatacatatatgtatacatatgtatagatatatctatctatctacatatatatccatggatacatatatatacatatctatatccatatatatgtatatcctattagttctgtccctctagagaaccctgactaatacatccccttaataatatctcaaaccctgttcatattccatctgtgaatgctttattgcttctcttgcttttgagggcattatacgcaagtcaagttcagccctccttattcctcacagccatagtccacctggcagtttgtgaaaaaatgataacaatgaacccaggagaaaggaagacttctgcagcatctgcccaaactggatatactctagttcaacataaaaaatggctaagttcagggttgaaggtctagactgggtcttgaccacgtgctgggagaattagcaaagtgataggagctttttgttgagtaatcaagcactttgtcaaaacagaagtgctttatgaaaagcaagctatgttttttctcccctccagctatgcttttttaagaagggctgtcaaatggcattttgggcagaaacagttaattttcctttaagtaacatacaaaaggaagagtctcactgcccccagcatgggggcaatttaataaaatcacaagcagcaaagccacaaacaactaggatctatgatctataatcaattgttgttgatttaacaacttgtgcattttctttgagtttgggtttagcctggaggcatggcttagttttattaatgattttcaagcatgagctggattgcaattttgtagagtttttgaaggggcaattgtaaatatgaaaagaatgattgaatgagataacctctaaggtccatttcaaccccgaggttcaatgattacaggagagaatcttgaattttaagtgcagaggctttgagctttgctttctgtaatttaatctggtgattcaaaattgatctgtaggacctttttagggtttctatatgagtttgaggaaagcaattttcctcttgggaaaagaatgtttcagcccttgaatgtccaactaaaccttcatttaatgatagaaaaaaatgtgtttgaaaagaatgtttcagcccttgaatgtccaactaaaccttcatttaatgatagaaaaaaatgtgtttgagaaaaaaattccatgacagcagctgtctaaaagaactgtgaggataaagatgttctatatgcatgctgttatattcagtagttgctagatacacaggagtgcttagcatttgaaatgtggctggtttgacaggaatttaattttaatttttatataattttaattaattaaaatttaaatttacacaaccatttgtggctggtggctaatctttcagacagtacagttccaagataacttgaattgttcagtattagataatacagaaggattgaaaatgtaaacatttctaatttaccctaagtcaaataagcatagtaatttatccacattttatctccaatcctggtatgtatagatgcatgtacaaaagcattttatatatctctagctatgtctgcctctgtatctatctacctatctatctattatttgtctatctatccatctacctattgtctacctgcctatccatctatctacctatcaatctattgcctatctacttgtatatccatctatctattctctctctctatccatctatctgtccatctatgtattgaatgttttcaatagtacattttgcaacgtgtagggggaggggaaatgcaaactattgtaggacagaaaaaatatgatgaaaattacttgtgtgaatttcaaagatagaattatcatgatttcttccaaaaagaggaattttaaaaaagcgaacgtaagaaaagtgtgagcaaccaccttgtttagtttttgacacctcattagggcaaattagcttccatagtgcttcagcatgcatttggaaaattgaaatcatatgctctctagaagcaattatgctttctcaaattcgtgatttcaaaataatgatttctaggtccttcaatctttgctaacactgtgctttgcaatatatagacaaaggtaagaaaacaatgtttgggataactgagtcctgggttcacttttcataactctgatgcttttctttttttgtaatgacattgaattgagggaagagagcttttaaagacagagtagtaggaaaggattgacgggtagactgcagtttggtaacagcttgtaagaggctatggtattagcttagtgggcatacagtagaaataagattattaaaaaaatttcatagagtaaaagtttaatttcttcttttatcgccaccgaacatgccattatacaaggaatcttaattataaactgaaatcattgcaactccaggatgtctctcctccagtggattctcctcataggctgatataattcttctactttgaattttaagtggctcctctttgcttgcaaaatcaagacactttccaaaaacatctgcttctcagtttccagtgaagtatacccaatagtagagacatgaacttgaaccctggaaaatctggggagtggcttgaagctgacagcagcaagtgggacactctttagaagtcttgtgtttaatcttaaaaattcacatgattgtcacattcaatgtgtatttctctgtattaaatctgtatttctctgattatacaaatatttaaaaacactatcaggaaaaaacagacattgacaaaaaattttcctgcctaaattcctgtttcattgagtggttggttggtgtataaaatattgtactgaatttatcaatgttagaaaattgtgctgaattcaagagcaacgtaacgatgcattatta

SEQ ID NO: 93445 - DNA, 12516 bp, Homo sapiens
attttatcccatttttatttctcttggacttaaatgggcaaaacagttgattttgaaagtcccactatatcatactaagcacataatgttttaccaactctctatacatcagctgtgctcaaagtcaacaccttaacctcagaaagagctgtgcattcctatggcttaccattattaagttagaaatggcatttgcttcaagataccttgatctcaaacaagaggcaaaccagctggtaagtgacctctgggcacagtcggtgttctaagctgatcattctaagacccattagatctttagagatcactcttgacctccttagatcacagtttttatatttataccttcaacaaatttatttagcacaaatttgttgagtacctaccatgttctgtatgctatattatcctagcaaactgtgagagattcaggttgttgcatccatcatatgaggctaaaactaatttctcagtatagaaattaaatgatgaaataaatgtaaaatatttacctcagtgcttgacacaaaaatcaggactcatatcatttctttcatttctggcagtacaaagataaactggtacacttctctttcctcaggaaactcagtgtaaatgttgcctgaaataaccccagtgtctcagaagcactatgaaatggagacaaactacagatagctgatatttcatgatctctgcaagcaacaactcccaattcaggtctaattctcagcattctgggcagagaacaccatgagatctttctcctgcatgtgttctaaaccctaattctattaccctcaataggtgttaagttaaaaaaaaagctgtgaaatatttcaaatttaagtataattgattaatgagaacaccataaaggtgctgtcaaataataataaatattaataaaaactctggccaaagacactctataattcatatgaagtgttctttattattactttttaaagaaagagcaatgtttcctggcatttgtgggtggtgtgttcactagaggcagttactrtaacagacaggccattgaacctgatcaactcctcactgacagagcaggttcctcacagtagttgcttatgccaaaaaaaaaaaattgttgccatcaactggtcatttctggttttgaatgaaatttcaatctttacttctaagaaattggctttgtcaaaaacaaccaccattgcgttctttctctttttgtttcagattgtttcttaaataaggcctggtgtgctaaattacttagaagagtgaggtcttatgggaaagtttggatagtagctactagaggtgtcagtcattccaactgggttagggagccagggtgccaagggggatgatggtgagaacaacagctttggccggtaggtaggatatcccccgtttgtctatcactgtgcccaaggcaaaatctgagtttcctaatgagcacattacatactttctgatttggggcttgtcatctttcatcacaacaaatgcttgttggattaaaaaaataaaacaatgacttagtctgcgaacatctcagaagacctcaagtagctttcagatcaatgattaccagatgtcctcaacctcagaagaatagattaagttattaacatattcatgaagcaacattcttacctgttatgaatatattagttatgcttccttttagtctttcaacaactccttctggcctggggttttctattcctgctgtcttctctcacttaggagccattcttttgcccacctaccttcctctctcttgatccctctctgtggaaactttaacctctttgctggtatctctggcatctctatacctgaaggcagaatgtacctttagtatagagtccataaaaatattgttatacctttatgaggaaaatatggaaaaggggaaatcaagtaatatttatcttgagacaacatacataaattttgaattactttttatactcagctaagccactcacagatttctgaccctcagaaactgtgagataataaagatttgtggttttaagctataatttttcattattcagcaacagataactattatctggtgagacagattaacataggggttgggaaactaaagctctaaggcaagaaactatttttgtaaatgttttattggaacacaatcataatcattcatttacatattgtttgtgactgctttcatactacaacaataatatgaagtagttgtgacagaaattgtaaggtctgcaaagcctaaattatttactattagttcttgattaagaaagtatataattatagaagaaatgtgatttgaaatgtctagactattaatttgaaaaaggaaactcagaaatcaattttccttttttgcagattaaataactgtgactttaagaagtaggtggcctaaatagcatcaatataactaatagcaaagctggacaagaaatccaaattctctatggtctaaatgtttgtgtctctcccctgtctccgaaaaaaaaatgtatatattgaaatcctaatgcccaaggtgatggtcattaggaggtggggactttggaaggtgattagatcatgaatgaaattagtgctttaataaaagatgcccaagagagacccctcacaccattccaccatgtgagaacatggcaagaaggtgccatctgtgagccagaaagctgatgctcaccaggcactgaatttgctagtgccttggtcttggacttcccagcctctagaactatgacaaataaatgtctgtggcttataagccacctatattatgatagcttgtcatagcagcctaaatggactcagacatctacctcccaatccagtggtttcttcaatacaccatactcccttccctaagataaggcaccaaaatcaatgaattgttttattatgagtttactgagttactttaagtcactactggtccctttactcaatttcctgcagtagtattgtagtatcatgaatgtgttacttgatgaccatattacttgatatatttaagttcattcaaaagtatatgaaaaagaaaaatggcagattacagaaagacccatagaaaaggtcacctagcactaagaacagttattcaatttaattttattatttttactcttgttcagagatttaataattgaaagtggtaagctgaacagtgtatacttattttcaaaaattacctgctgaattatatataaatgcttttataagagaaagcaaatgagcagcaccaattcaacttcctgtatccatagtagacattgttaatcaaacacagcattctttcccactgaatcaggttacagtctcagaatccttctcaataccatgcttcaggaatctaacgtcattcagtcaaaattggcacctgagttaaaacttatgcactttctctgacatacagaacaccttgccatatagtagtcttcttagagcttgtgtagatataagttgctttcagatctctttttaaaattgattggctactgatttactgaaacaatttaacttcaatctgtttaactctaaggcagctccaaggcacacatgtgaaagatggtactaatgggatattgtatttgagaaaggatttgtaattctggtttaaatttactgcaagtttcagtttaaatgcaacttcctccatgagccatacccgtatgaagtatgtcctggtttacctgggtgataccagtttgtttctcaattattagtagccatacccccttcgactctcagtggtgtcccaatctggatgaaaaactatatggctatcctattgatgacccaatttggaagaggcctctcttgtctctaaaactcctataatacttaatggttcaaatgtgacaaatgatttatctagtataatagctacttctagttataatttatgcccccacagcccacttcccagtctggattacaaacactttgagggaagttgtattttactattcgtggtttctaaaacagagatgcaatgaatacaaatcccattactcttttaatcctagtgcctcacacatactaaactcgaagagagaatttgttgaattacttgagactgtaaattcttttacagttaaaactatacctcatttatctggtaaacctcacagaggcacagggccttggacatcatctatgtttacaaaattgtttgaatgaatgaacaaatgagcgaatgcacacagtacaatttttctcatgttgtctttcacaacactacagagaaataaactggcaaaagctcattaattaaaatatcaactaatatggagcaaacaagactagcatcttttcttatttctcagttcatttgagtggttgactgaaatacaattaagtctttttctctgagtattttggtatggtaactaagaagcattgggtcaatggtggcccatctctgaaaataagacatagatctgatgacccctgaaggcttaggtggcacatctgggaaaactgttttgacaaaatgggactcagaatatgaactacacatggaggtcataaaattcaatctatagtggccaagttcaaggtttagcttaatataaaaatctgcaacattccaaagtggaaaaactaaggctaagagaccacactaatcagtacttactggggtcagaaacatcctgggaattgtctttcatgatgcaacttaactacatttctcaaattccagctttcacacttagtatgtcatctagctgctccaaacatcactctcacagctccaaaaccactagttacaggcctcaaccttcctttactgagcacagtttcagtcagcttagattttcagacaagtcatttcaaccaataagatgtcctgattccctaagaaggagcaccttttcaatttcccatggagtttacttggacttggaaccttctccatgcaccacagtttactcaaaaatggacctaatccagcaatcccactactgggtacctaccccaaaaaagacaagtcattatatgaaaaatacacttgcacacacatgtttatagcagcacaatttgcaattgcaaaaatatggaaccagcctaaatgttcatmagccaatgagtggataaagaaaatgtgatatatatatatatatatgcgccatggaataccactcagccatataaaagaatgaaataatggcattcacagcaacctaggtggagttagagatcattattctaagtgaagtaactcaggaatgaaaaactaagtatcatagctaagctatgagaacacaaaggcataagaatgatataatggaccttggggactcagggggtgagaaataaaagactacaaattgggtacagtgtacactgctcatgtgacggatgcaccaaaatctcagaaatcaccactaaagaacttgtctgctgcatcaccaccaccaccactctgccacaaccaccgccacctcctgccctgtagcgcctgccaccccctatgtcactgctgcctcaggaccagctgtatgattaggccataatcttcagagaataaatacattcctcagttctgtggtgttcttggtcacacattgagtttctgaagggcagtgaagattactgccaggcacagcacaacctctattcagacatgtgaactgtagaaattgattactactccaccaaaaagcccctataagagtggttatcctggacacaaaagtgttgaattgaaatccacagagcattttataagagttctgacctggatggggtaaacctgagtgcacttcttgtctgtttgttgcctcagtattactggattgcagaattgctgcttcttgttaggaggttcatttcatttatcattacttacaacttcacactcaaagcactgagaatttcaagtggagtatattgaagtcgacttcagtttctttgaatcatttctgtattcaattttttaattatttcataaccctattgagtattttttaactaaattaatacacctcgaatgaaccacccagctcctgtgaaagtcacatacaagaacatgagatttcctattacacacaatccaaccaatgtgaccttaaataaatttatagaggagcttaagaagtatggagctaccacaatagtaagagtatgtgaagcaacttatgacactactcttgtggagaaagaaggtatccatgttctcaattggccttttggtgatggtgcaccaccatccaaccagattgttgctgattggttacattttgtaaaaattaagttttgtgaagaacctggttgttatattgctgttaattgcattgtaggccttgggaaagctccagtacttgttgccctagcatcagttgaaggtggaatgaaacatgaagatgcagtacaattcataggacaaaagcggagtggagcttttaaaagcaagcaacttttgtatttggagaagtatcatcctaaaatgyggctgcgcttcaaagattccaatagtcatataaacaactgttgcattcaataaaactggggtgcctaatgctattggaagtggaacttgagataggacctaatttgttatacacattagccaacatgttggcttagcgagtaagtctaatgaagcttccataggagtactgacaggcagttttaccaggctgcaagctagacagatttggcaacctctgtgtttgggttacagtcaacctatttagacatttggcaaaagattcttgctgtcagtatataaaatgtgcttgtcattcataccaactgacctttcccaaaatcaggcagtactgagttaggacttgtttaaatctattcccatgccagaatcttatcgatacataagaaatttaggaagattaggtgccaaaacacccagcaccatacttgtatgtttttagcaccatacagagctaaaatctcaggaactatgaacactctagaccttatgtggtttattccttcagtcatttcaaacattgaaagtagggcttacatggtgatttgtctgctcactttatgtttacgtctcccacattcatactagtatacatcaggtttgcttagccattgatatttttttaaccaagccttacagtgattatttcatgtgtttctataaatctcactttgtgcttttattaaaaacctccaggccaggcgtggtggctgacgcctgtaatcccaacactttgggaggccgaagcgggtggatcacgaggtcaggatatcgagactaccctggctaatacagtgaaaccccgtccctactaaaaatacaaaaaagaaaaaagaaaaaaaaattagccgggcatggtggcaggcacctgtagtcccagctactcgggaggctgaggcaggagaatggcatgaacccgggaggcggagcttgcagcgagccgagatggcgccactgcactccagtctgggcgacagagcaagactccgtctcaaaaacaaaacaaaacaaaacctccattgtgaaaatcacattgtacaaaagcacatgtctttaatgtcttcagacaaaaaagtcttacagttaatttaatatttgcactctgaggtgcagcttaacagggagggcctgagaaaaaaatgggagggagctattaattatttttagcaaaatgttgcctttgtcttgtacagaacatatagaatatgctctttaatttagtaaaatatttttaaaggtagaaatgctttgttattataatcataaacttcctgaagttcttgtaattttttccatacttatcagaagttgtttaccgacttatttttgtttgaaagtgtgatttttttttccttctcttcccaatctcacttacaaaaaaagaagtgggtttctgctcatgaactgataagacatctaatattttacatgcctttcgagctgtgtaacttaatatttggatacttgataatttgttttactatgtaattgataaaatggtgatgtgcattaatgttagttcaaccatatatttatactgcctggggatgtgtggttatagtactgtgggagaaataatttgtcagtgtttaccagcttgtaaaaatgtagtgtgagagtttaaacatctaaataaataatgaaatgcaaaaaaaagagaactcgtccatgtaaccaaaaaccacctgtccccaaaaagctattgaaataaaatgaaataatggactaaatcattaaaactcatacttgaaaccctgcttagtcacaatatgaagtttctagatatctgagaaggcccttgcatgaaaactgacagggaggaaattaagaaagaaacatgatctcaaatggtttgcttagttcctggccaacttttcaggttttcatatgtaataactgtgaacatttaataggcttcaagcaaggatgacttaacaccagatcctgctacaagacagtacgtggcccaattaagttagcttcaatatctctaggaaaatgactaagttagaccctccatgtggcaatagatgggtcaatctgatctccatttgacacttagtaaaggctggtaaattaagaaacaagttccaattaaagaaaagaaagacaaagtgcctcctttcattcccctctttcccttcactatccaactgctttatctctcttgccctcccagccccgcttctgggttgggttagtagcttactcattcttcaaagcagaatactgcctgctctagaaaaaggatatggctttctcagcccactcatcattggagtttttccttatttcccaacctctcctgtggcaattgcaatgaagcatgggcatatagttctttgttctttttaagttgggacttgcaggctgctttccatgccaactgcaaaaagagatgctgtttggtcaccaagcctgcagcctctctgggggccccaccgtggacaacactgaattagcccattcaaatttcctggaggtcacattacccatttgacaggcagtgctcagctttattcttattctgaatttttcttcataccctcttcacacctgatcatgttccttatttttctccttccccagaatcatctactctattaatgattattttatgtaaaactagatgaaaaatacgatgataaacctatggccacaaaggtaagggagtctactaggaaagaaatctatgatttcaaacttctccttctgagcctcaaaagatagttttgaggctatggagagaagtggaagcatggaatgaaatgcagaaactgaggcatagactttgacatagcgtcctctgcttcttgcctaataccttgggtagctgaatacagtgcagtggggaaacaaacaagagccagttgacttctctttggattatctaatccaataatcaactggctctgtaatttgagagacgcctcctcatccataaataaaatgaaatggttgaacaagacggtccccatggtccagcagtgaagttctgtaactctgaatctgagtgggctaattatgtctttcagaatttacctggtggcacctccttagaggtttacagcagctggtttcagaattgctttttttccacaatgacttgtgaaagaaggaaatggagttagacacataagttttcttcacatttcagcatttgaagattgactggaaagaggctactgtgaacaatctccacttccctcaagtttctaccctgccaacaatcttccccctcccaagagacaactgccttcttcatcaagaagatcaaggctaccaggaaaaactttttctaatctctgcctgcatgccaacaactcataaatctgcatccaccctccactccttccttccggtctcagagaaagatgtgtcctttcttcagtttgtgtctgccactagtgcttggattctgactcccttcctccccgacctccagaaaagcgctactctcttgattcctcttctgtaaaattgtgctggaataaaattattttaacccttctagaaaacgacattgaggacataaagtggcctttttcttgcacttaggagcagaatcaaaactgattctttaagatgatactggatttttgcataaagatattgttcagaacattgttcattacactacatagcttcctctatgtgtagtccccaggagaaatttctgtccagtatgattacctatggcagttgttctcttgagaagctgtttgttttcatcttgtaaatcgagtaaacaatgtaacttacctacttccctgtttgtagtgattctgggaagctcagaactaaaatggtggccttgctccagaactctaactctaatacatgggcaatcactttgtatactgaatttgccactaccttagtcttttttttgctgtcgttgttgttttttggtttttggtttttttttgagacagggtctcgctccgtcacccaggctggagtgcagaggtagaatctcagctcactgcaacctctgcctcccagattcaggcgattctcatgcctcagccacccaagtagctaggattataggcatgcaccaccacgcccagctaagttttggatttttagcagagacggggttccaccatattggccaggctggtctcaaacgcctggtctcatgtgatctgcctacatcagcctcccaaaatgcttggattaaaggcatgagccaccacaactggccagtcttttcttatgtgtcctcattttccctttttaaattcatatttcttatattaaattcttgtattatatgaacatataaaatccaatttaagtcctacctgcaaaaaggtatgttgtaactagcacctaaacagatgaatggatacttatttcagcaaccttttatttagaaatatgtgtcaaaatatataaggatttctctaggcatggaaataaaattcagatgagttaatgaatgaatggatgaatgagtaggataaatgaaagaaagtaaagctaagaaaggcattggaataagccttagaaaaagattccttagatttgagttttattataatattggccacaataaagccttgaaataatataagccactcaaattaatctcataaagatgctctaatagctccccaagaatgctacagataggagaggttactactgcataggacatctccattacatatccttatcaaaacttgtggtggactaggctactaataaaagaaaaaaatgtgattttatcaatttgctgaccaagggtcaatgatcatacagaaaggtacaaatatgacagaattagggatgatgacttttcccattatattaaaatctatggaaaaggggtagaacaaactattgaacagaatacttacatataattacaagcatttaatgaaaatattatgtgccacatgaaattagtctgaataatcatcattttaatattggactgtgaatgccccataatgctaccttgttttcacttttaatggttaggtcattgaacaaacagcagttattattatggttattatctgatatcttcttatagatgccagatgccaattctctgtgacattatgcccccatataatatactctctctactggtctcactacccatctttcaaaaacaacctcaaatcccattccctcccagattgagtccttctagtcagaaagcactcaacatataaatgattcttagaatgattattttgatgacagtgtgcagggttaatttggggttaacatggagggagcccagaagtagaaagacaagttggttagttatcataaaaattcagacttagggggctaaagataattaaagatagcacttggctttattctactcagtactgcaattatatgcatacatgtctgtctctcccacctgaactgaggacaagagtcatactcctagtgtctgctactgtgtctaaatcgtagtagatactcaataaatgtttattataaactgaatgagtaaatgaataaataaatagaatgagatgcaaaaaaggccattgtgactctttttaaaattcttttctattggcttctcagcaaagcagaggaaagtgaaaacctatattagaaagagaagaggccattttactatcttaatcatcaccactctcccccagaccttgtatgtgcttcaggttgttgatgttcctcataaaacctgctgcccagaaatgtgcagattccagacaaaaactgaccaggactgtgtctagggggagcatctccttcagcaatctgcactctttctcctttttaacagagcccaagactgtgagatatttttaatgactacatcacactttcatttcacatgaagcttacagccacccaacatccatgattattttcccactgaatgctgcaaacataggtctccaccagcttggtttacacattttttatatcctaaactctaagttcattcctataaatcctactccccccccccacacacaactttgcagcattaattcagcaggcaattctgagtacctactcgtactgaccacaactaggagacatam

SEQ ID NO: 93446 - DNA, 97691 bp, Homo sapiens
  misc_feature (1)...(97691): n = A,T,C or G
caactcccagtctgccccatgacttaaaaggccctctgctgtctcaccctcccctccaggagctcctcctccaggtacttaggcgcccagcacccctccaaagccaagcacccactcacctccaggccttagattgcctgcccaccagcctcactctcccctgctatgataggcacaataatggccctaatcatcctactcccttcaacctgtgactatgtggcctgacatggcaaagggacccttagagttgcttaagctgaggatcttgagacggaaggtgcccctgaatgatctggtgagcccagtgtaaccacagggtccttataagaggcggcagggacaggcccggtagctcatgcctataatcccagcactttgggaggccaaggagggtggatmacttgcggtcagtagttcgaaaccaccctggccaacatggtgaaacgctgtctctgctaaaaatacaaaaattagctaggtgtggtggcgcacacctataatcccagctactcaggaggctgaggcacaagaatcacctgaacccgggaggcagaggttgcagtgagccaagattgcgccactgcactccagcctgggtgacagagtgagaccccctctcaaaaaaaaaaaaaaaagagggaggcgggagggccagagccagaggagatgtgaagactgaagcagaggttggagtgatgctgccacgagggaaggaatgcgagcagcctctagataatggaaaaggcaacagacccttcccttaggcttccagaaagacaacacctcaactttagcccctacgagactcactgtggacttctgacctccagaactgtaagataataactttgtgttgctttaagccacaaagcctgtggtcatttgtcatagcagccacaggaaactagtgtacccatccccccaagacctcagttgaaacagcaccctctgggagccgctctggccctggcatggccccatcccacgcagatgctccctggacttcctctttcataattatctgtcagtgttacttagtcaagctctgaagccatcagctcacattcaatttcagtctccgcttctcacaagctgtgtaacgttgggaaagcttctcagccttcctgagcggccctgtcctcatctgttacacacagtcgctcaaggccctcacctgtacacctgccatgaggctggaatgagggagctcatgcagagacagggcccggcacacccagatgagggtgacacaacaatccgtaccacctgccagaccatgaggataatggagactgtgcctgtctcatcaccgcatattcctaagagccccagacggcgcccagctatcaggtctcaacaatatttgttgaataaatcatgagtcccacagccatcaaaaatctcaaacgcaaataggagggacaaaccatgtgcagctgagggagacagccgggccaaagccctgaggtgtgcacagcttctccagctccattcaatggcccaccactagttcaaactgggcagagcagctctcaccgatgtcaaagccatcccgtgaaaacactgcattcagcctcaactttggaccccaccctgacatcacacacaggcttctttcccactctgcttcagctgaggtccccaccaggagggccaaggggagactccctccatgataagtgaggcaaaccacccccgtcctttcccaacaatgttggggaaactgatgtcatcataacagtccccttgcacaaggtggctgtaaaggtaaaatgagagaacgtgaatcagtgcctggcatacagctggcaccccataaatcccaattagatagtttttaattattttaccccatagcaaacacataagtagcaacaggtgccccttccaaaatcacctgcaaaacaacagagggaggctggagcagcagaaggggtcagggctttggactcaggtggagattttattattattttttgatacagtctcactctgtcgcccaggctgaagtgcagtggcacgatcttggctcactgcagcctctgcctctcgggttcaagcgattctcatgcctcagcctcctgagtagctaggattacaggtgtgtgtcaccacgcctggctaatttttatatttttagtagagatggggtttcaccacgctagccaggctggtctcaaactcctgacctcaggtgatctgcccacctcggcctcccaaagtgctgggattacaggcgtgagccaccaygcctggcctcagatggagatttgaagctgagagagcttgggtaagttacctgacctctataacctgtttccctatccacaaaatggagataatattacctaccccaaaggactgctatgacccaaggaaatactgcctaccactcactctcatgttagaatcgctcggaaaaggctatggcccagacctcccccagaccaaagccatcagcgtctctggggtggggcctgggttttgggggttacgaagatccccaggtgatcccattgtgcggccagggctgagaaccacacatgcttatgtggacctggcacaaagtaggcactcaagaaatccaagctttcatcattatttctcagctggccaggattttctttcattcattcagcatacatttgtagagggcctaatatatgcaaatgcaaatcaaatttaaagtcatatgttggttttcaagagccgggggtagggggaaagaggagtgactgttaacgggtacaggatttccttctggggtgacgatgttttggaactagacagaggtggtagtggctaaatatcactgaattcttcactttaaaatggttgattttatgttatgtaaatctcacctcaacaaaaaaagcaaaataataataatcataacccagacacgaaaaagacaaatcctatattaacccattcatatgtggtccctaaaggagtcaaagtcatagaaaatgaagagagaatggtggctgccaggggctgggggagggggactaggagttaacatttaatggggacagtttcagtttgagaagatgagaaagttctggagatggatgggggtgatggttgtgcaacaatgtgaacgtactcaatgaactgcacacttaaaactggttaaaatggcccattttatgttacgtgtattttatcaccatttaaaaaaaggtcacatgctgacagtccctcaagacattcattgcccacctcagctacctgtagcccccacctccttaccataggagatgacatcttcccagtttttccaggcgagcaacttcgagtagctgaccgccctctttacaaacaggatggaggctacgcatgtgttttctctgtggggcaaggccagattaagcaaagaaaacacagcagctccttccccctccccccaggaaaaaccctgtccggtcaatagcagaactaaagagctggtgcacactttcacttcccactcgagtgcctgcggacccggcttctcctaggcgtccagcaaagcccagacttaaaggtggcaggtgctgtcctctcaccctgcttcgggtgaggacgggtctccaactgagctccaatgaacaagacgaggctgggctggctccaggaggcaatttctggctgggaggtggggaagaaagacccagaagaagggcagggtgtgacagagggacctgaatcccagagccctgggtctcctgctcccctccctgagtgcctctggatatggcgcttccaggctggccctcaacgtccacacctataggaacaagagaactgaattcaagtgggaaaagcaaatgggtttatctcaggtgccaacttcttcccaccgggaggctctggggtggctgcggctctgcagggcaccaggaggaccaacaagggctggagggtggaggggaccacacatggtctgtgcattcaccatccctgcatgagatcccttccataattcctcaatggaattccatgaatgtgctttctggatctagaacgcactcggtggcctccctgactgacacatgtccatctgacctttgcttgcacacctgctttctcagggagctcactatcttctccggcaggctgctcctctccatacaggacgccaaaatctcggccctacaaccccttcccaggagctgctggcgccatgcagaactgtcggctccctgttctactctacggcttgctgataccttaccactccctctgcccctgtaaaagccttgcttccttccactgtgctacatgtgagtggctttcaaaggatggcctgttccggaagcttgagggaatrcccacgcaatgtgtctccctgaccagccttcgccttcccaagagtgaagtggagactggccctgggatactttctggggtgsgggggaagggcagtggcagagatggctagcgtggcccatgccaacaccctattctggcctcctctcccttctcaataataaaaatcctgctgtggggtgggattcatggctcccacttacatttcccagatgctcttgcagccggggatgccacatgatggtctggccagtaaggtgaaagcagaagtcaccttaacagggcagaagtccttttccactcccctgccactcccactttctgctaactggaatgcaaacgaaatggtaagatcccatttcccactaactggaaggcaggcaaaatggcaggaacttgagcctctcttggcccatggtgctaagaacggaggagcagccacatggaggggccctaggccctcaaagccacaggccagccacggcaaccctcacacgacttagaccctagatttcctttatacgagagaaaacaaacaagcttctgctgtgtttaagctgctgcatttttaaatattatatgatcccggagtcttacatgcaggagcaaggagttctgagtgctgatgacgacagtccagccgccttcacacagggagggcagccattgccttcagtgggaaaggaggggacctggatgcacagtccataccctgccctgtatctacgccttaagaattcaggctaggtgcggtggctcacgcctgtaatcccagcactttgggaggccaaggcaggcagatcaactgaggccaggagttcgagacgagcctggccaacatggtgaaaccctgtctctactaaaaatataaaaattagccaggcgtgggtgtggtggtgtaagcttgtaatccccgctactcaggaagctgggacaggaaattacttgaacccaggaggctgaggttgcactgagccgagaccacaccactgcactccagcctgggcaacacagcaagattccatttcaaaaaaaaagagttcagggccgacatttccaagcccgatgtgtatcttcaaaatcagaagatagacacaaccagctgccgtttttcaagcatcaaccatatgcccaggtgctcagctcaacgcggcatgaattagccccacgagataaaaatggtcctactatagatgaagcccaaagaggtccaccaagttgaggctgaaacccaggagccctgacctccacgctggggctggggtcttttcattcatcttcaccgtctcctaaagatccttagggagcctgagaagctgaacttggctgacgtcgsgaagtaaggacaaaaggaaagaaggggtgggagggagaagaaacaggaaatgggagaaactcttggattcctgtaaatggagattatctatgaagatgttcactgtggcattgtttacagcagcaaaaatctagaagcaatctagaagaccatcaacagaatgcataaataaatatgccacggcttcttcatacaatggatctcatatacagaaagtaagcaaactaaaaaggcaagttgcacaagaaggcccaagtaatgatactatttatatgaaactttacaatctaggaaacatggccactctgcagacaccggcgccgtcgggaaacctgttctatcagccatggtcaaccccactgtgttctctgacatcgctgtcaacggcgagcccttgggccgcatctccttcgagctgtttgcaracaagtttccaaagacagcagaaaactttcacgctctgagcactggagagaaaggagttggttataagggttcctgctttcacaggaacattccagggtttatgtatcagggtggtgacttcacacgccgtaatggcactggtggcaagtccatctatggggagaaatttgaagatgagaacttcatcctaaagcatacaggtcccggcatcttgtccatggcaaatgctggacccaacacaaacggttcccagttttccacacgcactgccaagactgagtggttgaacgcaagcacgtggtctccggcaaggtgaaagaagacgtgaagactgtggaggccatggagcactttgggtccaggaatggcaagaccagcaagaagatcactattgctaactgtggacaacttgaataaagtttgacttatgttttatcttttttttttttttttgagaaggagtctcactctgtcacccacgctggagcgcagtggagcaatctcagctcactgcaagctctgcctcccgggttcatgccattctcctgcctcagcctcccaagtagctgagactacaggcgccccccaccacacccagctaattttgtttgtatttttagtagagacaggatttcaccgtgttagccaggatggtcctgatctcctgacctcatgatccacctgcctcaacctcccaaagtgctgggattacggcagtgagccaccacacccagcaacttgtgttttatcttaaccatcagaccgttccttctgtagctcaggagagcacccctctgccccatttgctcacagtatcctagaatctttgtgctctcactgcagtttcctttgggttccatgttttgttcccttccatgcctagctggattgcagagttgagttaagtttatgattgtgaaataaaagctatataataacaaaaaaaaaatctaggaaacattatggagtgttctataagagtatgtagttgtacaagtacaaaaatatgcacaagaataaacatcaaagtcggggcagagaaaaggaagggtttgaaatcagagaacgrtacatcaggtattgcaactggaatggtttatttcttccgctgagtggttacactgaaatattattttataccctgctttgcatggctgaaacagatcatcattttaaaagcaaagggagaatatgcagtttattgcatgtcaactttatctgaaagcaattttttttatgcacctagagagaaagagacagagagagaaagagacaggagggagggagggagagaagggaggaaagggttaaggcctccagacacagcatcttctcctcatggcccaccctcctctccagagggccagccatgctgaccacagcagctccattcatgaagccacaaggccacggtgaagagggccacttaaactccatgttgctgaaggctccttaagtgaagtgacatcccaaaccttccaaaatgagttaccctcaggcctggccacccccagaaccacattcagtccaccagcagttctgcaaagacaagcactggtcgactccctccccgccygccccccatggctggaggcagggcagccaggctggcagggcctaggcacagagactgtcctgggctggctcccctggcaccaaggaggcaggaagggcgtgcaggagaggcaggaccagaggagagggagccccaggaggagggcgccatgagcacggccaacactgaggcycctccgcaggcggacagtggttcctccacttcccccatcattccccttccacagaagtgcggtgacayggaagagaccacacagtaagaagacaccaggggctggggctccctgctcctctgacctgactcagttcacccctgggatcctcacgcagcaccycccaccagaggtgtggtctgaaggtagggagaagccaccatgaacccctcacatgaagcagaagtagtgtgcgacgtgcctacctggtggcccccggtaagcaccagatgaatgggaggaagggagtgaaggaaagagagagcggagaaaggaagggggaagggaggaatggaaaaagagggtgcaggagaaagaagggggaaagagaagaatggagacagtagggagagagggagggagggtaagtcagtgacagacaactcaacttaaggagcagcagctggactcccacagtcaccttgccctctccaagcccgrggggtacaaagtccacgcccacaagctctgagcaggggrgaacctgagtacagtgggctaggaggctgggggagtggagaggccgtgcccagcctgaaggggtggccacacaggaacatgggcacagccaggagtgcccggttaaaggcctgcctctgcttctttagctgtagaatggggatgatcacaggaagcaccacctcrgaactgtctggggatcccaggagcaaagggatgggagtcgtctagagctgagccaggcctgtggtaagtcacatagaaatgtttgcttctgttgttattattagaaaatggatatccggaactttttaggggaatgctcccaactttaaaggcagacaacttactgaagctttaagaaaaaaaaaaaaaaaaaaaaccactgtgtggsccaagtaaaacacgtcagcagacttgacttggcccatgggtcatccgcttgcagcttctgctcaatgcgtccctgcgtccccgcgtcccccaaaggcaggcccaagtcctacaggggtcgaaaatcatgagtgagatttgagatcaccccattccaacacaagcgtccaagcccatgaatcccttaatgggaaataaatatttaagtcaacccccgcccaactcccacaccaaaaggacaggaactgctaattcttacccactacaaccaagtctccagttttatttcataggatggaaaaaaaaaaaaaaagacctattttaaaaagaagaagaaagggaaaaagaaaaccaacaaagacaaattcaaaarcgcaccactgttgacttgggcaacagcctctgccgggtcaaagaggaaaacagctcagtcctgaaatccgtcccagacatggaaattacagagcggcccctgctgacaccccctgccctttctgtgtcattccctcatgaggaatgcaattatatgccccccacggcaaacacgaaggaagacacgtcagtgacagccgcagcctgttcacgtcgtcctgcagagacagaggccgacataagcacttgcaggcggtggccaccagtgcagcaggagctgaaggcactgacctcagaggaggccgggcaggaggcaggggccgcaggcaggctggtggtgtggctgaaggtgctatattcactcccattttatagatcaggatgctgagggtatgcagaggagatgggatctatgtaagcttggcccactggatgcaaggcgaacaggctctcctcgcaccttcagggcaagcagttaaacagaccagcccctcacacactcactgggcagctgcggtgtggccaagccccgaaaggaacaggacaaagtactgggcgcaggctgcagatcaccacagatgccacgatgtgcccctggatgtccctccagcctccacaccccactgtgcacctcagccaccccagggcctctgcactcaccatcccaacggcctctccacatctgcacaggatcagctcctgcctccaggccacctcctgaggggcctcccatctctccaccccttcaccctgcccctctactgtcctagcacctgccacctctgaaggggctctggtgattggctgacacatttgcgggtgccacccccagtgaatgctcaggttcctgagagcagggcccatgttggggcaccctaggacagggcatggcatgtagctgacactcaacggtgtcaagtgagtggctgtgatcastgcctacaagacccaggggacccctggggagatgggccactcctccacgcatggggcacgccacacacaggataccagaacgggcggccagatgagccaccatgaaggacactggaaatacgaacagctcatcttcacgaagcacttctggggttctgagccttgctctcaagttggttcatacatcctctcatggaatcctgaccacaattccaggtcataaacactgctgctaatctcatcttatagacgaggaaactgaggcagagacgtcacacaacttgcccaaagttacatatacatcagaaacacaaatgcaataagtgagatttcaaagatggcgggtgaggatgtacctgtgtgcacgtgcatacatgtgtatactgagagcacatgtgcatgtgcgtgagtgtgtgtgtacacggcatatacattgagtgcatatgcatgtacatgtccgtgaatctgtgtgtgcacctgcagcagtgccccctgagctgaggtttcactttctgcagtgtcagtgacccatagtcaaccgcagtctaaaaagattaggtggaaaattccagacaattctttagtcttcaatcccacactgtcctgctgcatcttgtccaggacgtgagtcctccctctgtccagtttgtccmcactgcatgtcctagctgcctgtgagtcactcagcagccctctctgtactcaattccactgccatggtatcatggtgcttgtgttcaagtcamccttattttatgtataaattaaactttatcaccagtatgtacgcgtaggatgaaacagagtctatgtagggttcagtactctccaccatttcaggcatctactgggaatcttgacacatatcccccaaggatgagagtggactactgtataactgtgtgtgtgtgtgtatttgtgtatgcatgtgtgtgtgcacatgtgtgtatgtgtacactggtatgtgtattacatgtctgcacatgtgtatatgtatgcctatgtatctgtgtgcatgtctgcatacatgtgtatgtgtacatatgcatgtacaaatgtatgtgcatgtacatgtatgtgtgtatgcatttgtacgtgtatatgcatatgcacatgtatacacatacatgtatacatatgtgtgcacctatacatatttatgtgtgcatatgtgtgcgtgtgggtacatttatatgcatatattgtgcctgtgtgtacaagcaagtatayatggtatgtgtatatgtatttctatgtgtgcatgtatgtgtacatgtatgtgtgtgcgcatgtgagtatatttatatgcatgtattgtgcctatgtgtatacgtgtatatgtacatatgtatgcatgtatatgtgtatatgcacaagtatgtctacatgcatttatgtgtacgtgtgtgtgcatgtgggtatatttgtatgcacgcattgtgcctgtgtgcatgtgtgtatgcacatgtttgtgcgcacatgtgtgcctgtgtgcatgtgtgtatgcacgtttgtgcctgtgtgcatgtgtgtatgcatatgtgtgtgcctatgtgtatgtacaccaatcataacactcccttttctttcccaagaaaggatttctttttgtactgatctyaggagtttcagggctacagcgaagagatsacatgaggaagtcaagaattgtgtttacttacaaactatatggaaccaatatttaatcattttctacttacaaaatcccaattttggctgggcacagtggctcatgctcgtaatcccagcagtatgggagaccaaggtgggaggatcccttgagctcaagagctcaagaccagcctgggaaacacagcaagatctcatttataatctttttaatagcttttttaaatctcaatttcctatggctccagccagtataaccccaagactccaccttcgtggtggactcsaacctccaggtggcctgtcagcagcgcctgctcagatccagccttatttttagcactttctccagacaacccaagggaaaagaaagctgttttgaggtcaaacttctgaaacatctgtctctgtgacccggcctctgtgcaaacgccactactcccaggacatgaaaagcaccctgcagatgcccagaaccccagccaccacagccagcaggctgcacgtgcaaagaaggctctggacccaagctgcctggacggggcgcctggatggggcacctcttgaaccrctggggctctctcccagcatccctgcggcgcctttgtctcaaatgtggaagcagcagagagctgaggccaggggccgctttatttccctattgctttcaacatcttcttttgaaattctctttaaactgaaactgtcaaaagttgtgtctgataaatctgaaggttgtagaggaagtggtttgttcttcctcctgctcatgatttctgcacaagatagtacacagtacttggtgaactgtcaggcaaggcaagagctcccagtgagggccagaggaaatgcaggagatcactgaggcctgctctttacctgctgctgctgtcagacaccagacaagrtcaagggtgcagcagacaggaggaccccaaagaaggccctcctcatccctccccatcccatcctccaagacattcagggaaatgttcaaacagaactggcctggtggctctgatactcccacggcagcctggctgtygggtgttattatcccattttccaggtagagtttaactaacgtaatcagaatgtaaataacatgctcaacttaatttcaataactaacttgcccaatgtcacacatagtragttctctgaagaactgtgaatccacagttcaggcaaagcctgaacttaagaaggtctgactccaaagcctgacrtcacctgccctgggaagccctctctggcccctcagaccttgggtgtagtcaggtcccctcctctgtaatcttggtaacagtagcaatgacagtggtaacggcagtaataagagccctctgtttttcctgtatactttctctgtgtcagacacaaggctaacaccagatgtgcattatctcactgaatccttcacagaagcccatggagttggtaccgctatctgccccattgtactgatgaaaaacaaaagctcagagaggtgaagttacttgaccaaggtcacacagcaggcaagtggcagagcccaaggtagaacttccaacatgctgttttgattactggcctgggctgatcccagttttcctatacgtgacaattctttgcattatcttgggtctagatgcttctagtccagaatgaccccaagggctgccagcccctttgggtttccccaccaacgtcaaaggttgagggacagaggacatttccctgttggcaacgaactgggccccacactcctgatcagctcagccattgccaggttcttgggcctaaggttgatccaaatcggggcaaagaattaggtcctctcaaagcggagtaggaaagaacaagacgttcatggggccttcctgtaattcggcttccatgttgaagtccaaagtcccaaggccagcatgcaggcagctcactgcgtccgccctccacaattccaccagcccccagcccactcaatacacctgaggcctatggagcgtgtgccaggcctcaccaggcccctcggactttcccaatgctgtgttctgcccagaaagctcctccctgctttctcctcctggcctgagcggacccattcttggatcagcagccttctctccagggaccctgctgcttcccacgagtgcccaccctgagtcaccctcgtttgcgggcactggaaccgattgtccataactctcttctcccatgctgttgtctccacactcccaacccttagcacaatgcctggtacccaggaggtgccccataagggcatgcttcaggcacgatgcctaactgctgaatgagagaacactctgaaagcacagagggcacggcacgcgcaggcccctgcgagaggcctggggcatatctgctcacttctcacttcgttctcaccctacaaggtgcggaaggttccatccttgccctcaatttacccgcaaggagagggacactcatgcagatggggccgcagagctggaattccagccccggcctctctctgagtttgcgctctacttccagaaaacggacacatcacctgggggtctgagtgggcagtgggagagtgagcacactttacagtttatcttgaagacaggcttgggagcctgagatgaacatagagaaccatggccttctgcctccccagccctctggcccctgcccaggaaagcccgctcattatcttgggctccaaaaagctacccaaaaggttgcccctgatcgtgcatttcaaagacttgttcacctggactagaggaccacaggagccccacattagaaacaaaggagcaagggccgggcatggtggtgcactcctgtgatcccagctactggggaggctgggatgggaggatcgcttgagtctgggaggttgagaatgcagtaagccgtgatttcatcacygtactccagcctgggaaatacagcaatactctgcctcaaaaaaaaaaaaaaaaaaaaagaaggccaggcacggtggctcacacctataatcccaggactttgggaggccgaggcaggtgaattgcttgagtccaggagttcaaaaccagcctgggcaagatggcgaaaccccattgctaataaaaatttaaaaagtagcyaggcatggtggcacatgcctgtaatcccagctactcgagaggtagaggcaagagaatcgcttgaacctggaaggcggaggttgtagtgagccaagatcatgccactgcactccagcctgggtgacagaacgagactccatctcaaaaaaaaaaaaataaagaagaaaaagaaaaaaataaaggagcaaaagagaagaggccaggaaaagtaaaaacactaaattcctcttttttccagaccaaacctggggtataaatgccatttttgagggtggcgcattcaaatcctctcatcttctcacaggaggcctttacggggtaaagagaaactgaggggagcctcacagagggggagaggcaccgctgctgggggcactgctatagaggctgctctatgttaagcccctgcctcactaggcaggctttgtcccaccttcccaacggggcagaaggttgtcaagcgcctcatctgggatgggaacacmaggctggggcactcagactggttgcgggatgtgcccaggtcccagagtgagtgttagggaccggtgacaaacatgggtccacgtccagcccaagggcgtgggcccayatcacacaacctcgcctaagccccttgcctggtgggatggaaactcgctcaactaaaaaaaacttctagagcccaagaagatccttgttcctgcccagcgaggatggacagcttcaaagggcagtttgggggtttctgtttattttcctgtatgttctggtcacctcaatcatctaaccagaagaactggcccaaaattaggcacaagaaaaaaggaaaaagtctagccctgccacataactcctggaactggttgcagaaactgaactttggctttctaaacttggtgaaggaacaacagcctctttcaagcaaggcccttttgttcctagttcccagggaggaggcagaatctttggctgaacaaattcggttcagcccaagtctcccagggaaacggcgctgtgctaagccccccatggtcaatgcattaacttgctcctatcccaggcagatcaccaatcaattggatggcattggttttgtaatttcaaaagcatgtagccatcagattcattatgcaatcatggcccgttcgtaagtaataccaataagaagtgcttcctgagcaatgtctcagttatgcctcatgataaccctgtgatgtagacacacccccatctttcgttacacagacaaggaaactgaggctcgccaagctcaaaaccattgccaagatcatcactagtaagtggcagagctaagattcaaacacagcaactgcacatccctggcctccaatcaaccaagaaacagccaaatgaagtaatttttttaaaaagggaaagaggccaggcctagtggctcatgcctgtaatcccaacactttgggaggccaaggcaggaggatcacttgatcgcaggagttcaagaccagcctggacaagatggcaaaaccccatctctacaaaaaatttaaaaattagctggatgtggtggcacacacccgcaggcccagctactcgagaggctgaggtgggaggatcacttgagcccaggaagctgaggctgcagcaagctgtgattgtgccactgaactctagcctaggtgacagggcgagaccctacctcaaaaaaataagacaaaataaaaagtaaaaaaaaaacaaatgaaaacaagagagaagaaaagaaaaaggaaaggacaaggatgtatttttcatcatcgacttcttgccacctgaaattaccagcttcttctctgcaagggttgtctccccgactggaacgaaggtgttctagtggggctgtgtttggttcaccccacagcccagccctcagccgggcacctgacacccagaagaccctgagcgaaggtctggagcgagsgaactcacagggccctgctgtctgagccagggccacaggcacaacccctgcctttcccacaggtgacagcaaggacagctcaccgtgctgggtcactctgcccagtcaccaccacaggcgaaatggtckagccagagaggccctctcacggttcagctgagccaggcccaaggtcagctcgctggggaatttctctcattcgttcattcaatcgatcatttcttattagctcattcaacaaatacttattgagcactaaccacaaccaggcattgtgcgaggcagccttcttgggacagtgagtgttagggactggtaacaaacgtacggggtccagtctggggacagagaacaggaaaaggaagcaagcayagcaggacacagcgtcagacacggggtgcatcctgcccctatcaaggacgcaacctggtggtagtgaaagtccagctggcatcccctccctccacagcagggcctcaggcctggtttatatatgtttctaaatgaagatccagcccacaacaccaaagactgtccaggtacagcatcatcaagtatggatggaaaaaacggcacatgcaaatgaacaccctacaaaaatgttaattatcatctctggctgtcggcattctaggtggatttggttttcttctgtttatttgcgttatctaactgtgctacaacaaacccgagttctttatgtaatgggtaaggggggtgaacatctttaaaaaataaatgtccgctcgtagatgtatatccaaaagaaccaaaagcaggggcgataataaatacttgcaccaatgttcacaggagcgttacccacaacagccaacaagggaacaactcaagtgtctgtcgaccgaagaatggataaatcaaatgtggtctatccagtcaatggaacattatttggccttaaaaaggaaggaaattctggcatgtgctaaacatggggggaacgtaaaaacctcacactaagtgacataagccagacacagaaggacaaataccgtatgattccacttagctcaggtacttcaataggcaaactcatagagacagcaagtagaacagcagtgaccaggggctgggacgaggagagaatgggtacagagtttgtgctgggratgatgaaaaagttctgggtgtagacagtggtgactgtgaatgtatttaatgccactgaattgtacacttacaaatggataaaatgataagtattgtgttatgcatattttaccacaataaaaaaatttttttaaaacctcagaacttcagctgccaaaacgaatgaatgaatgaatgaatgaatgaatgaatgagaccttcactcttccctgatcaagattttcctggttgcatcatcaaatagacaaagtgagaaaacagcatgctgtaccggggtagggacagcgactggggcagtctctctacctgggcctcagtttcgccaactgtgaaatcaaggcayctgccccatcggaccagatgtggagcctgtgaccagatgtcatctttcctctcttcagtctcacagctaattctaggaaggtgctggcactaggaagagctctggcttagccagccacctctcactgtgcccacgccacttcccytgggagactccttttctyacctgtgaaatgcggagactaatgacaaagctactgtctctacccctgcttcccttacacactggctgcggctccctcagargatcacaaaggtgaggtggatggagccctagcttcttccctgagctggctgcctggaaaaagccaccccggccaggtaactcaagggactaggaaaatcctggctgcactcaagcttggcaaggaggctgaggggcaggagaaatgaaggagaactctccaaggcctgccttgttgtccaaccaacacctacttcatttttccttaggtggaaccatacaagagtgggcacataaaggacacctgggaagtcccctgaggtctcaggaaaagcagtggagcctaggaaaagacacacgagctcgagtcggcctgacctgggtttgcatcgcagctccacaacccacagccatgtgaccctggaggccaagggcctggggtacctgtcccctctcttgtaacacggggacactgcccacccagggggctgaataagtgcctggcacatcataggtgcctgagaaatggcaggttccattatttcacccggtccagccctggcaatcggtacccagctgggcagagagccggcttgaatcgtcctacaaaatcctcagggaggagagaggactccatgcgcacagcacgctcataaaaacaaatctgagaataaaaaccacaaccgccgtcccgccaaacgtagtgggagtaatgaagcaaacaaaagggaaagttcaactcctttttttggctttagaacatgcaaatgcaaaattcagtggcaaaggaattatcccagaaaaattccatgtctaaatctgaaatggccccaaggaactctgtccctctctagtcatttaagtgamgttttgctctagggtgtggctaaagatcggggccagccaacctggggagaaacaaagacaatgaggaaacttgtttattggggtccttaaaatgttaacaaccaaggaaaaccctcagcttctcttagtggtgcttgcttaccattgctgaaggtgaagtccttggtatccagaaggaaggagcccattagacctgcactcatcgtccactgctccattcacatcagctgaatttgccaggtagcctccatgatagagactcagtaaaggatccatacttcccaaattccaggcgttcaaatgccaagactgcctttgcctctgtggatactccctgggcatattttctcatgcttagtattctttaatcgttggtcatcaagggtttgtggtcactctgtccctctgctttacaggtcagggaggtgaggcagcccaaggtcacactgagagccagggcaaagctgagcagtgagccaccatctgcctgattccagcagaacagccctcggactcaatcacaacgcagctccagtgatgcactacaccttatcagagagtgaagaactgctctaaatcttaaaacaaacattttaggggcaagaagtgccaaccttgaaactccagactgggataaaagaaaaaatatttcaccataaccaagaagactaaacacagctcaagcaagtacagaaaacgctgcagggaccagccccacacttacctggccaaaggagcaaaactctgaataaaaaccttgatctttctacttaatgaaacatttttttttttatcacttacatgtttatttctgtgcaaagctccatttcctgctggggaagcgtcactgaccccctagcctggtttattgccctagagagggaggtgtccatgaatccctaagaatgcctatattatggatgctaaaaaacacatagttgctaagttttataagccctgctctgtcttaccattttgccagcccaaggatccatagctttcagcacattttcaaagggagtatgtcattcccaaatctagacccagtaccccagaacatccattcagcagggaatagtctgtcattttgatttttggtgactgtgacaaaggactcactgaccatccacccagacacaagaatggaaatgagaccaggaatgaaagaaaaaataaatcacttcccaaagcaagtcatgggatgcagaaatggaccaaaatttaagtggatatgacagaagagaagtaaaagataatgatgacaacacagttccatgggtttccgagaaggaaagaggaagaaaactagcctcatctttatgagggcagccagctccatgagaactgcctatgcagctcaccgcaacacgcaatgcctagaacggtgcccagcacatactgctgaatgttggataaatataccatgtcatttactctcacaatcctgggatgtagggatgggaatttcagtttccaagatgagggtcagagaactcatgtgatctacccagagttacaagcaacaagaggcattgctgggatgtgaacccagatccaggcactgctttgcaaacccaggtgctttcctctataccacactttgtttaacccaaaatcatctcttaagagcgaacaccctggtgtggagaaggcttcaaaaaaatcccactggctcccttgagggtcatttaacgactctgggccttaagttcctaatctatgcagtgaaagaagctgggctacatcaagaatggcaaatagggtccccgttgcatgccaacaacaattgattattagtggctgtctctgagctcactgggaagactaattacgctagggttgattagcaatgtctaccacggtcaaggcaatgaggagtggcagcacatgtgtcacttatttgccatcccagaactagatgaacttcaagttctcttccaactatggctggctctgattctaattataaaaacaaaaaaagggggaaggggcaaatggagaaggaaaaataggctaacattttccaacatgggccatggctgaattcagtcaaatcaaggctgtctgcccagccagcccctcatgctccatgcacacagccctgccacatgggaggaagtggaaaacatcagatccactgcccacatactcaacaagacacccaatccaagccagaagctgcagaacaatgggttttgcctggcttggccttagttgtaaaacacctcaccaggaagcgtggtaacctcgcatctgggctcaaacctgggcgggacctcttgcccatcctgagccttcacagattactccaactctctaagcctcagtttccttcatcattgaaaaacttcacaggattgtcataacgatcacatacaacagggcatcaaagttcttcacaacaaggccacagtgggtaggcaaagaaatggccactaccatcatcaccgtcatcatcaccaccaccattttgctttgcagggggcaaattttcagaaaagagtccaagtgcaagagattcttttgtttctcccacgttcagcatgatgcccatttggttgctctgaactctaaagggaagaggctctgaacaccactccatctcctcaagctcctggtgcatcagccagggtcctgggaggaaacagatggcagaggaaattttcacaaaaggacaatatattaaggcatgggcagcgtacaggggaagcacaaaagatggtttttctacctagggtgaccagccgtccaagtgtgcccaggactgaggggcttcctgggccacaggactttcactgcaaaaacctgggacagtcctgggcaaaccaggacagcagtcacttcatttctcccccatgtatttctatccctgggcctgacactgcaggggaaggagcagttacagaaaaacctgggtagagggagtgacatgactgcaggagtggctgagggacgccacccacccatggcaaccgctggcaacccgaaggaaaagggaggagggaataaatagcccactcaccctcctcccatcctccatctcccccaggctctccactggccagacccacccagaaggcaggggagcagaaaagaatggagggtggggtttccaaggcaaaggctggaaagaatagaacatgggcccagaggcaaagaaaaacacacaggccctgtgttgactctggggtggccaggggagccaaacctcacctctcagagcctccatggtgaggccttgtggggactcagtgcccctagccctcacacaacaggaaggaaaggaacttcccttccccactggaggggacactgggatgtggccaaagtccccttggtccatgggtttggtttgtggcattcaaaggtgagcccagcagggctcggaggaagaagaccccttcagctggcatctgacaaggccacctcctaagagtgggaaaggctaagacaattccccaaagaagcagcagcctcctgggcttggtctaaagcaggtgctctgtcactgcagacccgagtgggggatcaaaggcagggcctgcttggggtggaagtctataaaatccagagagcacacccctggaattgctacgcagtttaccccacgggtgtgctcagaccggaggccaccagtcagaggcagtgcatgcgtcaggggcaatatcgtttagaaaataaaagcgactttcaattctgtttttaaatcatattttccgagatcaaaatcttatttcccaagcactgctgctgaaagctgaggtgaaaaccaccaataatatcttaatcctcccaacggcgggtttccatcttgcttgggttgggagcttggtggctggggttaggacaggggctgagagcccattccaaataatggtgcctgaggtcacggagcgaggtcacggagcagggtcacggcacggggtcacagcgcagggtcacagcacagggccacgggcacacccaagaagagcttcccttgactccaaggtcaccagaaggtttccaagaaaactgtgagactttcctgtcccttcacagcctggatgccaaggtcccccaccatgcaacagacaaaggcctttattgacatcgggtattcctggaaaaacggacccaaaccctgccttcaagctcacagtcctgcaggaagcaggaaggtatacaggtggcaaacccaacacaagagaagcggtagccacagtaatgacagtgatggtgacggtgacggtgacagtgatggtgatggtgatggtgatggtgatggtgacagtgatggtgacggtgacggtgatggtgacagtgatggtgacagcggagatgacagtaatggtaggggtcatgatgatgatgatgatggtagcaaacatctgttgagcacatgccacgtgtccacactctactaagtactttccatgtattctctcctttattctcagaattccatgtattctcccctttatcctagggagtggctactcttatatccccagctttcagatgaggaaactgagagctggatcacaccactggttaaatggcctcatatgaaatgtctggatcaaaaagcctggccagccctcctaatcamcctgcccgatcactgtcctgttttagggaaggactgacctgggcaggcaggggatttaacgcctccacctccctgcaagacgtaatggggaaacagtgtgcgggtttcaaagtggaggcagggggtttcctccttcctgatccccttcaagcaaagcttcccagaatggctgagcagggagggccctacgcaggagcacccagtggaggccagtgggactgagatcagccgggatcccctcctctagtcatgcccccagccagggctgtgctggcccagagagggtgccctgcttaccactgggggcaacagaagaaccccagactgttcgtctttgcagtgctccctgacccctaccccccttcaccaagcctgcgggtagaacctgcatgccaactccagaaccttgctttttaatagccttccaggtgatggggttcagctataaaaaggagagggacccactgcccagccgtggatgggtctggggtcaaacagatgaaggcctctttagaagaggtgagaagccagggtccctatcccctctcctccccacttcctcatctcccccaaaaacctgcttcaattcagacagggcacaagaagcaggttttgaagtcatttttccttacgccaaaactttctaatgctaatttctccccctctctcttattggcatgatgtaattccccttttcaacaacccagatctctgaagtcctgagtcatcagggcgaaggcagggacagcgagggggaggtcagtcgggagggatcaaaggtaggggggagcttgccaacgcccaggccagctgggatttccttctgggggcctggggtgccgtggcccaccggctcttggccccacaccatgccagacatggggacagggctcctaaggcccccacattgtttttcagacctcctgtgggccagttctgaagagacgaggtgactgtgggacggtgcaggagttcccagctctgtcacatgccagcccgggcagcccctgcctgctccagaaaatgggacctcacgaggtaggtgtgatgattaaatgaatgaacacagcagttctcaaccaggggtaatgtggccccccggggacatgtggcagagcctgcttgttacgtatcacgggttgttacaactgtggggagcagtgggccagcacctggcaggtggaggccaacctagaataaaagctcctcctgctccctgtgtacctatgycacacgcactcatttaggagaaagggtagatggctccaccccacatggttaatacgggtgatttccaggtggtgggattctgggaggatttttttcttcttgattttgtaagattgtcgtcagccctgtatgatggcttcagttttgcttttacaagagaggggaggtaaatgtggagtggagaaggcaagaggcaaaggcgacctggctgcccagctggggtggtgccgcgccacaggggagcaagccctggctccaactggggaaggtagccctggaaaaccactgactggcgggggggtcggaggggttccaagcagaaagaagaggcrtgtgccaaaggtcagaggcatggggaagctgaggccagaagccagacagggcgggasgctcgctccacagtagactttgaacttcgtgctcactgtgatccagtcctcaccaccggctgtgacagagcgctctgcagggtcaggtggtctcaggcgaggaggctgaggtgaccaccccaggttcaacgagggcagrtgagaagcgatcctctgccacggctcctccggagatgggtctgcaggaagctggcccaggaagctcccggaaggggccccagtgcagtcagggtagacccttctgctctgtccacacgctctcccttccacaaggccctcctctcagctcacagccagcctggccactgtgggcctttctgacattctgctttgcagccccaaaactctgcttaccagccacaggcagtgatactctggagccagacagcctggggtcaaatcctcgctccacaattacaagctgggtaagtagggacctctcctctccgggcctcagtttgctcatctgtataagggggacaatgacagcaccacctcgcaggggcatcgtgaggattagatgaatgtacatctgcacaaagggctctagtagtgtctggcataaaacaggttctgggtaagtgctcactatccttaytgttgccttgctggtgattcggcccttgctgccagggttcctgtgctcacaccccaccagggactcgtcgtgacatctggaggccactggctctggagttaggctgcctgggttccagctgtgtaaccttgaactcktgaggtctccatttcccctgctaacgyctcacggggctgatgagaggacgaaatgcgcacacgcctaaaggtctgagaatgactggaggaaatggtcatgattaccccgcggtcccctccactcaccttggacatgactatcatctggctctgggctctgtctggccctgctgggactccccgagctcagttgccaccagcctgctgggacagttcgagctcttccattttcctaccctgaagcaagcctcagtcacagggtcgtgaaacatgaaccaaccagggcgacaaacagatgtcaacaagtcatcattcccctttccaatgggcagacctgcccctgtaacctgccagctgagaccccactgcacttcccccactgcagacaagaggcagagtgccactcctgcgtcgcctacaaggtgcccaactgtgtccctggccctgaggtccagcctgatgggatcaccttcgagacagcacaggcctaggcagggccttcccaccaggcctccctgaagggaaggttcaagaaaggggtcctgtgagccacagctcaggcctgggatttggagtagcaggggtctctagtggaaagcccaccaggagctcaccaggctgagcccagcagcctgacgccattaccaccactcttcacaggccacaggggtgggctcggaatcctagggcctgtgtgcacaccgagaaaggctgtgtgcaccacagctgggccatgtgttggagacaccatgtacgcaatcccctgctttcagtacggacagagccctgcagcaggggagtggtagaactcgcacttacgcagagggccagaggcccgtggggttacaaggaagtggaggggtagagatctgggcttgcgcctccctctccgtgggtccctctccccttccaacaggacggacctcccaactaggcaagctgttcattcawccaaactatgtctgttgaggggcagtgcctcagtgtccccatcggtaaaatggagagagtaacagtatctaactgggttgtacggatcactgataaaacctgcatagcatagmccctggcaagaggaaacacactaatcacacgagtggccgctgcacggtcactactgtgactaactgcctggtcctggcgactcggagatccctgcactcctaagccttccaatctgtgacatcccgggctcccggctggccggccagtccttagtctctctgcatcgtaaagcaccacccgccccagggtgcatgggtttacccagcattaatcaccccacactggtagactctgctctaggaggcaaacccacctctatctttaattcctatgccgtcttacggtgtccaccccataaaaactgcacagactcccggaatgtgcccagccgctctggcctgtccctttgctcactgttccctctgctcattcccacctccgacctgccaccctcatctccatcagtctccatcctacctctccatccagatgcctgtctcctacaaagaagtccttcctgaaactccccacccccatgatggcgtctcttcctccgtccaaacacaggacaagacataaacctctctaagcaaygtgctttgttcaatggtgtatcataattgtaatacccccatttaactatgagtcccttgggagggaagagtatgtctgactttccaagtgccatgcctgagagcactcactatgcaagaacagtgccccagaacactcaatttgcacaaataatatatggtgttcaagttatacacctaatgcttaccctttacgaatagctggcattcaatttcccacatcggttcccttaacttttttgacaaaatcacaaaggaatgtccgccaaccttggcaaacactaaactgaaaagctcacttatttctacctaagatgtttctgcaggaggctgaaatagtttcatgtgcatctaccaggtgcatatacattgatggacccacacagacacggggtcagacctggctttgacactaaactctacttcctcccagctctctttatctgagactccattagagcatctgtaaaatgggaataaacacctaccccacaggattgttgtgaaaattaaatgagcactgtgcccggcacacagtagggatacgataaatatcgttgcaaccaggaacatataggtccatctcttacaacggatttgctcaccctactttattccccaccagagaagactgcaagcttggccgaaatgcccccaacctcaaacccaggaaccagatgagatcacggtcatgtgaatttcctttctagggaagcagctctgctcttggcaccctggagacctcaagatctgctgctgcatcccaaggatgctggggtgggagtagtcatcgcttccatgcwctcctcttcctcccagacgcacatgtaaaccatgttcccaagtcttcccctgcactccgtgtggccgtgtgtctgagttctagccaaccaagcggccagatctacaaacggcttggctgtggtgctcactctttccccatccccctgacaatgaaggacctaggggagggcagacccatttcacaagaaaaagagggggcagaaccctcgggagacccctgcaggactgcaagaactgggctgcatgaagccacccagatgccagggctgcgtgttacggcagctagcctgcctggggaacacacagccccttccatacccgtggctctccttccctgcagagcctcgcaccggtgtgtgtgttggtaaacagggtcacctagtccacacagggagccaacatgcgagggaggagagccaggcctgggtctgctcagactgtgtgctccaattttcagatatcctggacctctaaggaaactggcactggcccaggacacccagagaagctagcagcagtcccggtgtgatcttccttctccatatgaccccacctgagctggatgcagccagcccagcccaagggaagcacccagatggctgtttgattccatacactcaaatcctatatccaccagggaccagacgatccagaccacgtgcttccctccaaaaagagttcgcccagcacaatcagtttagtcgctccgtccaccctaccatttctgacagtagcttgaaagcagtagagccacgaacaaaggatgccatgggaaggcaggagtctgggtttgaatcccaggtgggctgctgagccagctgcaagggtctttgccgacacacttcccctcaccccttcctcgctggcaaaaccagaggtgaatcagagcactagtgtgttctagatcctaggatccttagagtgtagttatggacaaagggagttgcgttttcaaagttctgctgggctttgtcatttaagaatctcttaaggcactgctaccagggctattcttcactatttattgggaggcagccaggtttgcaaaaaaaaaaaaaaaaaamcaaaacaaaaaaaaaacaaaagaaaaaacacacaacagaagcaaaagaatggaagctttacggggcaaggagctgcctgtgtgtccatcacctcgcacattctacatactcattaattttttaaacagataataacagctccacagagcaggaggaaggaaactgacaatcatagaacatgtaccaggtgcaagccactttactgggtgatttcyacagatgatctcctccctcagggcctttgcaattgctgttccctctacctggaacgctcttccccctggaagtcctatcacccgcttccctgaccactawgtacaaagcagcccaccactcgccccaccctgcttgcttttctccacgatccctgtcatcggattttataattacttgctcttaacttagttgtttgtccactcccaccaacacaggctccacgagggcaggctcctgttttcttccgagtgcctagaacggtgacacttaactgctgaatggaggcatgaaagcaccgccaggcctcacctcatttaccctgacatcartgctaagaggaagtttctctgatcctcgctttacagataaggacacaggctaggggacctgcccaaggtcaccacctgggacactgcagaggcaggattcaagctcccctgtctgatttcaaagtccaggtcctcactcccctactccactgggtctgccgtgttctcttcctgtggcctcactgcacaccccaaatgccaggacgagcgctgtgcacatgggaggggtaacgaaatggctactgaagtcaggaaccaatttcagcaccagaaatattttctctgccatctcctttgcctcaatacacacagcaaacacctcccccacacgcacgtctcatcacccttcggttagggctctgctgatgtaagcgaagcttcctttcaaaatgcgcacagtctccctcggtgcctgttgaatacactgggtggttcatcaccagagccaggagcaaggaagagaaactctcacttcctctcttcctccaccatggggctgggtggcctggcttccatcctggggaaagcaggaagtcagggaacaaaaagcaatgccctcaggtggagctgcacagacccttgttctgtgggtggaagtcagcgcatccttgtcagagccccctggtcacctatgttccttcagctgcagggaagaccaagtggccagaccctctgagggggatccctggttggtgacctttcagccagaacaaagcatgactccaggtagcaataaccccaggaaacactgcccttccctcttcaaaaggaggctcagctcccccatcccaaagaattaagcaaaagaacatcaaaatagagacaactccattcagtaaaaatagaaaatgttttctttcaaggaacaagagtgtattagtccgttcccacgctgctgataaagacatacctgagactgggcaatttacaaaagacagaggtttaatggactcacagttccacgtggctggggggaacttacaaccatggtggaaggtgaaaggcacgtcttacatggtggcagacaagaggagaatgaaagagctaggcgaaacgggtttccccttataaaaccatcagatctcgtgagacttattcactaccaagagaacagtatgggggaaagcgccccatgagtcaattatctcccactgggtccctcccacaacacaagggaattatgggagctacaactcaagatgagatttaagtgggaacacatccaaaccatatcaaagaggctgggactaacctcaatgcccatcaacaggggagggtctacctacattactgtgatacacttctacaacagaacactatgcagcaatgaaaaagaacaaggcagctgcacacgcatggagggtctccaaaatatactgtccagtgaagaaccacggtagacagctgtgtgcatgcatgtccagatacacaagaaatgagcagcagtgcttgcctccaaggagggccactaggggctgtgtggacgtcgagtaagggaagcttcatttttcattaaacaccttgttatactaatcaaatctacctgatgcatacatgagtatttcaatttttgtaatttattttaagaaactagactacgccccgcaaggaatttttcttaaactgctggcaagaatttcattgccttcctacctatgagacctgctaaacacccctagctttccccaatgcactattcatctcagggaactctctggaggccacccatttttaggtaacaataatcccttccatttgtgcagaaagtcatgaagctctttcagggcaattagcaaaacaggaattggaatcctggtcactgtatgctgactatactagtaggtgcttatctatcctctccaatccttacagcaaccctagacatgaggtgctctccctaaggatggaggaaaaacaaggcccagcaagggaaagcaaagcaccaaaagtcacacagccaggaaactgcacccttcaaatccagatccagcgccatgagaacgcaaaacccaaatctgttctcccccacagaggagatgccccatatcaggctgcctcacctaatctcatgtattcctttaatcaaaggtgtaagctgaccccctgcaatgtccatgccaacaaaacaccaattgggtaccttcaagacgagtcagtcctggctggcagcagttgaggtaccctgggacagctttgccttctaccaggtccccctgagccctgcccaggacagtgccccagaaatgccctctcactgcccgatgagacactaaggagcaggcagggccgccacatcagtcaatctgtgggccaagcagcccaagccagcagcaactgccacctctgtcacccacttgcaggaaagctcagccacatgcagtgaaattccttccacctggactggcatgatgttgccgtggccggaacaggcatctcagattgcaccaggcaaatgcgagcatcaaaacttactccttccttaaaatgcacttacttattacagcctgggaaaggcagaccacgtttgcaatttacagagaattttgactttttctcctctctgtctcagcccctcccctccaccacctccaatcagacaagttgtctaggaaacaattttgatacactccaaaatcctcctatgacaaatggcatggaaagggggggggggaaatctgtgtgtttactgccacaaaaaaacatcaaataaattaaaggcaggctaggcacatggggggaaggggggtatgtaacaaaagtgaaaaagcaattaacatgcgtgcatgtgggcacagatgagttctcgtgggatctgtgactaccctggaggacatagattttaattcttaggtagaaaccaagccatgtggatgtgtaactcttagctcagcaagtgacacacagyaggcatgcagtaagcctgtgctaaacaaagtccaagttcagaaaacaccagactaaagaaaccaatgagaatgaaggtggcttctcctttcccatccatatcaagatgcccagaaacattgcaatcaaacagcagagtggtgaaaatttaaaaacaagccactgatgaattatggcttgagaataaagaacactactgtcacctgtgccccgacccctgaataaaggactttctgagtggatccaccattctgaaataccgtgtgccacattctcttaaaagtaagatgaaataaaaggtaggcagcttatttgtacttctgtggtgcagaagaaacaaagcctacagacaaagccctctgcccacggacaaacatgcctagcaggtgatcaaattcaacccacagacgagagcagcaaaatggattctggtcctgccgaacccggccgcttatgcagaacccctggctgccctggctgtcatttacaaccaacacgaccatcaccagccatgaagagccagtgaggcccaggaactgggaagtttgggtacaaagagggaatggggcaccacattcaggccacagcctgggcagacaggcccttccccacaaaggtgcagtcctgggtccccaagggagggggccctggcctccctatctcccctcccaagtcagctgtcgcctatctgcttcctcctttgtttacgagcatttcggatccaaagtctccaagcacagggtgcatcagacctggcggccgtcacaagccacattaggcacgctgttggctctgcaaggatttaatcagtaactggcccaggagaccagggcagggcaagctgcgacctgatcccacaggaggcaaagtttacaggcaggccaggcgggtgaggctgctggctccaccggtaagacagcctggagggctatcaggtcccttggaccccagactaaaaggtgtacctagccggtgtcacccagcaggtgggactgggagcccgagtctgcctgcatcccagcctgatgcagatgtgctcctggaagcacggtcttaaatctctcagattcggttaattggatcaatggaaacagactgcaaaaggtttgggcaaaaaagagtatttggcttgtttattggtttgaatccctatcaatcactctgggtcttgttcctgaagcccatacaattaaccagataattaccagatgattctgagttgggctgtgtagatggcttaaaatatggatgactgatatttcaagtaaggatatgactctataggaaacatacttggaatatcgggagctcagggctgggccagcggctgctgcgaagccacaggactgcaaagggtttttgttctagggaactgcactcaaattcacctttgttttatttgggctcatatttctcaatagagtgcttgggccgcactataaaacgcagacagattacataatgtccaggcctcagggaaaccccacaggggctccgctgcttccccgagagcctggacaccaaccaggtgtctcatgatgggacgagagccctggtggcagtcccaacctcacctctacccgggaggccagcgctccagccaggccagccctcacagccccacctccaggctcacaggccctgaggcaaggccccctggagcccaccagagggcaagggtaagacttaaggacaccccctgcctgtagtgcttggtgacgaaaggcagcggaaaggggattatgccagtccatcaaacacttccttatagttcctcttgccacatttcctaacaccagagcatggctctgccaagagaatcttgctccatggataagcctcagtccccagtactagacaggtgctttccggaaaggcccacactaccgatggtgccacctacctgggctggccaaggtgagcgaggggcctctggctattcaggtctttcttccttccctctttctctcagatatacctcctgagcaatcggaggtaagtggggaggcattagcctcgagagctggctttccggaaacaggacggtagcagcgggacactcactcctggcttctcccagagggagaaggggctcctcctggccttcccatggcaggtcactgttccttctaaccattttcctaccccaccaccaacaacccttcattttgtggagtgtaagaggaaaaaaaaaaaaaaagcccaataaagtccccctgagccaggtgaaaattctgaagccagatctggggtctccagaatccaggcagggggcaccgcggtcaccagttcctccccacatcagaaacactccgtactggcaaattttcggaggctctctcccgcctccatccattggaaagccaaatgctgcggcctgtggcgcgggacgggcttgagaacatgcaccagcctgaccggggactgggccgcctccccgcgaccagcaatcctccctgaaaaaggagtctttgcagatattgcaccaacgtgcccacaggaaagagaaaataggtgctctaagcatgtcggaccccaaattaagaataaaagtcctcgagggctgcaacgctctggggtggggggtgggggactggttcaaagagtaggattcttcagctaacttttcccccctccccattccttggggcatgtgtcatggcctgtgacacaccgccaagggaacatggatgccagggaaatgtctacacacgctacacgtttgtgacatgccatgtaagcgacaccctatttcctggctgggttttcttggcacaggtgtgggcaggcagtggattcggccccctcccactgcgcttagtaaacaggatcacggtggccccagggaggagtgtgcattctggggaagacaagctacmcccccaatgaggatgrgacccccacggcaagcctcaggcccaagccacagccggtatttgaaactgtccttgtttcaaaacacaaagcatcctgttcaggctcctacccgccacccccactctcccctcgaccccaccacagctgtctttctccacgtacgaagaaggccaccatttgcagatctgatttcagaaacagatcaatggtttttcctctccgactcatccagctgacccagtcctacccatgtatttaaaaacaataacaaaattaaacctccagcaacaaaacacacacgtatacacacactctacagacaatgccggaccagggctccaccaagcagcttctaggctagaactcgaccaccgctgggtcctgagatattccaggaccactgccccctccccctccacttccaacctctcaatgtgcgaatgagattttcagaaagggaagcaccccgttctgcctgccagccctggcaggaaagagaataaaggacgggtaaaccaaacagagaaactggcttctggaaattctttgggtttgggggtttggaggttttgttgtgttgtttgtttttttttttaaatctgaggggtggtattttgttttcccctcccccacccctcagatccagatgggccagggcttccagagagaacccccaccaccatcagggcccagcgtcgggtccatcctcgagtcccagccaccagaaacacaagagctgggggcagaaggtcccaggcacccagcctggcggtgggccgagtctccagcattttaagggtctctcctgagcccggtcggctggtttgggcttcagactccaaaatcgagccccgcgagcaggccaggagcgaggcgccctggttctccccgttcccccggcaccccccaccgccccccaggccctgggctccaggtgcagcgccagggggcagccagggagggcgcatctcgggccccgaggagaggcgggggtgcagccgcgcagagcactcaccgtggcggacgccaggctgttgtcggccagcgttaggtggtgcggctcccagcgcctcaggaatttcgaggtgaggatcttgctgagaaaggtccgcgggtgccggatgacacagacctgaatgtcgccctcctgcagcagtttgtacctcatcccgttcaaagcagaagacccggcggcaggcacggcgcccatcttcgtgctcaggagacgtcgccccccagcagcggcttggtctcctcgatctgccggggtcgccgcgccccgagctgctggtcacatccatgccgcgccgggggagggggctgggggcggggagagggggctgtnnnnnnnnnnnnnnnnnnnnnnnnnnnnnnnnnnnnnnnnnnnnnnnnnnnnnnnnnnnnnnnnnnnnnnnnnnnnnnnnnnnnnnnnnnnnnnnnnnnnnnnnnnnnnnnnnnnnnnnnnnnnnnnnnnnnnnnnnnnnnnnnnnnnnnnnnnnnnnnnnnnnnnnnnnnnnnnnnnnnnnnnnnnnnnnnnnnnnnnnnnnnnnnnnnnnnnnnnnnnnnnnnnnnnnnnnnnnnnnnnnnnnnnnnnnnnnnnnnnnnnnnnnnnnnnnnnnnnnnnnnnnnnnnnnnnnnnnnnnnnnnnnnnnnnnnnnnnnnnnnnnnnnnnnnnnnnnnnnnnnnnnnnnnnnnnnnnnnnnnnnnnnnnnnnnnnnnnnnnnnnnnnnnnnnnnnnnnnnnnnnnnnnnnnnnnnnnnnnnnnnnnnnnnnnnnnnnnnnnnnnnnnnnnnnnnnnnnnnnnnnnnnnnnnnnnnnnnnnnnnnnnnnnnnnnnnnnnnnnnnnnnnnnnnnnnnnnnnnnnnnnnnnnnnnnnnnnnnnnnnnnnnnnnnnnnnnnnnnnnnnnnnnnnnnnnnnnnnnnnnnnnnnnnnnnnnnnnnnnnnnnnnnnnnnnnnnnnnnnnnnnnnnnnnnnnnnnnnnnnnnnnnnnnnnnnnnnnnnnnnnnnnnnnnnnnnnnnnnnnnnnnnnnnnnnnnnnnnnnnnnnnnnnnnnnnnnnnnnnnnnnnnnnnnnnnnnnnnnnnnnnnnnnnnnnnnnnnnnnnnnnnnnnnnnnnnnnnnnnnnnnnnnnnnnnnnnnnnnnnnnnnnnnnnnnnnnnnnnnnnnnnnnnnnnnnnnnnnnnnnnnnnnnnnnnnnnnnnnnnnnnnnnnnnnnnnnnnnaagaaggatacccgagggccgggggtgggtggaaggacggggactggaaccctcgacccctgacgccccctccgctgtccaggctgtccagcgggctggccagatggggccgtgggacggggacgccttcccgactgaaagtgtccccgcggtgatccggaggatgagcccaccctgccctgtctcccactgcgggacccagccggcctcgaactcctggcctttgacgtctgctggctttggccttgggggtcctcaaaccttctggagagaggggacggtccgcccatcccccttctttcttctgcccagggaaacagagcctcttctaggaacccacttaaagcaccccccaacctacacagccacccctcttgtgcgcacccagcagctccccctacttcaccttccctgggaccccacctggtcattttatctgagttcacaggcccagcaccagcccacgagagaaccatattcgattctcttgtgacccagggtatcaggaactgcagcctggatgcaaaaagctccctttctgccatcacaagcagccggcacctaaggccacctagcaaatgctcagctcctcagccaggttttcttatctccacgtgctcctgcagctaataacgttaaaaccctagatttttgcctttttaagtgaaggcgcctctgtagtgaacacatgaatgtgtgcagcgtgtgttgaactgcgtcgtgaacactgcggaatatccacagcatctgtgccgttggtggaaattattcaccccccctctcccaagaacaggcagcatgaaggtgctccccagaggaccctctccccgagcctggccagggtttcaggcaggggatgaaaggcaggtcccaggctgcatccctcaccaaggaaagaagactcacatccagcctgcccaggagatgcctccttggggaggcacaattagattagaaagttagaaattccttagctccccacaatttgctgccatttccttccagttttgagcttgaacagccttgagaaaaccaccaagcatgaaggggcaagccctagatatgtgggtgttggggggtggttggggccaagaaaccccccagtccattaagcgggtgggattagatcctttgttcaaatattttcattgagctcctgctgtatgctggtcacaggccaggcactagggtattaatggtaatgactataataaccacagtggccagaggcttcctatgtgctaagaattttgtacgcacacatcattctcttctcacaccctatgacataggtgctgtcctcatcctcaaccacaaagcatggaggtcagagtccagaacagtaacagacattgtgcttggtgctccaggaacagaaagggggatgtctaacccagtgtgggggaccagggtactctaagagttctttaggaatcaagtaaagaaggggataggtgctccaagaagacgaactggctcctaccaaggcaaagagatgggaggatgctcagcttgttcaggaaactgaactcacttgccatggggtgcaaggtccctggaggaggtggagcagagatgtaggcggtgagcaagcagcaccctgaaatgcaaacccagggactagagcagtggggagacaccacatgggccatgcaaaggagtgacttgtacatggcttcttcaaaaggctgcagtgtggcacagatgagcattgcagaggagaaacctagaggcaaggaggccagtgaggagactttcatgctcacctaccccccacagaaggaagcaacaagggctagcacaaagtcactgggtggagtggcccagtggcaagcaaagcagctgctgtccacttcggggacatctgtggacacgcccctacccatacagggcacaaaactccagtagaaggaggagatttagcaggatgcaaatccctgatatattccaggaccattccagacatcctccatgcagcccagtacagtggttgatttgtaaacattaagtaggacataccgtgataataatgaccggtacccaagcaccagatacyatgctggaggccttatgtatttgttctcgtttattcctccccaccagcctaggaggtaggaactattaccatccccatcttaagtgaggaagttgaggctcagacagggtcagacaactatcaggatccagccgaggtttgaacctcagattctgttcgacctcaaattccatgtgcttcccactcctctgggaatttaggaggacattacaaatgtctgtctttgtaatgttgtcctgagcaggcattcaggaagaaagtattgaattcaatcagtgtcctctttaaatagcagtatttcttgaatatagtttcaaatcagtgaaatggagcccccaagacacggcaaagaaagttcctgagggcagaagccagaagcgcctgtctggcaacagcactagctcagtgcctggacaaagctggggtgcagcaaatacacagggattgattgtcaaaaacatactccttggtgcttagcaaaggtccagccacaggactgggtcagtaagttgcgggggatgagctgggatggcgttagtactcagtctgtgacagtgtgacagttgagtccacagcctcctagactgggatttggctaactcattgcagagcccctccaccttccactatcccaggctcccaacctagaaaggaatctgaatccagccatcagattccatcagagccccatccctggagctccccaaattataggaaacatgagcccgtcgagctcccgtggatggaccatgtccccgagttgtgctcaatgccctggaactccagaccctccaaagaatggtccgagcccctaagagcctccccttccaacactgaacttgagaagcttacggagtagcaggaagggcacggcggttcacgcacccttcactccccttgggctctcgcaggctcgttcactaaccagaggccagttcaccagacaaacctgtcattttctgcattctttgctggcggtgtctccttgtttgagccaggttccaaaggatgacgtgtgccctcacytgaactaccgctttcgttcaacagcccactgtggggtcaccccgggccacactggtggaggacccactcgatcaactcaatgctaggagctgggatgccaaactgaacagtaaagtgccttcatgggcacagtctcaactcgagttctctgaggtgtcccctgtagctaactcagaagggaaagacacacccgctacccaggctgccattaaggaatttgatgaggtggcaaagtacctgttggggaggagagcagtggagctgaggggcagcctaggagaggttgagctgaggcgccttccagcagccacacctgtaagtggatgttccccctgctcccatgagggcagcattttatgtgctatggatctgtagcacccagcaccgtccccagccctcaaataggtgctaataaacaggtgtttaacggaattaaataaaagaaagaatgaatgaagcgggcaaagtaaatgcatagtgattttcggttgaatggctggatctcgctgcgatgtcaatgtcctcacccctgagctacgtgacactgcttcattcattttcttttatttgattccattaaacatctgtttattagcacctatttgagggccggggacggtgttgggtactacagatccatagcacacaaaatgctgccctcatgggagctcagcaactattgtcatggggggtcagcaactatagtcaaggggccagattcagcccatggactccaaagcctaaaatattcactctctggccccttttcagaaaaagtttggcaacccttacaatagacataaataacttcaagaagagagataccggcaaaatgtactaaaataattaggaaacgatgagttgtattaccttttaaaaaatattattcatttaattgtaactttacataacttaatcttttttttaactggctgtttaacaaccagcagtctccagtggagatccactccagcctctgcacagctctctctccttgccccaccccaccatgaaatggtgcacaaaccccaatgcactgcactgtaccctccaagcgggcagggttcattctggttttgctcaccactgtatccagggtcgtgttcaatagtcagcmtgctgaaaaaaggaaagcctgatctataaagtttgacaatttccctggtgcaaatacaaccaccatggccaattattrtacaagctaccaacatgtgtccttggacatggagttaggaagacatgcaccccacggcagastttccaccacacagatacaatacaccagcaaggggccagattcagccatggactgcaaagcctaaaatattcactctctggcccctttacagaaaaagtttggcgaccgctacaatcgacataaataacttcaagaagagagataccggcaaaatgtagtaaaataattaggaagtgatgagttgtattaccttttaaaaatattatttacttgtaactttacataacttaattttttttactggctgtttgacaaccagcttgcaaaatttctgaaaaattaacaatcagctgtcatgagccattacagatcggcttcaggacaccgctgcttgtttctccagggcatgtcacaaagtaaaygcaccatgattatctgttgaatggctggatctagctgagasgccagtgtcctaactcctgagctacattaccctgcttcattccttcttttatttgattccattaaacacctgtttattagcaccgaattgagtggcagggactttgccggatactgcagctccatcacacatatgatgttgtcctcatgggagctcacagtcatgtgggaaagccagacgccctcacaaaaaatcatcacaaccgycccccaaaaaagtataccaagaaaaaaacaaactctctgctcttttgcttaccagctgtatgtgtctttgattgatttaccgtcaagtggagtcgtcatagtaccttcctcccaggtcgcagaaattcagtgagatgatcaagccgagcccagagtaagcactcacaatagtgttagctatttcacattaccaccgttattttagaacccgtattggcatgaccgtggcaacgggccttccatccagaccacctctctgaatctttcccattcgcccagcaactgggtatagacactctagacacagcatctctgcaggattggaagcagggtttccaacttgggctctattcacatttgggatggatgacactttgtggcaggcagctgtcctgtgcagtctgagatgttctgcagcatccctggcctctacctgttggatgctaggagcatccgcaagtcataacaaccaaaaatttctctggaccttgtagctgggactacaggcgtccaccgccactcccggctactttttttttttttttttttttttgtattttttagtagagacggggtttcactgtgttagccagaacggtcttgatctcctgacctcatgatccgcccaccttggcctcccaaagtgctgggattacaggcgtgagccaccgcgcccgcctttgtcacctaggaggcaaaatcacccctggtttcaaggaagatgtttatttctccctctcagctggcagaggatgctgtggtgtcagccacctcctcatcagtcatcctgtgggtcacagtctcrggagatcatattgttcacactcgtgccctgacacgttcctcctcagatgccacttatggggtctagtaacaaactggcttctagccaactttatcagaccgtcaaggaacatagggccccatacaatggaatgagatgcaacttgtattaagtcgtggttttggagtccgtttaatggcgtgaggccgtgtgtgtaataaaatgtcaggaaccaaaagcaggcaaaaaattgttcttaagcaatcccaattttgtatctacccatgacgctgttgcttttgggggattctttggaagttccatctgaaaactctgtctcaaaattacatcagccaggagagcattcctgaacctcatttataacaggaatcaggtactagcgtaagggaacagacactccgtactgatggcgtttaatgtgctgatcaaataayaaaatgtgctcattctcccggtgtaaaaagaggagtcgtgttttgtgaagttggtgaacatcctccttcctcttctgggctgatgtgaagccagcccattctctagctccagcagtgggaagggaggagaggggaagctgattcaygttcagccgcctgtgatgctggggagccgaatgatagctccccaccctctctgcttacaggagacgagggakggcaacaagggaacgtgaagtgccagcctctcccccttcccttctcactgtcaccaaataaataagtctggaatcgctgagaaagtactacagaggactcagtgctttcctagaactaatatttcttacaatcgattgattgatcgcttttcctacatacaccaaaacaatagtggttatctccagagagatgggattatgggcaaccctttgtcctatttatttatttagagacagagtctcactctgttgcccaggctggagtgcagtgacgtgatctcaactcactgcaacctccacctcccaggttcaagcgattctcctgcctcagcctccccartagctgggattacagacacccaccaccacatccagctagtttttgtatttttagtagagatgaggtttcaccgtgttggccagactggtctcaaactcctracctcaaatgatctacccgcctcagtctcccaaactgctaggattacagatgtaagccactgcgcccagcctcttttcctttcgaaatcaatgttatttttgtttggtttggttttgggggacttttttgaaacagtcttactctattgcccaggctagtgatatagcaaaactctgtctgcagtggtgygatcatggctcacttcagcctctacctcctgggcccaagcaatcctcccacctcagcctcccaagtagctgggaccacaggggcacaccaccacacctggctaattttttattttttatttgtgttttcatagaaacagggcctcgatatgttatcctggttgkacccaaactcctagactcaagcagtcctcccacctgagcctcccaaagtgctgagattataggtgtgagcctaccacacccagccaaatcaacgttactggagtatactttgcatgtaataagctgcacccatttggccagacacagtggctcatgcctgtaatcctagtactttgggaggctgaggcaggaagattgctggagcccacgagttcatgaccagcctgggcaatatagtgagaccccatctctacccccaaaaaaagaacccattttaaaasaatagattgacaagttttgacacatatatacacacatgtgaccatcacctcaatcaagacatggacctggaactttcccacagactcaaaaaataccttcctgctcctttatagttgatcccagtcacccactgccagccccaggcaatccttgatctgccctctgtcactgtagatagtttcaccctttatcgaatgtcatatacataataccaaaaagtatgcattccttttcttctgaattctttggctcggtatagaaggatttgagatttgtccacgttggtgtttgtatcgttgtctgttctgttttgttgctgactaatatatccatgacacagatattcctcttatgagtaagttttgttttcaattcattttaatttttttaatgccatttatttttaaagaaactcacagagactttatgaagagctcaaatgccaggctgccattgactcgtgaacgtggggcatggctacacagartggaaggccatggatcatatttttaaaaataaaaaacctgtggggctgggcacagtggctcatgcctataatcccagtactttgggagaccaaggtgagatgatcacttgtgtccaggagtttgagaccagcctgggcaacatagggagaccccatctctactaaaaataaaaaaaattagccaggcatggtcacacacgcctgaaatcccagctactcaggaggctgaggtataagaatcgctggaacccaggaggcagaggttgcagtgatccgagatcgcatcaccgcactgcagcccaggcgacagagcaagatcctgtctcaaaaraacaacaacaaccacaacaacaacaatccactgtgtttttcagattaattacatctgtctcccacaccagttttagcagtgaggctgctcaaattgaccaatttaaatgtgattgcctttctttcctctccatcatctctaagtcagttgccaagaagcaatgaaaggaaggaattggggaggagaagtggtttagacttgtggagcaggtactgatcttccaaaactcacccacacccccatttgcatgggtcagtctagacaatcctcagataaggatgggtgatgatatcaccccattttgcagattaggaagctgaggcaaggtcaagggttcaactaaaaccccacagcaacagcggggggttgggggtggtgcaagaaactccatccagggactccaggtagaaaagcaaagacatcaagaagacagaccttagatttgaagcccaggtttccatcatcttcagctgggttccgccaaccaaatctcttaatctctctgaacctcagactcctatctgtgaaatggagattgaattgtgatacaattgagctaagcagataatgcatgaaggtgctcaggacaagatgtcrgaagaagtcagttctcaatataatggtagggagaaatggcttctcaacccttgggctcctttcttgagctacagcatgaagttggaactgactccagcctgcctgggctgaggaaaaaggagtggatattttcttgtagctccagggagcagagcctcacagatgcaaagaagagagaagaaggcaggccaaagcctccagatgcctctgttgcaatagtaactaatcagagtggattaaacaaagaatagacatgggttgttaggagtcacgggtgcctcccagggccccagtggtgtgaaggtagccagcccaaaaggggccaaagatccaaggacccacggaccttctctgtactttatgtttctgtttatctctgggttaggctgacttaatttgctatgttacttttgcatgacaggaggtggccattggagagggcatcccagattgagctaggatctgttgagcccagttctgagggaaggacttggcttgggccagatacgcaccccagtcagtatctgagccaacctggacaaatgtggttgctggtgatcaacccctacaggtgaaaaggacagtcaagtgggtcattgcgaactgggcagggcatttcttcctcctattaataataataatggccgggtggccggacgcggtgactcacgcctgtaatcccagcactttgggaggctgaggcaggtggatcacaaggtcaggagatcgagaccatcctggctaacacggtgaaaccccgtctctactaaaattacaaaaaattagccaggcgtggtggcaggcgcctgtagtcccagctactcaggaggctgaggcaggacaaggacgtgaatccgggaggcagagcttgcagtgagcggagatcacgccactgcactccagcttgggcgacagagcgagactccgtctcataataataataataataataataataataataataatggccgggcgtggtggctcacgtctgtaatcccagcacttagggaggctgaggtgggcggatcacctgagaccaggagtttgagaccagcctggccaacatgatgaaacccccgtcactactaaaaatacaaaaattagccgggtgtggtggcacatgcctgtaattccagctactcaggaggctgaggcaggagaattgcttgaacccaggaggtggaggttgcagtgagccgtaatcatgccactgcactccagcctgggcaacaagagcgaaacactgtctcaaaaaataataataataaataataataataataatagctaagacccatatagggctcaccaygggccagccactttagtaagcaccttrcatgtatttaatcctacaaaatgattaacttaattaatcatttaaattaatccttacaaaaacttgatgaagtttatcttgtccgttgtgcagatgaggaaactgaggcacagagaggttaaacgactgacccaaaatcacacttgaactgggccaatctgataccaggcctgctctctcagccaccatgccatattgcctattttagcctcagtcatattttttttttttttttgagatggagtctcgctctgtgtcacccaggctggagtgcagtggcgcgcgatctcggctcactgcaagctccgcctcccgggttcgcgccagtctcctgcctcagcctcccgagtagctgggactacaggcgcctgccaacacgcccggctaatttttttgtatttttagtagagacggggtttcactgtgttagccaggatggtctcgatctcctgacctcgtgatccgcccgcctctgcctcctaaagtgctgggattacaggcatgagccaccgtgcccgacccgcctcagtcatattttttacaattcatctgttagcccatgtctctcaaaataaaaaaagatgaggaaggggaagtatttgagatgtgacatttcaccaaagcatttaacagccaacaacggaacacaggggcactttgctggccatctccctgtttttattttgacccagagttgagggagaaggcactgccacgttctcggggcatgtcagggtctcgtgcagccccaggacactcccactggcctgtgaccacctggggccgagatccgcagctgctaggctgttaccctgcatctgcatacagcaggtgctggataccgtttgtggttgcygagaaaatgtgtatctcgcactacagctttcaaagcacttccaaagacagggaaagagatcagttaaaatattgcccctgtgaaaccttcaagaaggtaattgatggaaggaattcacacaagggaggcccgcaaaagctgaataaccaggcctcacgggagcaggaaccgcggaatcatcggaaagcctcctctctcttgtgtttcttcctaccctctctgtgagcctgtccagcccctggccttcctgacaggctgcctctgcttctgtgtctggccccgggccccaataggccacttcagcccagttgcccagggtgaagtggtcacyatctgctggttttccacctctawatgtcgggataaggggtctgaagggcctgtgatctctttttttttttttttttttttgagacagagtctcgctctgtcacccaggctggagtgcagtggcgcgatcttggctcactgcaagctccggcctcccaggttcacgccattcttctgcctcagcctccctagtagctgggactacaggcgtctgccaccatgcttggctaattttttttttttttgtattttttagtagagatggggtttcgccgtgttagccagaayggtctcaatctcctgacctcgtgatccgcctgcctcggcctcccagagtgctgggattacaggcgtgagccaccgcgcccggcatggcctgtgatttctatacagccaggcctccccagtctcaggttcccaaccccaggctcaaagaggaaagtcatttgcccaaagtcttccagagagacggcctcaaagccaggtttctgtatcagttccatggagctgccgccaactagggggctttaaacaactacaagaaatttattttctcatagttctgggggccagaagtccaagatcaagatgttggcaggctggttccttctgcgggctgtgggggaagtgtctgttccatgcctctctctgctggtgatctttggcattccttggcttgtagacagacacatcatcgcaatctctgccttcatgctcaaggcgttctccctgtgtgtctgtgtccaaacttcccctttttataaggacacagtcatcggatcggggcccaccctgctccagtatgacctcatcttcacttattacatctgcaaaaactttatttccaaaaaaggtcacatgctgagggctaggacttgtattttgggagcgcacaatccaatccatagcagagcccaaagcccaccacagcagtgcatgtgttctgcccccagcccggctggttctccgtaagcacaccctgctcgccgggcctccattcagcccccagggcgtcgctcacccggttttatctgggacaggcatggacccaagtctgccctactgtcctcgagctcacactagaatattcacagggagcagtcatgatttctgaggctccactccgggtgccatgggcgggacctgactcgactttgcgctgagcacttaggacagctttgttcagccggacggcccattgtctgtttcccaaccacgctccagtttcatcaggcaattttagaggcattaaacctgaacagctcacaaaggactaatgagtttcattcagcgtggatgacaatgacccgtgaatctgagctggacagtgtcccctctgcctgagtggtttcacaatagcagtggttgacaggtggctgggtcctgggccagggattcaggcaagtagtttacttctctctttattcatttttttctattttgtttggctaaaaatcttaagcagattttactcaggggttaactaggcaaatctctctcaaaggttagttgcagctgagaaaccctagatctgtatgaaagtgggaaagctgactcatttctttgaccatgacagacaccaccaatcaatcgtggactcaaccctgaaggccacaggggactggaatccaggcctgtgtacattagattctgtgttcatttcataccattatttggtgacttgcaggatttttttttttttgaaacagattcttgctctgttgcccaggctggagcacagtggcaccatcttggctcacagcagcctctgcctcccgggttcaagcaattctcctgcctcagcctcccgagtagctgggattacagggstgcaccaccacacccggctaacttttgtatttttagtagagactgggtttcaccatgttggccaggctggtctcgaactcctgagctcaagtgatccacctgcctcggcctcccaaagtgctaggattacaggcgtgagccacgatgcccggcctttgtttttttttgtttgtttgttttttgtttttgtttttttttttttgagacagggtctcgctcttttgccctggctggagtgcaatggtgtgatcatagctcactgcagcctcaaccttccaacctcaagcaatcctcctgcctcagcctcccaagtagctgagactataggcttgcagcacagactgggctaacattttttgtttgtttaataaacaaaacgttttttgtttctctaacattttttgtttaacaaacaaaatattttttgtttctctcacatttttttttgttttttagtagagatggggcttcactrtgttgctcaggctggtcttgaactcctgggctcaagagatgctccttgctgggcccggtggctcatgcctataatcccagcaatttgggaggccgaggcaggtggatttctcaagatcaggagttcaagaccagcctggtcaacatggtgaagccccgtctctactaaaaatacaaaaaaaactagccgggcatggtggcgggtgcctgtaatcccagctacttggaaggctgaggcaagagaattgcttgaacccaggaggtggaggttgcagtgagcagagatcacgccatggaaccccagcctgggcgacagagttagactccatctcaaaaaaaaaaaaaagagagatcctcctgcctcagcctcccaaagtgctggaattataggtgtgagccaccatgcgcagcctgagcacggaggcaactcgcagctttgagtctgtacttggtatttacctctttgaaaggagaagtgctaaaggggccatcaatacatactaattctagcagccatgtcactcttacttatccccaggaagagatcagcaagctagaacatttttcttgccagggctaaaaaaaaaaaaattttaaatctataggggtcttctggggtacccctatttttttttttttcagacagagtctcactctgtcaccaggccagactgcagtggcataatctcagctcgttgcaacctcggcctcccgggttcaagtgattctcctgcctcagcctcccgaatagctcggacgataggcacctaccaccatgcccagctaatttttgtatttttagtagagacagggtttcaccatgttggccaccatggtctctatctattgacctcgtgatccaccagcttcagcctcccaaagtgctgagattacaggcgtgagccattacgaccagccccaccctgtctcttttgcaggtagggagaactaaggctcaaagaagggaagaagaagccttccccaagaccacacgggtgacagatggcaaaaccaggttcggcattcctggcsccccagctcagacctcccccaactgatctcctccttttttcctctggcctctgatggagcctgccaaaggcctgtgtatttctcacctgcctgcttatcatctaagttagtggtgacaagtccctggggaggttcattttcctcctgttccatctgccccagccccttgaaaccctgctgcgcactctgccttgctccctgatgatgtgtgctgttgcttccaccagctcttgggagttctgcaactttccacacctttcctggtgctttctctgggcctccctcctggtgtcaccatcctcagccctagagaaggctctgagccttgtcccttgccctggttccactgcagccatttccctggagcccctctggctcaggttcgcactcccttcccccttgctccaccaccttcagctgcccgatgctggcaaatcttcccattggccaattgcctggggcaagcccagcaaagagtgcagacaaaccccctggtggccacaaaacaatgtggccataacaagtctaggaactctttaaaaaaattttttttttcaaaaatgatatatttttggccaggctctcacgcctgtaaccccagcactttggggagccgaggcaggcggatcacttgaggtcaagagttcaagaccagcatggacaacatggagaaaccctgtctctactgaaaatacaaaaattatccaggcatggtggtgggcgcctgtaatcccagctactcaggaggctgaggcaggggaattgcttgaacccaggagtcagagattgcagtgagccgagatggtgcaactgcactccagcctgggcaacagagcaagactccatctcaacgagaaaaaagagagacttttttacttggaaaaataagaagatacagataaattaaaaagccaataataatcagttcaagaatattaattaggtacatactatagtctaaacactatgtacttagcttatttgrtcctcaaaataagagaaattctatagggcaatgacatagtgtcttcaacaaataaatggcaagaaaaaaatgtgaaagggggatagtattttggatgaaaagagacttaaaaggattatggactgtagagaaacaggcagatggatggaggacagaacagctgcagtaatgggttaatagctgcgtctaggggcttattcaggtgctcgctgtagaattcattcccgtttgctgtagattgaaaattgacctaataaaatgctggggtttggaggaggatctatcagccgaacataatgtgagggctttgtggatcttgattgaaacaaatcacatgtaaaaagacatttatgggataatggaggatgaatgaacagtgattagatattagatgttattaggaaattgcttagaaaaattatacgtacgtgtattaatgatatcatagaaattttttaatttttaacagagtctccaggcttgggatttgcttgaaaataaccagtagggatgaggctggggaggtagagatgaaacaagattggcaattcactgataattgttgaagatgggtgctggataatggaggttcattaactattccttcttcttttgtcaacagctgaaaattctgataataaaaaattaaaacctgggcaacatggcgaaaccctctctctacaaaaaacacaaaaattagcggggcatggtggcgtgtgcctggaaccccagctgcttgaggggccgaggtggggggatcacttgagcctggaagatagaggctgcagcgagttgtaatcaagctgtgatcatgccactatgctccagtgacagaatgagaccctctctcaaaaaacaaaacaaaacaaaacaaaacaaaacaaaamaaactatgaggtaggcgctattattttgcagcygaggacactgaaatgaggtctagaggtgtcgagtaatttacccaagattccctctgtcaccacatccctgaatgtagattaaaaaaaaaaaaaattcctgcctgtcatcccatcacctcctcttaacatcttgatggagatccttctagatctatgcatataaaaggactttaaatggctagaaaatgtacatactgcatgagtctacccttgtgcaccaccaatgacgctagtgtgtccttgagcataaatttctgatgtagagctacgaaaaggaagtaacacatacggagcgcctgttctgagctaagcactctcactgcaccacttagaagagcctcattaatcctccrgcaactctggcaggtgagcaccatggtctccatttttacagagaaggaagcaaactcaggaaggagaactgccttgcccaaggtcacagcgctaataattgatgtagagtcaagggttggtgatgggacttgactttattaaacacctgcttctcctcttgactgtaaccttcaggaaggcggccatcttgtctgctttcttgggcctgttgtcctggagcctgaacaggattaataaatattcctggccggatgcggtggctcacgcctgtaatcccagcactttgggaggctgaggcgggcggatcacgagatcaggagatggagaccatcctggctaacacggtgaaaccccgtctctactaaaaatacaaaaattagccgggcgtggtggcaggcgcctgtagtcccagctactcgggaggctgaggcaggagaatagcgtgaaccggggaggcggtgtttgcagtgagctgagatcgcaccactgcmctccagcctgggcgacagagcgagactccatctcaaaaaaaaaaaaaaaaaagattatttgaatgaacaaaggcactaaaaaagagctctagctgggatttgaacgtccttcctccaatctaatagcatactaggagtcctttctaaagaactgtggtaaaacacacataagaaaatttaccatcttgagcattttaggtgtacggttcagtggcattagatacattcacactgtcatgcaaccgtaagtaccttccatctccagaacttttctcatcttgcaaaactgaaattccatgcccgtgaaacagtaagttcccattcgcccatcctgtagcccctggcaatcaccattctactttctgtctccatgaatttttttttttttttttttttttttaaataagagacagtcttgctctgtcacctgggctggagtgcagtgacacaatctcggctcactgcaacctctgcctcccgggttcaagcaattctcctgcttcggcctcctgagtagctgggattacaggtgccctgggattacaccacgcctggctaattattttttgagatggagtctcgctctattgcccaggctggagtgcagtggcgcgatctcagctcactgcaacctctgcctcctgggttcaagcgattctcttgcctcagcctcctgagtagctgggactacaggcgcgtgtcaccacgcctggctaattttttttgtgtttttttttttttttttagtagagatgtggtttcaccgtgttagccaggatggtctcgatctccttacctcatgatccgccttcctcggcctcccaaagtgctgggattataggtgtgagccactgcgcctggctataatttttttatttttagtagagacggggtttcatcatgttaggatggtctcgatctcctgatctcatgatctgcccaccttggcctcctaaagggctgggattatggatgtgagccaccgcacccagcctccatgaatttgattacactgcctacctcatgtcagtggaatcatacagtacatagctttttgcgactggagtatttcccttagtacaatgtcctcatggttcacttatgatgtagcatgagtctgaatttccctcctttttatggctgaagaatatcccattgtatggatagaccagaatttgtttatccatttgtccatcaatggacagttgggttgtttccaccttttggcttattgcgaatgctgctgccatgaacatgggggtacaaatatgtcttggagtctctgtttgcaattcttgttgttatatacccagaaggggattgctgggtcatgtggcacttctgtttttctaggcacttcttttaattaattttttttttgagacagattctcattttgtcacccaagctgaagtacagtggcacaaccatggctcactacagcgtcgacctcccaggctcaagtgatcctcccatttcagaccctcaagtgcctgggagtacaggtgtgtaccatcacacccggctagttttatttttattttttgtagaggtgaggttgttgcctaagctggtctcaaactcctgggctcaagtgatcttcctgcttcagtctcccaaaatgctgggattacaggcatgaaccacctcacccagcctgagttaatttttattccgtattttttgcctaaccatagcttttctgttgccatgttttttgtcattttgatgaccacacatgggtctcaggaggttgaatgattcctgtagtctttgtggaagctgcccctcctctaggaacctccttcctgtctgtccctggtggtgagtcctgcttcagggactcaactcatccttcatgactccaaggactagctgagacttctgggtaacacctgggattccccttcctgcccacttcctgtttgacattactcaatggtttgggccatcacgtgttgaatgttccctttccagggaggacaacagcttctgtcccttttttttttttttttcactttgtcacctgggctggagtgcagtggtggtgtgatcatggctcattgcagcctcaacttaccaggctcaagcaatcctcccacctcagcctcccaagtagctgggattataggtgtgtgccacgatgcccagataatttgtaaaatttttttgtagagacagggtctccctatgttgcccaggctggtcttgaactcctggcctcaaggaatcttcccaccttggcctcccaaagagttgggattatagatgtaagccaccgtgctcggcaacttctgtctcttgctctctactctctccttccccgtttatttcacattctctcactaatgttgcatgaataaatgttattgaagtaattaagtaattacctcctctcctgggggttgtttccaactttttaatataagtaacaatgcaacaacaaaragaggtaatttttttcccctatactcatgaatcattttcttaagataaatttctaagagtgggagaackcatcactgcacttgtgggagcaggaggaaattttaaaaaatggcagattgggcaaaatttatccaataaaggagctggaaggaagtgcacggtgtcaagggaacatggttgttgaaggagcgctytcccaccatcgtcactaggagctttccttcccatttcacaaacagwtcctacagtgggctgaatgttggtttccccctcaaaagatatgcccactcagaatctgtgaatgtggccttatttggaaaaagggtctgagcaaatggaattaagtgaaggacctcaagataaatcatctttrgatggactctaaatctgatgacaagttattagaagagcaggggaaacaagaccgaggcccagggaagaaggcaaaggaagacagaggcagagccaggagtgatgtgtccacaaccaaggaatccaaggcccccggaagctgggagagaggcgtcgagtggtttctccctcagtgcctccagaagaaaccaaccctgctgacaactttgtttattctttttaaaaatttttttaaatgtttagttttcatttttttggatacatattaggcatatatatttatgggttatatgagatattttgatacaagcataaaatgtgtaataatcacatcagggttttttccatttaaagctgtgctatagtgactttatgtgtattttttctatacaagcattttttaactaatatttatttatttatttttaattttttatttccatagatttttggggaacaggtggtacttggtttcattagtaagttctttagcggtaatttgtgagatttggtgcacccatcactggagcagtgtacaatgaacccaatttgtggtccccaaagtccactgtatcgttctctttttctttcttgaggcggagtctcgctctgtcgcccaggctggagtgcagtggtgtgatctcggctcactgcaagctccgcctcctgagttcaagcaattctcctgcctcagcctcccgagtagctgggactacaggtgcccgccaccatgcccggctaatttttttgtatttttagtagagttggggtttcaccctgttagccaggatggtctcgatctcctgacctcgtgatgcacctgcctcggcctcccaaagtgctgggattataggcgtgagccaccgtgcctggcccactgtatcattcttatgcctttgcatcctcatagcttagctcccacttatgagtgagaacgtatgatatttgggtttcaattcttgagttacttcacttagaataatgacctccagtctcatccaggttgctgtgaatgccattaattcattcctttttatggctgagtagtattccatcatatatatatatatatatatatatatatatatatatatatacacacacacacatatatacacacacacatatatataccacatatatataccacatatatatactgtatatatatatgtggtatatatatatacggtatatatatgtggtatatatatatatggtgtatatatatgtggtatatatatatatataccacagttcccttgtctacttgttgattgatggccatttggttacacatttttgcaactgcaaattgtgctgttataaacatgcatgtgcaagtatcttttttgtataatgacttttttttgtttttcgagacagagttttactcttgttgcccaggctggagtgcaatggcatgatcacagctcactgcagcctctgcctcccgagttcaagtggttctcctgcctcagcctcccaattagctgggattacaggcatgtgccaccatgcccagctaattttgtatttttagtagagatggggtttctccatgttggtcaggttggtcttgaactcccgacctcaggtgatccacccgccttggcctcccaaagtgcggggattacagatgtgagccaccactcccatccgtataatgacttcttttcctctgggtagatatccaggagcggaattgctggatcaaatggtagatctactttyagttstttttttttgagatggagttttgctcttgttgcccaggctggagtgcaatggcgtgatctcagctcactgcaacctcctcctggattcaagtgattctcctgcctcagcctcccagtagctgggattacaggactgcgccaccacagttggctgatttttttgttttttgttttagtagagatgcggtttctccatgttggtctcgaactctcaacctcaggtgatccgcctgccttggcctcccaaaattctgggattacaagygtragccactgygcccggccttacttttgttctttaaggaatctccacactgttttccatggttatattagtttagtataactatgttttccatggttatactagtttacattccctccacctgctgacaacctgattcggatttgtggcctcctgacttgtgagagaatacatttttgttacctgaaggcataaagtttgtggaattttgttccggcagcctcgggactctcctatagtcctcatccctgcagcccctgccagaagaatgcggccaccgctacaggtgccagctggactcacccttggggcaggcaagatgcttcctggtgatgagtgccccacccttcggagggaaacactggagcctgcagggcagaggacaagcctcaggccatcggggagagcagagcatgaaacggggtggtggcagcctctggcacggtacttgggaaactaaaattagactattttcatatgccacacacaaatgaattccgggcggatggaggccaaaatgtgggaaacaacacttgaaaatatttagtagaaaatgtaagacaatatttccataaccttggtatagggaggcatttcttaaacaagatgagccttgaagcttgaagcatttgactatattaaaattayagaaaaaaaacccctgaacatcaaagggtaccataaacaagtaaaaagacaagctctagaccagcacaaaagtctagcaatgcaaattagtaaccaggatttacaaagaagccctgcaaatcgatatgcatgatcaactctcaactccaactgcaaaatgggcagatatgaatagggaattgcccaaagcagaagcaataagatatgaaaagattttcaatctagtctgggtgtggtgagatcatgcttgtaatcccaacacgtaggaggctcagacaggaggactgcttgagctcaggagtttaagaccaacctgggcaacacagcaagaccctgtctctacaaaaacttttttttttaaattaagtgggcatggtggtgcgcgcctgtggtcccagctgcttggaaggtggagacaggaggatggcttgagcctgggaggtcgaggctgcagggagccatgattgtgctattgcactcyagcctgggtgacagatcaagaccctgtctcaaaaacaaaaaatgattctcgacctcactaaaaagtattagggggtacaaattaaacgacagtgatactccattgcatcttcatcagattgatagaaaataaaaagtttgacacagccaaagaccggtgagaactggagaggcctcgctggcagatggacatcagcagtggaagtacttcctycacctggtcttatggactgaactgtggcccccaaattcaaatggtggagatctatccctcggcacctcagaatgagaccatatttggaaatagggccttgaagaggtagtaattaaggtaaaataaagccgtatgggtgggttctgatcctgacatgtgtcctaataagaagaggaattaggacacagacacacagagggaagaccacgtgaagacagagggtgaaggggccatctgcaagccagggagagaggcctcaggagcagccaaccctgcccacatcgtattattattattatttttttaaacagagtcccacgctgttgcccaggctggagtgcagtggcgtgatctcggctcactgcaacctcttcctcccgagttctagaggttcttgttcctcagcctcccgagtagctgggattacaggctactcaagcacgcaccaccacgcctsgctaatttttgtatttttagtagagacagggtttcaccatgttggccagggtggtctcaactccttagcctcatgtgatccacctgcctcgtcctcccaaagtgctgagattacaggtgtgagccaccacgcccrgccccctgcccacaccttcgaccaaaacggtgagaaaagaaatttccggtgtttaagacacctagtctgtggtattttattatggcagctcttgtcaactaacacaccttgtaaagttaacaatgttcaaataatcttccctgcaatttagctcttasatataaatgttaggcctttgttactcaaactgtgattcctgaactggtagcatccacgtcaactgcaagctccttagaartgcagaatcttggccccacgcggacctcctgaattggagcccgcattttaactttgactttttgtttagttttgtttgtttttgagactgagattcactcttttcacccagcctggagtgcaatggcaccatctcagttcactgcaacctccgcctcccaggttcaagtaatactgcctcagtgtcccaagtagctggattttacaggtgcctaccaccacaccaagctaatttttatacttttagtagaggtggggttttgccatgttggttaggctggtcttgaactcctgacctcaggtgatccacccgcctcggcctcccaaagtgctgggattataggcgtgagccaccacgcacttttttttttttttttttttttttttttwaaaaagagatgcggtcttgctgtgtagcccgggctgccaggctggagtgcagtggctattcacaggtgtcattgagctgtaaagcctcgaattccttggctcaaataatcttcccacctcaacctaacttcgacttttagctagtgattctttttctcaaactttatttatttatttacttattttttaattctttgagacagagtctcactctgtcaccccggctggagcgcagtgctgcgatcgatctcggcccactgcaacctccacttcctgcctcaagccatcctccagcctcagtctccccaggtagctgggaccacaggtgtgagccaccatgcccagttcattgttgtattttttatagagatgcggtgtcactatgttgcacaagctagtctcaaactcctgagctcaaggcgatcagcccacctcacctcctaaggattacaggtgcaagccaccacaccaggccttttctcaaactttaatattcacacacatcacctgggggtcttgtcaaaatgcagattctgtcaaagcactattcacaatagcaaagacatgcaatcaacctagatgcccatcaacagtggactaaataaagaaaatgtgggcctggcgcggtgactcatgcctgtaatcccaacactttgggaggccgaggcgggcagatcacctgaggtcgggagttygagaccagcctgaccaacatggagaaaccctgtctctactaaaaatacaaaattagccgggcgtggtggcacatgcctgtaatctcagctatttgggaggctgaggcaggagaattgcttgaacccgggaggcagaggttgcagtgagccgagacrgtgccattgcactccagcctgggtaataagagcgaaactctgtctcaaaagaaaaagaaaaagaraaaaaaagaaaacgtggtacacatgcaccatggaatactatgccaccataaaaaacaacaaaatcaggcccggcgcggtggctcacacctgtaatcccagcactttgggagaccaaggtgggcagatcacgaggtcgggagatggagaccatcctggctaacacggtgaaaccctgtctctactaaaaatgcaaaaaattagccgggtgtggtggtgggcatctgtagtcccagctactcgggaggctgaggcaggagaacggcgtgaacccgggaggcggagcttgcagtgagccgagattgmrccactgcactccagcctgggcgacagagggagactccatctcaaaaaaaaaaaaaaaaaaaaaaaaaaagaacaaaatcatgtcctttacagcaacatgggtggagctggaggctattatcctaagcgaagtaatgcagaagtagaaaaccaaatactgcatgttcttatgagtgggagctaaacattgagtacacatggacataaggaaggraacaacagacaccagtkcctacttgagggtggagggtgggagaagggtgaggattgaaaaactacctgtcacttattatgctaattacctgrgtgacaaaaatyatctgtacaccaaacctccaagacacaaaatttacccatgtaacaaacttgcacatgtaccccttgaacctaaaataaaagttacaaagaagtccgggtgtggtggctcacgcctgtaatcccagcactttgggaggctgaggcgggcagattgcctgcagtcaggagttcaagaccagcctggccaacacggcgaaaccccgtctctactaaaaaatacaaaaattagccaggtgtagtggcgcacactatagttccagctattcaggaggctgaggtaggagaatcgcttgaacctgggaggcrgaggttgcagtgagccaagattgtgccactgcactccagcctgggcaacacggtaagactccatctctaaaaaaaaaaaaaaaattggaaggaaaaaaagaaataaaacaaaatgcagattctggtctggaaggtctgggrcggggctgagactgggcatttctcacaagctcctggggctgctgctggtctgagaaacgtacttggaggcacaaggaacaaagccaccatcctccacccagccctgactgcacgctgtgacagaggactgtacctgggcctcccaaaggctaattaaatgagactccctgggttggggactgggctttggcattttttaaaagctctcagaagattctaaagtgctgctgagattgggaagbgctgtcttagagctgtgagtcacctgggaggcccccaaagctcacaggggctcgggcatcttggggcagactacgacatggccattgtagtttcctctagttcccagatgaacccatgtgccctccccgctgccacaacttttgagagccactctagagcagtggttctcaaacttgagcttgcatcagaacccctggaggacccctgaaaacacagattgccaggccccgcccaacagtgtcagcaggtctgagctgcagcctggaaatgtgctttgctaacaaaatcctagctgctgctgctgctgccgccggcccgaggaccacactgtggcaacaagctctcggatgctgcttgaatcagtgcccaaagagactgtttcaaatattcactgaagcgtttttgaacgttaaaaaatgagaaatcatccatgtggccattgttatgggttgaatggtgtcctccccacyaaagatgtggaaatcctaagcagagtatctgtgaatgtgatcttatttggaaacagggggctggacgcagtggctcatgcctgtaatcccagcactttgggagaccgaggcaggcagatcacctgaggtcaggagttcgagaaacatacagtgctaggtggtgaaaccccacctctattaaaaaaattaaaaaattagccaagtgtggtggtgcrtgcctataatcccagctacccaggaggctgaggcaggagaattgctggaacccaggaggtggaggctgcggtgagttgagatcccaccacagcactccagcttgggtgacagagggagattccgtctcaaaaaaaaaaaaaaaaaaaaaattagcccagcttggtggcggatgyctgtaattccagctactcagaaggctgaagtatgagaattgcttgaacccgggaggcggaagttgcagtgagctgagatggcaccaccgcactccagcctgggcaacagagtgaaactgtgtctcaaaaaaaaataataaaaaaaaaawaggcaatagggtatttggaggtgatcaagttgagtcattaggataggccccaattcaatatgcctggtgtccttatgaaaagggaaattttggacacagagacagaaatgcatagaaggaaacgactgacaggctcaggggggatgccatttccaggccagggaatggytgaggctacctactggaacccaggggaggcgtgaaacagatcctctctcgctgcccgcagaaagaagcagtgctgccggcacctgactgcagtcttcagcctccggaactgcaaggcagcacgccgttgttgctcgggccacccagtgtgtggtagtctgttacggttgccctgggaaaccaacacagccatctcccaatgaatgactcgttaattatggtccaacccaccccatggaataccctaggacagtggaagtgacccacagaggcaacaggcagggtgacccaggcaggatgataccacttacataatgctccatctggttactgcaaacatgagcgagtattaacaatataaaaacacgcacacagggaggggaacatcacacaccggggcctatcggggggtcgggggctaggggagggatagcawtaggagaaatacctaacgtagatgacaggttgatgcgtgcagcaaaccaccatggcasgtgtatacctatgtaacaaacctgcacgttctgcacaggtacctcagaacgtaaagtataataaaaataaataaatgaataatttaaacaaacaaaaacatgcacgggaagagaaataccaggttttatctggagagyggtgacacgtccctkgagagagaaaacctrgatgtaaaagaaccccttgaaatcaggggtttccgctgtattctataatgttgtgtttcttggaaaggattgaaaagaattagatagaattcatttgattaacaaatactatttcagtgcttactgagttggggcagggcttagccccatgcacaattgcatccaagaatccagggttttgctctgttgcccaggctggagtgtagtgatgtgatcacagcttactgcagccttgacactcccccaccactttcccgccccccacccccaccccgccacttcctgcctcccccccgccctccctccccccgacccaagtacctagactcctgggttcaaacaaccctcctgcctgggtctcccaaaatgctgagatgacaggcataagcaactgtgctgggccaggaaatgcttctcaattcaagatccctctctaggaacataccactgccttctcctctccaaacaatgtgtttttccacacataaggtgagtttcagaaagcagcagtctactcacgtttgcaagcacacacacacacacacacacacacacacacacacacacacttcaaaaagaacaacacaacaaagcaattttctcgccgcactttttttttttccgtaaagaagcagacaattcagatccctctttcgcatcatggtaatagaaaagaacaaaaacacaccaaagaaagaagccgacagcaagacaaccaggcatttccactgaacaagacatgcaaatcccggaacctgcagaccctgaaggcccatgaggaaatgcaaagaataaacaaactcatgggaaatcattcaatgagcgtggccaggatccccacccccacgtataccaggagaaccagggcagggttgcttctcgggagctgaagtgggctctgagggtccctgcctgagctgtcagctcagaaagccaagaaagaggcaagccctggaaaaactgcacttgctctatggagcaagtcaccgtcagaggccaggaggctggggtgtgggtatgagaccaggcagaaggaggttggccaggggatccccygtgatggtctcagagacagaccatttgtgagtgcccagcaatgaggcagtagactagcaatgaaactgagatttaagcaccattttattctatttgtaatttctttctttttttttcctgtttatttttttttgagacagtctcactctgctgcccagactggagtgcagcagcgcaatctcagctcactgcaacctccacctcccaggtccaagcgactctcctgcctcagcctcccaagtagctgggactacaggcatgcaccaccagacctggctaattttttgtattttcagtagagatggggtttcaccatattgcctagactggtctcgaactcctaagctcaagccgtctgcctgcctctgcctcccacatctatttgcaatgttttgaataacacccaaggccaagaagatgcagtggaactggacgatgaaatttacatgcaagcaggagctgaaccatcctttaattcactcagcgtctgtttagtgagcacctaccatgtgccagcctgatgccaggcacgaggaagctgtgtgatgaagggctcacatggtgtccatgtgtggggcawccgggtccctggcatttggcagcctctgatttgccacttgtgtttagcagccgtgggtacaaagtagggggcccagagtctgtgcagctgccctttaatccagtcggctcatttaccacgcacagcaagtctctgggcagaggcagcattatttgccttttactaggaagaccagcttgttctgatttgcctgggtcttgcctggttttagcacagaaagtcccacatcctggggacccccttaagctgagaaaacagggacaattggtcactctgcattttccagatgaggaaacaaggttagggaggtaaagggattggaccgaggctaatttgctgagtaagggttgaaagccaggccattgggttttgtagtggcctaggaggggaagacagacaaatcaaagaccatgcgccacctcaaggaagcccccmgtgtgttatttttgatgaaagtagctgatgctcagtgctggtcaggactggtgagtgaggcaggaccaggcggaccctgtgtcagtatcgagctgactgtctccttggaaaagcaatttggcaactcgtattaatgctgtgaaattgttcatactctttgactgaataagagtatgcttggacacctattctaatgaaattatccttttctttcttgtcaaaaagctatcagaggccaggcgtgatggctcacacctgcaatcccagcactttgggaggctgaggcaggcggatgacttgaggttaggagttcgagaccagcctggccaacatggtgaaaccccatctccactaaaaatataaaaaaaattggctgggcgcggtggctcayacctgtaatctcagcactttgggaggccaaggcgggcggatcacaaggtcaggagtttgagaccagcctggccaatatggtgaaaccccgtctctactaaaaatacaaaaattagccgggtgtggtggtgggtgccggtagtcccagctacttgggaggctgaggcagaagaacctccaggaagcggaggttgcagtgaactgagattgttctactgcactgcagcctgggtgacagagcgagactcagtctcaaaaaaaaaattatatatatatatataaaaattagccagtcatggtagtgtgtgcctatcatcccagctactcgggaggctgaggcaggaggatcacctgagcccaggaggtagaggctgcactgagccaagatggtgccactgcactccagcctgggcaacacggcaagactctgtctcaaaaaaaaaaaaaaaaaaaaaagctatttggaaagaaaatgttctctgcagcactatctggaagagaaaagaaatgttaagagcccaggtaggtcaatggctccatacagcatgagccctctgcctccatgattacacagctatgaaaatgtcactttgatgactgtgtagccacatggaacactcttaggatagaagcagtatcttatggaacagaaaaagaatgatgcatgccttgggtgcctgcaactttgtaaaatgcttctgattgagggcaaggctggaacagattacgctgaatgggaggtgytgtgggaataaaggaaggtttttagaagttataagtagtggctgggcccrgtggccctcaccttccagcaccttgggaggctaaggcaggaggattgtttgaactcagaagtttgagaccagcctgagcaatgtagtgagacctcatctctacaaaaaaactttaaaattagccagtgtggttgcacacacctgtggtagcaggtgcaccctggaggctgaggcaggaggatcgcagtgagccgtgatcgtgccactgcactccagcctgggcaacaggagagaccactttgcctcaataataataataacaataataataataataataaataaaataaaactagttttacatcccattatactttcttttaaaaagcatggaaggaaagctaggaatcytaggcttctgcatgtggrcaaagatatcatttgcaaaatggtcttggctgcactggtggaaatagtaaatgattggaagcaacctgaattccatcaagagaagaatgtttaaataaaaaacttattcttccatacagtgagtgctactaaaaacaatgacgccaggcacagtcgctcatgcctgtaatcccagcactttggaaggctgaggtgtgtggatcacctgaggtcaagagctcaagaccagcctggccaacatggagaaaccctgtctctaccaaaaatacaaaaattagccgagtgtggtggcacgcgcctgtagccccagttactcagsaggctgatgcaggagaatcgcttgaacctgggagagggaggttgcaatgagctgagatcctgccactgcacyccagcctgggcgacagagggagactccatctcaaaaaaaaaaaaaaaagaaaagaaaaacccacaaatttttacaaattaaaaatcaaacataaaaaataatsgtgggacagcagattcgcctaccaagagctaggggaatctcatgttaaaaaatgctttgaygtgcaatgaccaaaaagaggcttttgtgtttagcacacamaaaaaagctggtacacaggaattcccaggaactttccagcagcagttgggattttggcagggatcacgcamgcctgcctgccggggtgggggtggggatggagcctgcatcctccacgcctgccacaggcaccagcactgaccctgaacttggtttgctttcagcctgtgccacaatctgctgggtctggaaggaagaacagggatggacccggcagagaggaaggggcagaggaaaggcttttctaggcaaagcgaaccgcacatgcataggcaaagaaatatgggggaaaggaggtatagaatatccaaggagttactggctgtggctgggagggcagcatagtggcagctgaagaatgtgaacatcctcctggccacctgcagagccctagccagccactcaccatctgcatgctctcccctctaaaaggcagcactactgtggtctgcctacaacctcgagcaggtgctcggaagctcaaaagaggtgatgggaatgtcttattaattgcaacccactcccaaaatatttttatttttattttttttgagacagtctcgctctgttgcccaggctggagtgcaatggtgtgatcttggctaatggcaacttctgactcctgggttcaagtgattcttctgcctcagcctcccgagtagctgggattacaggtgcacgccaccacgcccggctaatttttgtatttttagtagagacggggtttcaccatgttggccatgctggtttcgaactcctgacctcaagtgatccacctgccttggcctcccaaagtgctggaattacaggcgtgagccaccatgcccggcctcaaaggattattcttgtttgtttggttctttaagagttgagatctcactctgttgcccaggctggagtgcggtggttcaagtgatcctcccggcttagtctcctgagtagctgggactacaggtgygtgccaccacgactggctaattttgttgctgttgtttgtttgtttttgtaaagacagggtctcactgtgttgctcaggctgttcttgaacygctgggctcacacartcttcctgtcttggcctcccaaagtgctggaattacaggtgtgagccactgtgcctggcccaagagattgtttttattgtgattgttctcggaatcttrttgaggtttgataaagacacyggatgtcatggagctcatttgatccaaaaaacagttctttttttattcattcactcaacaaatatttactgagagcctactatgtgccaagccctgctctatgtgttgggttagagctcacagagacacacatcaaatcgaagagatgaaatcacaagtatattaagtgttgctaaatactaaggagaaaacttaaatggaaatggaggacaggaagtgagaggttgtaatctgagattggactggtttctatcatccccaaaggcatctcgcctttgaggcacaaaagtgctcaaaaacacagttgttggatgaatcttaaagtatcaaaatcccagragaccttgaagatcatctccttccaaacattcagtttacaggtgggaaactgaggctcagagaggctaaagtgtggcttgtagacattgagtgacccaggaaggagatgcctgggccccctgcttctcccaataccccctcttgwtcctcgtctgtggcaaccaaygcagggygactccagatctgcttgggactagaaaggagctgaagtcaatagagccagaycctgtcctgggtgagctggaccagggccagctcggtggtggccactggacatggagtctcttctggcctccagccgtgccaggtgcccatagccttggcagcaatggcgaggtgcagaagaggagggtggcccacaygcatctgtgcacgcacctgctctgttcccttcyatgcatctgtagttgctcggctcacacggagctcagcaaatgtcgggggattgggcatgtgatcgtgggctacaggccaggccctragctgggtgccctagggaggcagtcaggagtgaggaaagcctgagccccgcctgggagatgctgatgtcaaaggctgggaaacaggttcaaacatcacagctcacagaggagactgggatggggagagcggttttcgatggtgggggaagagttgcactgagataggccttgcaggacaggtaaggtagagacaatgggggaaggagaggtaaagtcagggaggcggctgtgctcaggaatcagggagcaggtctgcagaagcccgggggctgtacatccaaaagggctggatgattgaagacgccggtggtggtgttgggggaaggtgtggggtttgagtcttttaaggaaagttgctgggggtgttgagcggggcagtcgcagactctctagagaatttgaagtgctacattggtatctgtgtcccctctgtgaccttgggcatgtcacctgacctctctgagcctcagtttccccacctgaaaaatgggactaagaatagtcctactttctgggatgcctgtgagtgagcccagcacgggaagtggagccactgctaggattcatgtattcgacatttattgagcacctactgaataccaggcactgaggctgaagtgggggttgatggtgaagggtcaaggctcctggcttcccagggtaggtgtgagtacaaagatgcacagggtaaccaggttctcgggttctggaagtagggtgaatagggccgtggtggcaggaagggatgtttccccagcctgcaggagtcagggtgggttttctggaaaaatgaataatgcatggagacttgaagaaagagaagcctcctagatgaaaaggagaggaagggtccrggcaccatggctcacgcctgtaatcccagcactctgggaggccgaggcggatggatcacctgagctcaggagttcaagaccagcctgggcaacatggtgaaaccccgtctctactaaaaatacaaaaaattggctgggygtggtggctcatgcctgtaatcccagcactttgggaggccgagatggatggatcagctgaggtcaggagttcaaaaccagcctggccaatgtggtgaaaccccgtctctactaaaaatacaaacattagccaggggtggcggcacacacctgtaatcccagctactggggaagctgaggcatgagaattgcttgaacccaggaggcagaggttacagtgagctgagatcgtgccatgcactccagcctgagcaaccagagtgaaactcaagaaagaaagaaaaagagagagagagaaagagagaaggggagagagagaaggaaggaaggaaggagggagggagggagggagggaaggaagaaaggaaggaaggaaggtaggaaagaaagaaaggaaggaaggaaggaagaaagaaagaaaaaagaatgaaagaaagaaagaaagaaagaaagaaagaaagaaagaaagaaagaaagaaagaaagaaagaaaagaacatgtgaaggaagacctggcagggtgggggcaggacctgacccactagccaggttgctctcctggaaacagggttgtccctactggggttggaaatttgtctccataacgtgtgagtgtgggaagcactggcatttggtggtggcagtgggcaggaaagctagacagacagtccctgatgacaagaatgggccctcggcccccaggatgggctgccgtctctcaggacattcacgtaggcgaaaaccctgcttgaaattatctgtgtctggaatctaacttcactttacataaaaaggccgttttttcctgctcagttttcattgtccctgcatttcccaggagcacaaccacagcgtaaatggaggtaaggttgttctttgtttcatttggacgttaaccaagagttgctcaccattttggaaaatcacgtcactgagagcctgccagcctgtgatgtttgagtcacccacaggcacacctgtggccatctgtgctgtggctgcagccttcctggggattcctgagcaggagcaagtggcttactacttctttatgtctctggggtagagggggttctaatgtccccacatacaattttatgtcaaattaatttctttttaatcctcctttatattgtaaataggcatgatattgatgtatctgaaatcacatgtatagctaaattatataccagggaattcaacttcaagacagaaagaaacattcaaaatattagttttgaccaggtacggtggctcacgcctataatcccagcactttgggaggccaaggtgggaggatggcttgaggccaggagtttgagaccagcctgggcaacatagcaaggacccatctctgtgaaaaatacaaatattagctgcgtatggtgtcacgtgcctgtaatcccagctacttgggaggctgaggcaggacaattacttgagcctcgcagtctgaggttacaacgagagctgtgatcgtgccactgcactgcagcctgggtgacagtaacagagcaatattttctatatatattttggaaaaatattatattttggcaggatgggggccggacatgacccatatacataatatatatatctatatatatatatattttggctgggcgcggtggctcacacctgtcatcccagcactttggaaagccgaggtggggggatcacgaggtcaggagattgagaccatcctggctaacactgtgaaaccctgtctctactaaaaatacaaaaaaagacaggcacggtggtgggcgcctgtagtcccagctactcaggaggctgaggcaggagaatggcatgaacccgggaggcagagcttgcagtgagccaagatcacaccactrcactccagcctgggcgacagagtgagactccatctcaaaaaaaaaaaaaaakagaaaaaaaaaaatatatatatatatmyayayacwcacatacacacacacacatatatatacacatatctatacacacacatatgtatacacacacatatatatgcacatatatacacacacacacatacacatatatatacacacacacagatatatatatatatctgtatgtgtgtgtgtttatgcaagaagcattgggtctgaacgctcgcaaggccctgtatcaggagcccaggaatatgttgtgtgaaccagggctgaatggagcactcagcttgcccagcagcagctgggggcatggccataagcagtccagattccagggaaatgaatcagtaacccggggatgaatcaggagacgggaattgcaagtcatcccacctccacaaggtggaaacttagccagcacctttacccggcgctgacccacccgtattctcataagaatgtctgacggtggagacgctgatcctgagaggaacctcaggcacgcaggttccaacccggagtcaggctggaaaagttgaggctcttcaaagagactacgactttgaacctgggtccatgtaagctccagtcatccttcaaggaatgtgactaacgtcatccattgatgagggcaggaaaatgtcagataaaagacattttctgataagttaacaggttactttcacagtatgcacattctaaagcccttgttttcacaaagagagaggaataccttttatgttaataataaaaagtagtttccctgtttgataaatgtgcaaatatttaaggctgtggagaaatagggacacttttatactgttggtgggagtgtaaattatttcaaccgttgtggaagacagtgtggcgattcctcaaagacctagaaccagaaataccatttgacccagcaatccgattgctgggtatatacccaaaggaatataaatcattctgttataaagattcatacatgagtttgttcattgcagcactattcacaatagcacagacatggaatcaatccaaatgtccatcaatgacagactggataaagtaaatgtggtacatttacaccatggaatactatgcagccataaaaaggaaagagatcatgtcctttgcaggaacatggatggagctggaagccattatcctcagcaaagtaacacaggaacagaaaaccaaatactacgtgttcttgcttataagtgggagctgaacattgagaacacatggacacagggaggggaacaacacacactggggcctgtcagcagcrgggtgtgaggtgagggaaagcatcaggataaatggctaatgcatgtggggggctcaatacctaggtgatgggttgayaagtgcaggaaaccaccatggcacacgtttacctatgtaataaacctgaacattctgcgcatgtatcccggaacttaaaataaaataaaattttaaaaagtggaatttgggggtgtcacagttcctgcctgggccccccatggttgggctctggctgtcactcagagggatgaggctggagtgccaggccccagccagatcaggaaaggcctcagaactcacattaagragcttgaatttcatcccgagtttattgggaaattgttggtggatgttaagtaggaagtaatgtgatcagatttgcattttagaaaaatcagtctggctgcagagtggatggtggaagggagcrgggcaaggctggagccagggaggacagttaggagactgctggggccatcagggtgtacgtgtgtgttggggagggggcagtggtggtctgagtcatccagagggcatattatggtggcatggatcatttggagggggggggtatggtgatggcttgattcatctgggatggggtggggtttacagtggcccccatcttctgtgaggctgggggaagaagtaactgtgacctggattaataactgggcagtggggaaaagagccatgtgcaaccyaccctctgtggcccgtgccaggcacggctcatgtaaccctcctagcaaacctctagggtagctccactgtgattactgccagcattttacaggcaacggcacaggtgcacaaagggcttacccttgccacggtcacagcggcgggaccccggcctcagcagcgggacaccaaagtctgagctcaggctcagasagacgtcccagcactgtttcagaggcagcactgtggggtctcagggctggattccggctcgggggcagggtaacttgtgtctgggtggactgttcatsggctgcccaccctcacatgtggacaaagaactcagttcctgctgttcagcccggagccgccacctcagacctgctcatgctgcaaatggagggaaggtggccctgacctgggtgggtgcagaggcggcgcagcttccccaaggcaggcatggaccagaccgagctctgacgctgaaggtcaygggcagccccgagtcagggccatgaagggtgcgggggacccggcccaccatgcctctccaccatcgccagtgtccagcgatcccttccgcaccggacctgcctgggaggggagaggacagcggccgctaccttcttcttcgccgcggccctcgtgggtttggggcgccctctgctggacgcttttatggcctgcggtctgatgccaggacggcctcaggggtttggtgacgggactgggaggaagtcacagggagaaggtggccggccgatcccctgccgtgagaagkaagacacagggcaaacgagcctatgcttttcatctcccagttttcgtgccyctttcaataggggtctaccccgtcggcacccctaaatcccccaccccatcacccactacagacttttagtgcattttttatttagaattcattgatcccacaataatcaattaaaataatattatttattcaaattattcaaatattattcaaattattttaatggttggaagtastcttcctgcttatgtattgatttattggctagtatttgggtgcacagaaccactcccgctaacagctctccctggagtggccatggtatgccccattctccatcacccagcttcatcttcacttctatttttttttttttttttttttttgagacagagtcttgccctgtcgcccgggccggagtggaatggtatgatctcggctcactgcaaactctgcctccccggttcaagcgattctcctgcctcagccgcctgagtagctgggattacagacagccacaaccacacccgactaatttttatatttttagtagaaatggggtttctccatgttggccaggctggtctcaaactcctgacttcaagtgatctgcccgcctcagcctcccaaagtgctgggataacaggtgtgagccactgcacccagccaaatctattatcaagcccattattcagatgagaaaactgaagtcctggcaaagattaagtcccgtgtccaaggccctcgatcaacgctgggccagattcccaggccagtgctctcttttgccttgccagccctcctggcagagctatagcaggccctggctaacacacagggatccccsacttgtgcctgctatgcctcagtttcctcctctgcaaaatagagataacgataacagcacttacctcagagggatcatgtgaagaggaaaggaactaatacttacatatataacattcttggccaggcgtggtggctcacgcctgtaatctcagcactttaggaggccaaagtaggaggatcccttgagcccaggagtttcagacaagcrtgggcaacgtagtgagaccatctctacaaacaatttacaagttagccaggtgcagttgcatgcacctgtagtcccagctactcagggggctgaggggggaagatcgctgcccaggaggtcaaggctgtaatgagccatgatcgtgccactgcactccagcctgggtgacagagcaagaccctatctcaaaagaaaagaataagcattaaaatacatacatatatatataaaataaaatccttaaagcctggcacaagatgacttctcaacaaatgtgggggcgagacgcggtggctcacacctgtaatccyggcactttgggagaccgaggtgggcgggtcatctgaggtcaggagttagagaccagcctggacaacatggtgaaaccctgtctctactaaaaatacaaaaacttagccaggcgtggtggcgggcgcctgtaatcccagctactcgggaggctgaggcaggagagttgcttaaacctgggaagtggaggttgcagtgagcggagattgtgctactgcactccagcctgggcgacagagcaaggctgtctcaaaaaaaaaaaaaaaaaaatcaaccaaacaaaaatgtggggttttagtatccaccagcctagtactctcagccctggttgcaaatccacctgggagattgattgtaattaaccaattagagcaggactgcctctaattggtctcaggtggagcccaaacamgggcgtttgtggaatctccccaggtggttctcatgttcaagcaaaggtgtraagtgccaggccagagcctccaccgcagggctggtgtcctgggtgcccaggacagtgggcggcagctggcaggtgccaggaaatgctgaatggctgcttcatcgcccttggtgtctacattgcttgttactcagcatcgggagtttagatgtcatctcccatcagttaggagggaggtcacccactcagacctaggtcatckgctctgaaataaagatgggctttgtcccattctgaaattccctaatccaaacatgaagtcatcccagccctgcctttggaagttccactcaggactgagccaagaaggagcctgcctctttctttctaaagtcacaggctgcggggctctggattcccgggatacgtccaaaggagaaatttgggtctagcaaggatagggggttgagcagaggtcactgagctcccgccacgggcatggatccgggctcacccctgccaagtttcttgaatccctctcccggaaaggatgataaacatgagtcttcatttcctcaaccgaaaatgccctgcaggttcaggataggaatgatgacgcggggctggcctgcgtggggtggggctactgcacaacagtcatgcaggctggtgtgtgagcctcccggcagctcttccaggatcagctggtccccacttaaagacagctgtggcttggaggggttaagtgctccagaatccaygcacaatttgttggagtgtgaagctatccatacctcttctagtctgtctatatggcagaataagatgcggctgaaacatcaggcaggggcccaagagactttcttaaattgtctctttaaaataacatgatttccatcctgggcaacaaggcaaaaacccgtctctacaaaacgtacaaaaattattactagctaggcatgtgcctgtagtcccagctacttggggtgctgagtggggagaatctcttgagctcgagaggtcaaggctgcagtcagccatattcatgccactgcactccagcctgggtaacaaagtaagaccgtgtctcaaaataataataataaaaataataataataataaatgattggctagacgacgtagctcatgccagtaatcctagcactttgagagaccaagattggagcatcacttgaggccaggagaccaacactagcctgggcaataaagsaacatcctgtttctacaaataataaaaataaagtaaaataaaataacatgatggaagatgaagaacaagtctgggaagctacgtgtttcctcatggagagattggatcaccctcatctccagcttggtgtcttgtgacaagaggatggcaccgcaaatgtttgttgacctaaacatttatttatwcrctcttcaaaagatatttattgagcgcctactgggcattgtatgagcactgggaaatggaaaagaaacaagactgacaaggtccatgggctgatggagctgatattccagtgagtgtgtggggaaaggggtgggcaggggagagagacaaaaaagtaaacaaataaacaaagatgatgaaagatcataataagggctgtgtatcagttatctattgttgtataacaaacactcaacaatgtatggcttaacacaacctccatttatttcctcacaattctgcaatgtgggctgggctcagctgggtggttcttttgctggtcttgtctgaggtcactcacagcctcagttgtctgtcatcaggtggcttgagagggactagtctgaacaattagacttacttttttttttttttaagttgaatttactttaaatgcagaaaccaaagcatttcacagaaacctccagctgaaaaatcagaaggtacggccatcctgagcccacatttctgcatggcagcagagcatgtgctgggcagtggctgcccccaggagatggggcattgctccccaggttcccacagcgctggcttctctctggagatttctaacactgagcctatgtatccactgccattaagacccctcaatgattgttgttctgactatagagctgagaggaaagtgacacctctctccaacccatggctctaatcacagtggaaagtgaaaatgggctgagaagagcctgcttttggttatttgtattcgttatttctcaccacctttgcttcacttttgtaaccactttggcctttgcagcattttaacccttctgatacagagtgggaggagaggggcagagaagtcttctgtaaacaggtgactttgatgttgtgtcctggaggatgagaagttggtagctgggcatagtgttagggggagatgcrgtaccaatgtcctgagagagccccatggctgcagcccaaggtaagggacttcttgcagggtctcagagggcatgtgcaaagtttgggtttcattctcaatgcagtgagacaggagcaggaggttaaatggtgcagctgccgtggaaaacagcttggtggttcctcctgctaaacatggagttaccgtatgatccagcaattccacccctgggtatataggcccaagagaagtaaaaacagggactcaaatgcttgtactcaaatactcatagcaatgctattcacattagccaaaaggggaaacaacccaaaggtccatcaatgaaggaatggataaacaaaatgcagtctatccatacaacggaatattattcagccattatgaaggaatggggcgctgacccatgtgacaatagggataaacctgcaaaataccacacgaaggcagagaagaccatcacaaaaggctacttactgygtggcttcatttatatgtgtccagaactggcacattcctagagacgaacagcaggttactggttsscaaaggctggggagagggggaatgagagtgactattcatgggtacgggatttcctttgagggtaacaaaaaaataccttttggaattcgatcaatgaacgcccaacatcatgaatgtgcaaaatgccactgaattgttctctctagagtggctgacatttggtcaattttacctcaattaaaaaaaggaaaaaatgaggccaggtgcagtggctcacgcctgtaatcccagcactttgggaggccgaggcaggcagatcactgaaagttgggagttcgagaccaccctgtccaacatggtgaaaccctgtctctactaaaaacacacacaaaaaattagccaagtgtggtggcgcacgcctgtaatcccagctacaccggaggctgaggcgggagaatcacttgaggcagaggttgcagtgaggtggtgtcacgccactgcactccagcctgggcaacagagcaagactccatctcaaaaaaacaaaacaaaacmaaacaaaaaacaaacaaaaaggaatagaagatagggaacataaaagagaaacaatcaacactgcggtagctacgttgctggtgatattgaggaaatgaggaagccattctcatacccaaagtggtgtttcctgtagacaacctaggggtgtgcaagactctggctggagaggggtgggttagcggcaccaggaggggtcctcccacgtgtgcacctgccagctttcctggtggcccccccaccccccgtgatcttgccccagcatcaggaattgggggcgatctggtcaggcaagtctcctacagcacttaaacccaygtttccgaattggattcaakgggaggcagcttcccagttaaaagtccagggcctggagctggggggtgacaaggtgggcctcccaaagacactgatgactgagaatcagactgcaaaggcaggggccgggattgggtaggcggtttacagaaggtgagcaggatcagcaggaattgctggtgaaggcaggagggtgcgtctgtcgggactcctcgccctcactgctgtctaacaagaaagcccgggtaaggagaggcctccagcagctcaagtgggcccagggactccggctgtagcgtctgtggagcaggacatttgagtggctcagatctagggagaacaggacagcaggctctgaccaaggaaagccatggcaacgtccggccaactctggaagcagatgggtcatttccaagatgtcctgagaagggtcctattcccgagtccctcccctctggactcatcagattctgacttagagggtgggctgcatcgttttcctgtggctgctgtaaaaaagccccacacacgcagtggcctaaagcaacacggatgtgttatctcatcgtccaggaggcccggtgtccaatgctgggctggaatcaaggcgtcagcagggctgcttcctcctggaggctctcgggagaatcttttccttgctcyttgcagcttctggagctgctgcatccttggccttcggccctgtgccctgctccagcctctgtgttggttgtcacatctctctctgaccctcccgcctccttgataaggacttttgtgactgccrtgggccctgatagcgtttggatgtctattccctccaaatctcatgttgaaatgtggtccccagtgttggcgatggggccggtgggaggtgtttgggtcatggatgcagatccctcatgaatggcttggtgccctccccatggtagtgagttcactcaagagttgattattcaaagagcctggcacatggccgggcatggtggctcacacctgtaatcccagcactttgggaagacaagcggggtggatcacttgaggccaggagttcgagatcagcctggccaacatagtgaaacccgatgtctactaaaaatacaacaattagctgggcatggtggtgggtgcctgtaaccccagctactcaagaggccgaggcaggagaatcgcttgaacctgggaggtggaggttgcagtgagctgagattgcatcaggaggtcaagagatcgagaccatcctggccaacatggtgagacccccgtctctacaaaaaatataaaaattagccagggtggtgcgcacctgtggtcccagctactcgrgaggctgaggcagaagaattgcttgaacctgagaggcagaggttgcagtgagccgagatcatgccaatgcactccagcctgggcaacagaggaagattccagctcaaaaaaacaaacaaacaaacraacaaaaaaccaaaaagcctggcacctcccayctcccctctccttgctccctctcttgccatgtgacgccgtrtgacgcacctgctcccccttcacctctcgccatggctaccagctccctgaggctctcgagccgatgctggtgccatgcttgtatggcctgcagaaccgtgagccataaaacctcttttccatgtacattactcagtcgcaggtattcctatttatagcaatgcaaaacggactaacgcaggcccactttgaaaatcaagaataattgtctcatctcagagtccgtaatcacatctgcaaagccctttttgccacgtcaggtgacatattcactggttctaggagtagggtatttggggaggagtagatgtatttgtgggggcaggtggcaaagatcaggaatctcaaggtntttttcctgcagagrtgagaactctgasagggaggcccctgagcgcagctgggctcttctgtctgtgtctctggggtccactggagcagaggaagctttgttggtgccggtctcattgtattgtgtctaatgacacagagatggcataaagaggaaaggacagccagagagagaatacaggcctgggtatcacacagatgtgggtccgaatcctggctctgcctcagacaagccatgagacttgcagcaagtttgtttttcttttttttttgagatggagtctcactctgttgtccaggctggagtgcagtggcatgatctcggctcaacatgacctctgtctccccgattcaagtgattctcctgcctcagcctcccaagctgggattacaggcatgtgccaccatgcctggctaatttttgtattttagtagagatgggttttcatcacgttggccaggctggtcttgaactcctgacctcaagtgatccgcccacttcggcctcccatagtgctgggattacaggcatgagccaccgtgcccagccatagaataagtttcttaatagcttctsactttcttatctcttctcatcctaggaatattctgaatgtaatgactaagtttagcaacctctccacagggcctggtaggggaggtgtttgatgaatgctggccctggacaatcgctggggagtgcagaggacgggagaggagggaggccaaggcaagctgcacctccctcttcctcttccaccctgccccacagctttgctgggcacacacggggcggctgtggcaactgctctctggccgtgctggaattgtgagtttctcctttcctggtcacagctgataagtatatcctgctcgatacaaaacatccacccttatggcaagagtcccaggctgggaaatccctgagcaccccacctctagcccaagggagcgtgcactgcctttccccataaatagtttaggagtacacaactgtrgatggttgaggggtcttcccacctcctggatccrtgctctgggatgcagctggggargatgcaggctgggctggcagtggcgactgtgcggaagtggcgactgtgcagaagggggtagtttgtagctatcagcactgatggggctcagagctgaaggcttaacggccagcaagaggaggtctcgactgcaccagccaccgttctctgcactaccatgcattaactcactgagttctggcacaactctgaggctgtgggtccttgccactcactgtccccaggaaacttgaggcagagagagtaagaacccagctaatgaacaagttagtgctggagactggatttgaacacaagtttagctccaggacctgagcttttaactggaaggttggctcctacatkaatttaattcagaaacacgagtttaaaggctgtaggagacttgccttcccaggttccttccaattctctgatgctggggccaggtgggggatcactggggaacactggttgctgcacacgtgggtgggctcctcctggtgctgttaacccacccctctccagctggagtcttggccacccctggaccatccacaggaaacagcactttgggtattgatatggttgggctctgtgtccccacccaaatctcatctcaaatgataatctgaattgtaatcctcacatgtcaagggacaaacctggtgggaggcggttggatcatgggagcggtttcccccatgctgctttcatgctagagtcccacgagatctggttgtctggtaagtgtacggctcttccccgttctctctctcctgctgccatgtaagacatgccttacttctccttccgcccatgactgtaagtttcctgaggcctccccagccatgtgaactgtgagtcaattaaacttcttttctttataaattactcattctctggtagttctttatagcagtgtgaaaacggactaatgcaggtataaaagtggactcctggcctggtgttgcggctcatccgtgtaatcccagcactttgggaggctgaggagggtagatcgcttgaggtcaggagttcgagaccagcctggtcttgaacatggtgaaaccccacctctactaaaaatacaaaaattaggtgggtgtggtggtgcatgcctgtgatcccagctacatgggaggctgaggcatgagaatcgcttgaactcaggaggtgaagattgcagtgagtggagatcgcgccgctgcactctagcctgggcaacagagcaagaccctgtctcaaaaataaataaataaataaataagataaagacagaaaaaaagagtggattccctatttcctcaatatcactggcracacagctaccggaatgtcaatcacttttcttatttgccccctatcttctatccctctttttaaaaattgaggtaaaattgaccaaatgtcagccatttctgagagaacaatcctgtggcatttagctctctcacagtgttgggcattcatctatccagtttcaaaaccattttgtcaccctcaaaggaaaccccgtacccacgaatagtcactctcattccccctctcccagcccttggcaaccagtaacctgtttctctctaggaatgtgccagttctggacacttaaataaatgaagccacgcagtaagcagccttttgtgacagtcttctttcccttcccatggcattttgcaggtttatccctattgtcacacrggtcagcaccccaytccttcatatggctgaataayattccattgatgggcagactgtatttcgcttatccactgatgcatattttggttgtgtgggcacatttgggttgtgaatagcrctgctatgagcatttgaatacaagtatttgagtcttcacttctcttgggtctayacgtccaggggkggaactcctgggtcatatgktaactccatgtttatcatgaggaaccaccaagctgttttccacagtggctgcaccatttacgtttccaccagcagtgcacgagcgttcctgtttctccacatcctcgccaacatttattttctgcsttattaaaattcaaaagaattatagccatcctagagtagagagtgtttatttttatttatttatttwttttgagacagggtcttgctctattgcccaggctgaaatgcagtggtgtgatcayggctctctgtagccttgacctcctggcatcaagcaatcctcccacctcagcctcccaagtagctgggactacatgcatgtgccaccacacttggctaatttttaaatttgttgtagagactgctgggggtcggggggaggtgggtggtcgcgttctgttgcccakgctggtctggaactcctggattcaagtgatctttctgccccagcctctcaaatrcttggatttacaggcgygagccactgtgtctgggmttatccctcacttttaaaagcagagctgagataccacttggccycacctctacagatccagttgaggaaatgggtttttcaagtccagtgcccttggtagagaaggatcsttggtgtcaatggcygggggccggtggaagcagctgacccacccttcagaggaaacccaatcttccccttggcccagtaaccacggagacaaccccaggagacaactcacaccccaactccagagtgggcagagttcacgtgaatggactccctcaagttctccagagaggtagaggtttctctaaaaagtcactcaagcttggtatttaaaaaaaaaaaaaatcttggcttccatcagctcctattccagctgaaggacggtggtcctgactcagcccccagcaggattccccgacccctttgccacatactgtctgactctgaacccttggctgttcaacaactgagccagtttcagaaaaggtctgtcccctctccagagacacaggccggactgtgacatcattatgtgtgtggatgttrgaaatggccttgaatcccagctctgccctctgcattgagccatgagtttggcaaagtgacttctcagtgcctcagttttctgtgctgtaaaatggacagaatgatactaccttcttcctacggctgttgyaaggatgaaktgagttaacacatgaagggctgaagatgggctccgtcacgtagkttttcaataggagatccgttatcaccattgagagcagtcaacagggttaaagatggtgacagtcaacccctcacctccscacctgcgaagtgccaccccccatagacagggcgtccctctgtctcaggcactggtttctggctgagattcagttagcaactctccctcaccccaaagataaaagggctacaggccgggcatggtggctcatgcctgtaatcccagcactttgcgaggctgaggcgagcagatcatatgaggccaggagttcaagaccagcctagccaacatggtgaaaccacatctctactaaaaatataaaaattaaccaggagtggtggcatgtgccggtcatcccagctacttgggaggctgaagcaggagaatcacttgaactcaggatgtgaaggttgcagtgagccgagattgcaccactgcactccagcctgggcaagacagccagaccctgtctcaaaattaaattaaaatttaaagggctacaggccactggaccatatgasctcgttatgaaaggtagaaaaaaatttaaacccacttgccacacctatgttatgccatgccgtgccaccaaagatgaatatactgcctcttttcatgtgatttcaggagggagtctgcagacggcccgtgcactttcctgtccttacctaacctggaccttatggtagagttgctaagctctttaccccttgccttcagtggagatctgtatttgaattatctttttcaagtactaccaatctttgtaggtttattgtctctggacagcgcagtaagagggaactagagaaatctgctttctgyagatggaattctgcctcatattaccaagcccttaatatcaaggtcctctagtcctccgaaatctattttctctctgtcttctgaggaaagccaatttgaaaccatttttcagggaagacagcaaggagacttatgctgacggcgatggagaggctcaggcagtcagcgatggagagactcaggcagtcagcgatggagagactcaggcagtcagcgatggagagactcaggcagtcagcgatggagaggctcaggcagtcagcgatggaagaggctcaggcagtcagcgatggaagaggctcaggcagtgactggggtgtggctgctaagggacggatctaacatcacaagccacggtctaggagctgacacccacaccgtgtaaatgacagaaacgacaacgtttcattcttaaatcaaatcaagctgtattgataatgatgatttagcaggaaccactctaaaaatcagaaacaattagaatgccttccccatcaaattattttattaggttaattaaacagcttaaagatgattccttttgtgtggtacccttctagaaaatatttcaagtttttaagtgaacttccaatacataaaacaaaattactttagcatacacaaatttcagatcaaaatacaacactctgtttctgttttcttacagttataaaatccagtcaatacaaactacataaaaaagataaaacactttcactgatccttggtacaagagaacagcatgatggcaaaatgttccccaagcacaggtcctgggttcgtgagaagggaccaaccccacaatatactgaagcatgtaaacaaagtgcgtgctacttaatttaggttaacaaatcctttttgcatcagtattacttgtaaaccataaagcaacttttaaaaagaaaggttattaattaaaaattacttctgactgctaaatttcttatcagcaagtgaacagaaaattattccacaaaacaaactagtacctttggaccacaggatgtgagacgtgacatttcaatgaaatcaacttagcacgacttctctactatcctactgaacttggggagtacaattttacaagttgcagccttctagcacttccaatattttgaactttctaaacctgcctatttagctatgattttcattgcaaatccctgtttttcagtagtaggactttattaaagataggataatatcacacacaatacaatcttcactgaatatgtgtctaagcagacctacttggaattctactagataataaagttgcaggatttaaaagaaatactattctgcaggtcccatgtcagaaaacacagatatgttcaacagattggtgtggtatttatatggtattcgtggcattttccttatagtattcaaagcatcaaaatgacaaatcaagactgttaaaaaccagtcttggacaagggtgacagtcacatactcgagggtccagcacaacactggcatgagccaacaggagccacgccggccacctgctgggccagggaccactgcaaagagcagccctgaatttgggagggtcaaatcgaatttacaaatcttgttttcaggaatttccttgatagttctctttcatggcagaagacctatacccgtgatggaaaacaaaagaatgtacacatttctagtgtgtcatgaatgggtctcactcacagataggtacagacatcactgtcactgctaacacacaatgaagtctgcctacgcctacctgaggagcatccgcgataccgtttctgatgaggacaggactctgcggaggtgggcagagcagggggtgcttttgtcagctctgctggtcacttccaggctgctggtacacaccccaacagtggctgcaaagattgttcaaaacttctgctgaggccacaatgattacgggatggttgtcacaattcacaaaaggtatgatacaaaaaacaaagggtatcaccattacgtcgccggcgaactgaaggggtacaagaccgaggaaccaaacacaagctgaattcaaaacgaaaagaaccccagtggcagaaaaagccacgaattatttaatgaagcaagttgtgctaataaacagcctgtgcttttcttaactgaaggtcacttgatacatttcccaacacacaatttttattcagattatctttgttttcatggagagcctgaattttgaggtacgatctaggaaaaagatgttatcacccacacaaatggaaggctcacttctttacttcttaagctgatgatacccttttgcccgccccatgtaccagatcctacatgattttttaaaataaaacataagtcaatttcaatgagcatatgctagactaacaataaatttattttttggagtttcttttgaagcacaaattccttttaaaaaaaatatgaaaaggtggtctctcctggaaacaagcagttctagtttccgatcccacaacgatttggaacatagtgtgtttttaagtcagagctgaagaggaaagaaggaaacaagggctgcgctccgctctggcgaatgcgagctgcaaagggacagaggaggacccacacggaggctccccacccggctctgcggacagacatggcagagggcctgtcacacaagaggccaccgggccgagcacgtccgggagcctggggctgcactgggtgctgaggtagtgagcggggcctgtgcctgcctgccctcccggcttggagggggagccctgagggcctctggggctggcctggaaggtgtcattctagcctacaggtgcctaaggcgctgggatgtgtccttggcggtgcctcagaaggcacctgggtccaagttctgacctggagccttggggacagatctgactctcacagccagggccagctggttgtggaaagtgctagtatgcaggtctgctcagggatctgtgaggctcatgctctggccattatgtggtctgaagaaccagaagggctattctcctcgcccccaacaacccgccccaactgcacctttcttttcctttttattttggatacataattcaagcagtaaaaaaaccaggctggaagagggttgggacagaggagcagagggcagggtgggaaagctatcccaagaagagtgagtaaaaacaacgactccgaacatggccaaaatacccttcctccaccttgacggcaatccctaagctggcagagaaagatgcgccgactgcgaagtgcctgttttctcagagattccacctagcagtgtccatggggagccacagtggaacatggagagaacaatcaatgctggttcaaacgaaaggttattcaccagtgaaagaaacggggagaagacacagccggctagctctgaagacatggtgtgcatcccagcctataaatctctaatgatcttgatcccgtgtttcccctatttctgagcagacctttttttttaattttttatttttttgtgagacagagtccccctctgtcgcccaggctggagtacagtggcacaatcctggctcacttcaacctccgcctcctggggtcaagtgattctcctccctcaacctcccgagtagctgggattacaggggcccaccaacacactcggctaatttttgtatttttagtagagacggggtttcaccatgttggccaggctagtcttgaactcctgacctcaagtgatccacctgcctttgcctcccaaagtgctgggattacaggcgtgagccactgcacccggcctgagcagatcaaaaacaaggcaagaggggtcaggacacacaggcagaggctcgttccctctccttccagagctgagaataaaactgcagtagactttcaccagggaggaggacaagacaaaaccatgacaacaatcaggtcccttggtgacgacgtgccccatcagcaaggctacccacctacggagtgggaaggttgccgtgccaacctcccctagggcaggagaaacaactggcatatgttcaaatgatcaatatcccaccccccgcaacaaaacttttttctgaaatttcatatagcaacgtgctttcttgaaccgagacgtaagactttacatttagccattacactatgaagagtattgcagatctaacacccaacacatcttgcccagcactcttctttgccttctatatttttattcaagttatggatacaaatgtcaaacaggatgctgctagagtagctcaccttaagtgatcttgccaaagatccgttcttgccaacactgtctgaacctggctattcagccgacttctcggtcctttgttaaatcctacttctacttccctttctttcttttcttttgagatggagtttagcccttgttgcccggctggagtgcaacggcaccatctcggctcaccgcaacctccgcctcctgggttcaagagattctcctgcctcagcctcccgagtagctgggattacagacatgtgccaccatgcccggctaattttgtatttttaatagagacggggtttctccacgttggtcaggctggtctcaaactgccgacctcaggtgatctgcccgccttggcctcccaaagtcctgggattacaggcgtgagccaccgcgcccggctgttctacttccttttcacattcagagatcaagaatgactttatcaaatgtcttattgaaatcaagacaagctgagcacattatatactcctacctctgccagtctcataacctaaccaggaaaagaagtgtatgataccatagaaggattaagtagttcactgtttgtaccactttgttaaataaccttctttatgcaaaggtacaaaagttccacacacacagacacatgcacaaacacacatgcacgtacacacaagtacttgtaacacatatttgtttgtttttaagtttcatgtaacatccaagttaagaaagcacagttaggtctactggtctaaaacagagatctaggaattatctcgtttctttgaccaatacagattactacctttgctatttcaatgaaaaaaaaggaaaattcaactttagtaaagagttttaagtattattagagaatttcactgggcaaattctaaacagagggttatttataacaaactctaagtattctaaacacatattttgggctgtttcagctatctagaattgtgttgaatttaaatactagagatgtagatggagagaggtgatatgggtctagaaagcaaatcattttctggctggatgctcacacctgtaatcccagcactttgggaggttgaggcaggcggattgcctgagctcaggagctcgagaccagcctgggcaatatggtgaaaccacacctgttctaaaaatacaaaaaattagctgggcatactggtgtgcacttgtagtcccagctacttggcaggccgaggcaggaggatcccttgagcctgggagatggcgccactgcactccagcctgggtgacggagcgagactccatctcaaaaaaaaaaaaaaaaaaaagtattttatgaacaccaacttctaatacatttacttgtatatcatgtggcagcagacgtgagaatgtggaaagctataaggcctgggacactcagtgcaggcagccttggcctcatccacagggcctcccaccaccccatgttgagaggtgacataatcatggtggcagcaacagtggtcactgcacacaaggcactctcccagctgcttacagtcatcacccagttaatcctcacaacaacccgcagaggtgagtcctcctgctattcttcttccacataagaaacggagccttgggagccttaagagcttcccaagtcacagagtagtaagtgtggcagaagcccccaagcccagatgcacctgccaccaaggcctatgctctcaaccactgggtttgtaaggaaagtatataaagatgattgcctgaaaataattaaaataacaaagtttggggtttaagttaaaggaataagcctttgttctcatggaaatcacttccaggaaatgtctcatgtcctgagctaagtcagtctcatgtcctgagctaagtcaacagggtgctaacagattgtcattggaggagaagctttgtcattctactattgaaagcaagccctttactctgaaaagcacaagcataaaaattaaatcttattaatacacaacgacagttaaacttggctatacttggtacaacttaagcaccagattttacctggtgcttaagttataccaaatatgccaggcttttagaaatgggcataactcttttggccacggcatcactgaactcctccatttaagtagaatgtgt

SEQ ID NO: 93447 - DNA, 14823 bp, Homo sapiens
  misc_feature (1)...(14823): n = A,T,C or G
gaagcgggaaggaaagcctggagcatctcgtggtgcagggaagcgggaaggaagtgaagctcaaaagcccctaggacagggcacctcccctctggatgctctttccagaaaccctcaaccctgtacggtcaggaggaaacatggcacctcccctctgggggctctttccagaaaccctcaaccctgtacggtcaggagaaaacacatcccacaagcccaaactgagggacagcctaaaacctcctacccagcccttctcagaactgttacgtcctcacaaaaacgggagagtctgagacaccgttccagcccagaggagacagaggagacaggacagctgagtgaacgtgggtcctggagggacggggccctacgcaggagaagggcgagaagggacccgcgtgtgggaagggaagtctaaacacccacagcggccgctgtcgccgctcggcgcaggagtcagggagacccggagacctgctgttacttcccactccccatgcccacctcctcaaacgagacagcttggggtttcgttacaggcaccaaaaagaaaccccggtccagctggagacgcaccgagcagaagcctcaactcccctcgcccaggcgtgcagcccacccccagcaccggctgagcagggacggggacccttcccctgtgatgccgcgagccaggccttcgtgagctcaggggtggtgaacctgacaggccccaggggcaccagcggcctcttcgtgggttggtcagctcaccaccaagtgaactcaggccacgcaaggacccccgaaccgtaccatctgaggagaggtgcaaggggacaccacacctggtgccmaggtcctccagctggcaccgtgcctccgtcccaccagctcacctgtgctccgcccgaaagcctggatcctcagggccctcccgcctggccctcagcccaagggccgtggcacagccagaccagtcctcacacctttcctacctgctcctgcaccccaggaccccagccctgcccaatccccttgctcaccagctttgccacctgcccctctgcactggtcctggagcaccaggcccggcgggaaggcgagctcgtggccaggccctgcgggaaggcgagctcgtggccaggcccggcgggaaggcgagctcgtggccaggcccggcgggaaggcgagctcgtggccaggcccggcgggaaggcgagctcgtggccaggccctgcgggaaggcgagctcgtggccaggccctgcgggaaggtgagctcgtggccaggccctgcggcgggggctgcctccttgtgcccaggtctcgcaggtcccaggaggcccagggtgttctctcacctgcacctcggctccctgcccggcaccctggctggcctgggggactcacgggcacgccctgaccmtgctctgcctccaggggtgaggccagcgctgagtgcaagtaggttccagggccacaccgcagggcaccccggccgtgccgtaaggagtaaggcgcccgtgcaggacctggctccttgtgggtgagtggtcaggttgacccatcttggacccctcacaacaggctctcgagactcagggatggggtcgggggagaaagctcggcactaggcacagaggcagcaagagggtctcgggactcagcagggtgggggcagtgacggccaaggatgggccactgacagcacagctctgctcccgaccaggccagcaaaacaagccaaccccacacacccccagcctgcgtgtgatacgcggcccgtgtgtgacagggaccccaaacacacagggtagagggcgtgtcaggaggagcccagagcaccctgtaccagctctccagccacctgtggcagcccctcactcctcagccaggcctcgtccaactggggctgcagcctgcggaggctgcccgtggccggcgtctgcccctcagcatggaggacgctgaccactgcagtgccgcgtgggctcctccaggctgtcctagggacggccacacaggcccactctggccctctgagcccccggcggacccagggcattcaaggagcggctctgggctgccagcgcaggcctccgcgcaaacacagcaggctggaagtggcgctcatcaccggcacgtcttcccagcccggcaggtcccgacacagggcccggcgccccccaccgcgcaaagccaggataggaacacacaggcgagcgcacgcggacagccccccagtctgggcacatggcggcacctacttggaaaagatgaccatcagcttcctccggctccgccgcggctccgcgtcctcatcaaagccacccaggtccttgcctaggaagacctcctggtggaagccgcgattgaggtgcccgtccatctccagcttcaccccgttcaggtggtctgggggcaggatctcattmtcctccctgttggctrctctctctcgagtggacgagtggttggcaggccgtgcagaygcgtccatcagaaggacygcccccaggagccagaggcagcacggagccaggccaatgaggggaccccacctggacgccatcgccacccagggccagaccatggggcrggctgcagggtgtgggccaggtgctgggaggggcaggggcaggggcagaggaggaagtgaggtcctggctccaatccaatccccgggcaccacggagggctctgtgtccccaggacggccgcaggatggggacaagcagctcacagtctgcagagagacacagacacatcattagcaagactcagcaaagacttccccaagcacgtctatcctgcaacatgaaacatatcctcgattcacaggatccagacatgtggcatcgccttctccagaccacacrtggcactgccttctccagaccacacgtggcattgttttctccgggccacacgtggcatttgttttctctggaccacacgtggcatttgttttctccggaccacacgtggtgtttttttctttatttttagaaacagggtcttgctctgtcacccaggctggagtacagcggtgaccacagctcaccgtgaccacgaactcctgggctcaggtgatgctctgggctcaggtgatgctctcgcctcagccaccggagcagctgcgaccacaggcgtgcacccccacgcccagtaatttatttttattttactctttgtagagacgggtctcgctgtattgctcaggctggtctcaaactcctggcttcaagcgatcctcttgcctcagtctcccaacgtgctgggattacaggcgtgagccactgtgcccggtcttttttttacagacactgagttttcagccctgtctctccgtctttccatctctctctcgagctgtcagcacctccaggggctaacctgtccccatcgcccaacacctgcagcacagctttcctgtggggcccggctctgtccctcctggcatcatgccactgacccatggggttagggtcactctccagaccctgacttgaacattcttgagatctatgaccttagctaagtcatgtggcctccccggcctcagcttctcactaagaaacaggaggctccccctctccccccgactgaccaggctttgcgaagacagccaaccctaagtgcagagggcgtcagggcctggtcccagcaaacaaacacacaacccccacacacagatgtgcacacacacatccacactcacgcatgcacgtattacacacatgtgcccttgcccacactcgcgagcgaacgccaaggccgaggagcccagaagtctgtcctgccgtccgaggcgtggccagtcctggtgggaagcaggggctcacagggcctcatgcctcatgtatcccaaagggaactcggggtccttctcacccacgagcctactcctttcacagtctgcccctccggcaaacacctgcgggtcctttcgggtgccgctgaggccccgccatgtcacagctgttccctcaacacacatggactgagactcctgttctgtggccgtcttattcagcttcactgttctggcacctgccactctgcctgcacacagtaggcgctcaacgaatgctaccctgggtaatattaaacgaaaaaatgctgcctccaggtatcgagaaacaccagtggggccgccatgaaagtggtcctgaagtcagtgcagtctgccacaaaccaagaggggtacaagcctgagttcccccaaggaaggaaaccctgggtgaggggctcatgtctgattttttttttttttctgagacagagtctcactctgtcgcccaggctggagtgcagtggtgcagtctcggctcactgcaacctccacctcccaggttcaagtgattctcctgcctcggcctcccagttagctgggattacaggcacccacctccactctccactaatctgtatttttagtagagatggggttttgccatgttggccaggctggtctctaactcctgacctgaagtgatcctcctgcctcggcctcccaaagtgctgggactataggcgtgagccatgcacccggcctgattttctgaacatggctgagggcttttcccttccctagtggtggcataattctattcctgtcgtcccagatcgcctgaccaggggagagtcctggataagaaccaagacacctcctcctggtgctgactccactaactacagtcgtaaaacacacgctgtgtgcaaagagactgtactttgttcctagagaaaataaagctagttcttgattctacatatcttgatgagttacacggtttacttgaggcaggaggatcgtgagaccagcctgggcaacacagtgagactgcgtctctttaaaaaacaaaaacaaaaagataagaccctgtctcgaaaaagggggaataaaaagtaacccaaaagtaactataaatatcaggagtccatcaagtggcgcttcctctcctggcttcagagtatctattcatcacggtgtgccaggttcgcagcacagcggagcgggccggtcccaccggaatggggtttcgacttcgccatcccctagcagctcagttcccagcaaggaatcaacacacccttgcaaaacggacgtgggaaacagcttaggcagagacgctatttctttgccatccctgggcttcagctctggtggaacgaggctatttctggcagttaacaacacacacggttagattctaaaagctcaacagggttcataacaccgcctctgagccagacatcaagggctccacacagccgacttcacatctccaaatcctactaactggggatgagggtccacgcggttcagaagcggaagcgcaggcgcagggaagcggggcagcttgtccaaggtcgcctcgccgataaacgcgagtccaaccagaccccttgggcctccgtttcccggtggcattcgtaggttttggccagtaggagaccagacgtgccggcggccggggaggccagcgtcgtcggcctgtccctgcccccgggaaccccgggagccccggtggcggcggagtctcgccagggctcaaggccgagcggacggacgatgccccagcccaaggcgggaggcggcggcggcctccagacccgccctcgccgtccggccggcgtacacttggccccgcggcctgcagcggccgtcccgggcccctcactcaccggtctgcctccccgcgctcgggatccgaggaccggagcgaagcgtcagtgacgccgccaacgggcccggatcaggccactgccatctttcttgcgggcgggggcggtgcgaacgggcgcgacctcacggaggggacgccggcgccaccatctctcctccgggcggaagcggtcgcggggccgctccgaggttgaccaatgacaagggtgcccgaggccacgtgacggccgccgattggccgccggcctccgagcgccccggggctcggcgtctgcggaaggccccggcgcgctcccaggagcgccgtgcgcacgcgcaccgccccgagccggcggcgcctgcgcactcgcgagtccggcctgggccgccggcccggcgcgggcgccatgaagctgctgcggcgggcgtggcggcggcgggcggcgctaggcctgggcacgctggcgctgtgcggggcggcgctgctctacctggcgcgctgcgcggccgagcccggggaccccagggcgatgtcgggccgcagcccgcctccccccgcgcccgcgcgcgccgccgccttcctggcagtgctggtggccagcgcgccccgcgccgccgagcgccgcagcgtgatccgcagcacgtggcttgcgcggcgcggggccccgggcgacgtgtgggcgcgctttgccgtgggcacggccggcctgggcgccgaggagcggcgcgccctggagcgggagcaggcgcggcacggggacctgctgctgctgcccgcgctgcgcgacgcctacgaaaacctcacggccaaggtgctggccatgctggcctggctggacgagcacgtggccttcgagttcgtgctcaaggcggacgacgactccttcgcgcggctggacgcgctgctggccgagctgcgcgcccgcgagcccgcgcgccgccgccgcctctactggggcttcttctcgggccgcggccgcgtcaagccgggggggcgctggcgcgaggccgcctggcaactctgcgactactacctgccctacgcgctgggcggcggctacgtgctctcggccgacctggtgcrctacctgcgcctcagccgcgactacctgcgcgcctggcacagcgaggacgtgtctctgggcgcctggctggcgccggtggacgtccagcgggagcacgacccgcgcttcgacaccgaataccggtcccgcggctgcagcaaccagtacctggtgacgcacaagcagagcctggaggacatgctggagaagcacgcgacgctggcgcgcgagggccgcctgtgcaagcgcgaggtgcagctgcgcctgtcctacgtgtacgactggtccgcgccgccctcgcagtgctgccagagaagggagggcatcccctgagccgccgcggcccggccctccgggacacctgcttcacccggcggcgccttggggcaggtgccgagcgggcgcactacgcccgggccccaaggcccccgtcccgcagccacgcttgtggtcgctgcgtcccggtctgcgtttgggagacccctgggggttgccggggcagcgcgccgtgtccaggtggaggtgcccgttcctggacctcagcgagcctgagccgggcccggccgcacgctgacccccgtgctgtccccgaccggctcacggggctgggctccgatcttccgtgtctcttatcagtggcgtttctcacgtctgcgtctcagatctaacgtggtttcacatcaatccgctttcatgggattttggtctctgtccagtgacttcgtggtaaatgtaactcagtgtttgcttgcgacttatttataaatattgtaagtttgtgtcgatgagtgtaagttggcagtgcgcacgtctcggtttttttacatgatttaaggaaagacttttatgtcagaacttggtgcctgtaccgtcaaccccgctgctgcccgtgtttaaacgcaggagaactttaaaactggccatctatcttttcagtgtacaagtcactgaacccattgtttctttctgaagagactttcctttcaaggcttcccatgggtccgcgccacacagggccggtgctgctttatttcagactctgccccaggttccaggaatccgaacyccggagtgctgacgcggttccccaacttccgccttaagaaaacaggaccagccggcaccaggcccgtctctcacgtactttaacacatccttgaaagcccctcgtttaatgagaaaagcgaacactgcggtccttgccaaagtaaaatgaagctgccccaggacaaggggttaccatgagctccctggagtccgacgcgggttttctctctgggggacctgggtggtccccgctgtggtctttgttgtcccactttgggaccgggtccagtctggggtctagtctcgagcatcagggtcaggctcggggcagggctgggttaggctccgggtcagtcttgccatgggtttgggagcaggtttgggttacttgcgtttgaaggcagcagtggtctcaggaggaagaaacgggggcgggagagagtggtgatctgtggtcagtgggtcagtgacctgcacggtgattctcccacctccaaaaggtaggggtgggactggaggcgtccctaggtcaggccgttgagttcgagctccgatgggccaccttgaatccaggactgaccgcccgtgtgtgcacagtttgttcttggacgaggactcgtgaggatcgagggctggggaccccggtgtgagcaggatggggccctgccctcccgtgggagttgtggactcgagcccaggggctgcccgtcacagcggtgtcccaggtccctgccatccgattttacctgggatgtcttctctggagtttggaattgcttgaggaaccctgcgtgtgcttggagaggccagagggcttgctgagaaccccatggacagtggagagcgggattcgaaccaagggctggactcccacacctctggcctgcgtcgcccagttctttgtggctctgaagaattggccgctgtggaaaagagcaaatgtccgagacccccaacaggaagagtctaaaaatccagtttgcaaccacttctgacctacaaaaaaatggaaatttagtgtttttcagcctaagacattaaatttcatatcagaacaaagcctgccccaggctgaccctccccagccgtaccgtggtgaacgggttcagaggatacgtgggctgaaggctgggcctcgggagggctgggggcttccagagccggggcagctgcagctctctctggtctcacctggaacttgccctgtagatcctccctgccctgcggctccaatcgaccgtgcacgggccgtggcatccgtcccccaggcgtccttccctggtcttagcttgtacagctccccacccacccaggtactcggttcccggagaccagggccaaaccaggaggccctcgggagatggggggtcaccgaattcatttccatgtgggaacttgggatacaaaacagccaactcttcctcagccacacggatgtttctcctctagtggccccgagaacctaccatggaggggacagtgtcagggctggacgggcacggcgcagccacacgcacacagcccccaggaggcacagggccggcagggaatgcaggtcaagccaagaggatgggctctggtcccttcaggatcccccaggaggagagcacccccttctgccctcttcctggggactatggtcctgcctctctgccccctgaggctggcatgcaggcacctgacgttggctccagctctctgggccagccctgggtacccgccgggcctgtggcctggttggtcacccccaagatgcaaagtgctacctgcatccggaggcacccccgcccctgaggcctccaggttcccacctgcccacctgtgtctggctgggatcctggctgtcaaggctcctgttacgggactgaactgtgccccctaaaagatattccaagccctaacccagcagctacaaactgaccttgtctggaagtcgggtctctgcaggtggaattgcgttaaggcaaggtcctgaggtggccttactcccacggaactggtgtccttaccagaaaagacctgggaaaaagccactgtgtggctagagactgacatccaggcgatgcctctgcaggccaaggattgaggaccctccacccccaccccaccaggcaagggaagggctctacccannnnnnnnnnnnnnnnnnnnnnnnnnnnnnnnnnnnnnnnnnnnnnnnnnnnnnnnnnnnnnnnnnnnnnnnnnnnnnnnnnnnnnnnnnnnnnnnnnnnnnnnnnnnnnnnnnnnnnnnnnnnnnnnnnnnnnnnnnnnnnnnnnnnnnnnnnnnnnnnnnnnnnnnnnnnnnnnnnnnnnnnnnnnnnnnnnnnnnnnnnnnnnnnnnnnnnnnnnnnnnnnnnnnnnnnnnnnnnnnnnnnnnnnnnnnnnnnnnnnnnnnnnnnnnnnnnnnnnnnnnnnnnnnnnnnnnnnnnnnnnnnnnnnnnnnnnnnnnnnnnnnnnnnnnnnnnnnnnnnnnnnnnnnnnnnnnnnnnnnnnnnnnnnnnnnnnnnnnnnnnnnnnnnnnnnnnnnnnnnnnnnnnnnnnnnnnnnnnnnnnnnnnnnnnnnnnnnnnnnnnnnnnnnnnnnnnnnnnnnnnnnnnnnnnnnnnnnnnnnnnnnnnnnnnnnnnnnnnnnnnnnnnnnnnnnnnnnnnnnnnnnnnnnnnnnnnnnnnnnnnnnnnnnnnnnnnnnnnnnnnnnnnnnnnnnnnnnnnnnnnnnnnnnnnnnnnnnnnnnnnnnnnnnnnnnnnnnnnnnnnnnnnnnnnnnnnnnnnnnnnnnnnnnnnnnnnnnnnnnnnnnnnnnnnnnnnnnnnnnnnnnnnnnnnnnnnnnnnnnnnnnnnnnnnnnnnnnnnnnnnnnnnnnnnnnnnnnnnnnnnnnnnnnnnnnnnnnnnnnnnnnnnnnnnnnnnnnnnnnnnnnnnnnnnnnnnnnnnnnnnnnnnnnnnnnnnnnnnnnnnnnnnnnnnnnnnnnnnnnnnnnnnnnnnnnnnnnnnnnnnnnnnnnnnnnnnnnnnnnnnnnnnnnnnnnnnnnnnnnnnnnnnnnnnnnnnnnnnnnnnnnnnnnnnnnnnnnnnnnnnnnnnnnnnnnnnnnnnnnnnnnnnnnnnnnnnnnnnnnnnnnnnnnnnnnnnnnnnnnnnnnnnnnnnnnnnnnnnnnnnnnnnnnnnnnnnnnnnnnnnnnnnnnnnnnnnnnnnnnnnnnnnnnnnnnnnnnnnnnnnnnnnnnnnnnnnnnnnnnnnnnnnnnnnnnnnnnnnnnnnnnnnnnnnnnnnnnnnnnnnnnnnnnnnnnnnnnnnnnnnnnnnnnnnnnnnnnnnnnnnnnnnnnnnnnnnnnnnnnnnnnnnnnnnnnnnnnnnnnnnnnnnnnnnnnnnnnnnnnnnnnnnnnnnnnnnnnnnnnnnnnnnnnnnnnnnnnnnnnnnnnnnnnnnnnnnnnnnnnnnnnnnnnnnnnnnnnnnnnnnnnnnnnnnnnnnnnnnnnnnnnnnnnnnnnnnnnnnnnnnnnnnnnnnnnnnnnnnnnnnnnnnnnnnnnnnnnnnnnnnnnnnnnnnnnnnnnnnnnnnnnnnnnnnnnnnnnnnnnnnnnnnnnnnnnnnnnnnnnnnnnnnnnnnnnnnnnnnnnnnnnnnnnnnnnnnnnnnnnnnnnnnnnnnnnnnnnnnnnnnnnnnnnnnnnnnnnnnnnnnnnnnnnnnnnnnnnnnnnnnnnnnnnnnnnnnnnnnnnnnnnnnnnnnnnnnnnnnnnnnnnnnnnnnnnnnnnnnnnnnnnnnnnnnnnnnnnnnnnnnnnnnnnnnnnnnnnnnnnnnnnnnnnnnnnnnnnnnnnnnnnnnnnnnnnnnnnnnnnnnnnnnnnnnnnnnnnnnnnnnnnnnnnnnnnnnnnnnnnnnnnnnnnnnnnnnnnnnnnnnnnnnnnnnnnnnnnnnnnnnnnnnnnnnnnnnnnnnnnnnnnnnnnnnnnnnnnnnnnnnnnnnnnnnnnnnnnnnnnnnnnnnnnnnnnnnnnnnnnnnnnnnnnnnnnnnnnnnnnnnnnnnnnnnnnnnnnnnnnnnnnnnnnnnnnnnnnnnnnnnnnnnnnnnnnnnnnnnnnnnnnnnnnnnnnnnnnnnnnnnnnnnnnnnnnnnnnnnnnnnnnnnnnnnnnnnnnnnnnnnnnnnnnnnnnnnnnnnnnnnnnnnnnnnnnnnnnnnnnnnnnnnnnnnnnnnnnnnnnnnnnnnnnnnnnnnnnnnnnnnnnnnnnnnnnnnnnnnnnnnnnnnnnnnnnnnnnnnnnnnnnnnnnnnnnnnnnnnnnnnnnnnnnnnnnnnnnnnnnnnnnnnnnnnnnnnnnnnnnnnnnnnnnnnnnnnnnnnnnnnnnnnnnnnnnnnnnnnnnnnnnnnnnnnnnnnnnnnnnnnnnnnnnnnnnnnnnnnnnnnnnnnnnnnnnnnnnnnnnnnnnnnnnnnnnnnnnnnnnnnnnnnnnnnnnnnnnnnnnnnnnnnnnnnnnnnnnnnnnnnnnnnnnnnnnnnnnnnnnnnnnnnnnnnnnnnnnnnnnnnnnnnnnnnnnnnnnnnnnnnnnnnnnnnnnnnnnnnnnnnnnnnnnnnnnnnnnnnnnnnnnnnnnnnnnnnnnnnnnnnnnnnnnnnnnnnnnnnnnnnnnnnnnnnnnnnnnnnnnnnnnnnnnnnnnnnnnnnnnnnnnnnnnnnnnnnnnnnnnnnnnnnnnnnnnnnnnnnnnnnnnnnnnnnnnnnnnnnnnnnnnnnnnnnnnnnnnnnnnnnnnnnnnnnnnnnnnnnnnnnnnnnnnnnnnnnnnnnnnnnnnnnnnnnnnnnnnnnnnnnnnnnnnnnnnnnnnnnnnnnnnnnnnnnnnnnnnnnnnnnnnnnnnnnnnnnnnnnnnnnnnnnnnnnnnnnnnnnnnnnnnnnnnnnnnnnnnnnnnnnnnnnnnnnnnnnnnnnnnnnnnnnnnnnnnnnnnnnnnnnnnnnnnnnnnnnnnnnnnnnnnnnnnnnnnnnnnnnnnnnnnnnnnnnnnnnnnnnnnnnnnnnnnnnnnnnnnnnnnnnnnnnnnnnnnnnnnnnnnnnnnnnnnnnnnnnnnnnnnnnnnnnnnnnnnnnnnnnnnnnnnnnnnnnnnnnnnnnnnnnnnnnnnnnnnnnnnnnnnnnnnnnnnnnnnnnnnnnnnnnnnnnnnnnnnnnnnnnnnnnnnnnnnnnnnnnnnnnnnnnnnnnnnnnnnnnnnnnnnnnnnnnnnnnnnnnnnnnnnnnnnnnnnnnnnnnnnnnnnnnnnnnnnnnnnnnnnnnnnnnnnnnnnnnnnnnnnnnnnnnnnnnnnnnnnnnnnnnnnnnnnnnnnnnnnnnnnnnnnnnnnnnnnnnnnnnnnnnnnnnnnnnnnnnnnnnnnnnnnnnnnnnnnnnnnnnnnnnnnnnnnnnnnnnnnnnnnnnnnnnnnnnnnnnnnnnnnnnnnnnnnnnnnnnnnnnnnnnnnnnnnnnnnnnnnnnnnnnnnnnnnnnnnnnnnnnnnnnnnnnnnnnnnnnnnnnnnnnnnnnnnnnnnnnnnnnnnnnnnnnnnnnnnnnnnnnnnnnnnnnnnnnnnnnnnnnnnnnnnnnnnnnnnnnnnnnnnnnnnnnnnnnnnnnnnnnnnnnnnnnnnnnnnnnnnnnnnnnnnnnnnnnnnnnnnnnnnnnnnnnnnnnnnnnnnnnnnnnnnnnnnnnnnnnnnnnnnnnnnnnnnnnnnnnnnnnnnnnnnnnnnnnnnnnnnnnnnnnnnnnnnnnnnnnnnnnnnnnnnnnnnnnnnnnnnnnnnnnnnnnnnnnnnnnnnnnnnnnnnnnnnnnnnnnnnnnnnnnnnnnnnnnnnnnnnnnnnnnnnnnnnnnnnnnnnnnnnnnnnnnnnnnnnnnnnnnnnnnnnnnnnnnnnnnnnnnnnnnnnnnnnnnnnnnnnnnnnnnnnnnnnnnnnnnnnnnnnnnnnnnnnnnnnnnnnnnnnnnnnnnnnnnnnnnnnnnnnnnnnnnnnnnnnnnnnnnnnnnnnnnnnnnnnnnnnnnnnnnnnnnnnnnnnnnnnnnnnnnnnnnnnnnnnnnnnnnnnnnnnnnnnnnnnnnnnnnnnnnnnnnnnnnnnnnnnnnnnnnnnnnnnnnnnnnnnnnnnnnnnnnnnnnnnnnnnnnnnnnnnnnnnnnnnnnnnnnnnnnnnnnnnnnnnnnnnnnnnnnnnnnnnnnnnnnnnnnnnnnnnnnnnnnnnnnnnnnnnnnnnnnnnnnnnnnnnnnnnnnnnnnnnnnnnnnnnnnnnnnnnnnnnnnnnnnnnnnnnnnnnnnnnnnnnnnnnnnnnnnnnnnnnnnnnnnnnnnnnnnnnnnnnnnnnnnnnnnnnnnnnnnnnnnnnnnnnnnnnnnnnnnnnnnnnnnnnnnnnnnnnnnnnnnnnnnnnnnnnnnnnnnnnnnnnnnnnnnnnnnnnnnnnnnnnnnnnnnnnnnnnnnnnnnnnnnnnnnnnnnnnnnnnnnnnnnnnnnnnnnnnnnnnnnnnnnnnnnnnnnnnnnnnnnnnnnnnnnnnnnnnnnnnnnnnnnnnnnnnnnnnnnnnnnnnnnnnnnnnnnnnnnnnnnnnnnnnnnnnnnnnnnnnnnnnnnnnnnnnnnnnnnnnnnnnnnnnnnnnnnncgacctgtccattcctttgctcctgggtgcccagagggggctagagatggcacattccaggggaattgcggctaagtggctgatcacctcccactggggcagaaaccaggaggcagaggccagggaggtggtgccagcaccaggacatccccacgccccccattcaccctggccccagccccccccattcaccctggcccccatgccagcccccagccacccccgaccagcccccatcccccacctcattcaccccggccgtggtccctgccccagcccccgccgcccccattcaccccggccgtggtccctgccccagcccccgccgcccccattcacccgggccctggcccccaactcattcagccccggccccccgccccaccactccacgtctctttgtctctcatcaccatcttgctctacgcggccctgggtcccatttctggcatgtccatctgtcatc

SEQ ID NO: 93448 - DNA, 32124 bp, Homo sapiens
  misc_feature (1)...(32124): n = A,T,C or G
gcaaattttaaaagcataacaactatttacatagtatttatattgtattaggtattataagtaatccagagattatttaaaacatatgggagagtgtgcataggttatatgcaaatactacaccattttacataagagacttgggcatctgtggactttgttatctgcaagggtcctggaaccaattccccatggatactgagggtcaactgtaccaagttgaaaacaaaacaaaaggaaatctattgcaaaaaggaaattcccaaagataaaaagcatgtctatgaaatagtcaaagagccgaaaatgttgggaagacccacactgctttccctgccctgtgcccctttttgcagatctatttgtgtctttatctaccagcagatattctattattctaatagattcctgtttttcccaagagggtttacttatttattaaatatgatgcaaacatctctctcagagatgttgctctctcttcctaggattccttagccctaaatctgcagagccaattaggtattaatattgggctttacaactttggaccatctgaccaccaagactgattcattaaatgtatatggtttcagatcacattaatttatcatagactttagaattggctttttagaagtactgctataaggaaaatctcagcatagcaagttttatctaatagtctacttgtattaaagagtactcaatgtaaaccctaggaagacttttaactgccttttggaaattggttgagtgggatttgaaccgtgtactctctgtaaagcaggaaattatcacttagtaattactaagtatttaaaaatgggaaatagaaaattacatttcagacctggtgcagtggctcatacctgtaatcctaacactttggcaggtggaggcaggtggatcgcttgagcccaggagttcaagaccagcctgggcaacatagtgagcaactccatttctactaaaaataaaaaaaattatttgggcgtgatggggtgcacctgtagtccccactactcaggaggctgagacaggaagattgcttgagcctagaaggtcaagcctgagtgagcagtgaccggccattgtattccagcctgagcaacacagcgagaccctgtctcaaaaaaaatgtatatttttaaaaaaagaaaattacattttagttgttccataaatatcagtacaaccaaacctaagtgcaaaattcccaacacaaatgatcgcctctgggccagccatgtagcccccatcttgctgtcaataatcatttccaggggctgtaattgtcttccttccccctgtaccaccccatcacaggacacaaattgttttgcttagtttagatagctgtgactaaactaagtgccaattgtcttttaaaatatgtgttaatcagcactcaagattgttcctacaaaaatgtcactccctcactcaatttgcatgtgccctcctgagtaggagagaaagagctgagttagaggcagccctctgggacctgcacagaaccctgtatgcttccgggagtgtggagtgtgtgtctgatctgctgctgggaaaaggagaagaaatgctgagacactcactgccaggggctggtatcaggccattttcacaggggctgttggagggttgacagcacagctctactggaccagggagggtcccagccagcagggcctgcccctccgaaactgtccctgtccctgtccctgagaggccccactgagtgtcagatggcacataagagatttccttatgcgttggtgtgaaggagatgatcagttccaggaggcccctcccccatgcagaagagaagaaaatggaagaaaccgggttctcagagtggcctgcgggtgagtgccgccttgtgctgtcagttcccttcaccttccagttctgggtgtacctagtgtggtttcatcaaactgctgaggccctggaattgagggaggatgctgaagggtgccaggccatagaagcagtagcaggagctgcagcaaagagctagtgtgtctccagcgtcagcttttgggccttggtggcatcaaaggagacgtacacagggccactgtactacggatgggattcttggaacaaaagtttgaataattgatgagtgtggaagtgctatgcaaaaattcaattcaacctgcagttaccaggcattcattctgtgacaggcattattgtgagggtggcaaggagacggggagtctctgagagactcagagaagagcagggcatggtgtccacccacaagagatctgaagactttcaaagtagttgggaaaacagacatacaacttttttcccctccccacagctagttgaggcaaaagacatataacttatacagtgacaaaatactactgactgttactgacacataacagcctgggctgggtcactggtgagaaaaaggaggattcttgcttttggggcattcaagtcctgtccattaaccatttcccaatcccatatttatacatcccattttagacatattaagctgaagattgatgtgacatacccaaagacacttaaggttgaagctgagaatctgggctagaaatataaatcaggatgggctgggagcggtggttcacgcctgtagtcccagcactttgggaggccgaggcgggcggatcacttgaagtcaggagttcaagacctgcctggccaacatggtgaaaccccatctccaccaaaaatataaaaaattagccaggtgtggtggtgcatgactgtaatcccagctactcgggaggctgaggcaggagagtcacttgaacccgggaggcagaggttacagtgaaaggagatcgtgccactgcactccagcctgggtgacagagcgatacttcgtttcaaaaaaagaaaaaaaaaaaaaagaaagaaatgtaagtcaagattaaagacaatgggtgagatcagcaaggagcatgtgtgcggagaagagaacaccaaggaaggctgcgtgtggtgggaggtggccggggggcagagaaagaggcggcggagccaaggagatagggcatcgtctgaatggtgatgctgtatcaacagatgtgaaattcccagaggtgtgaaacacagcagatcctttacagcacgatgacaggacacagcatgagcctacctctgccaggtgagaggagctttctgcaacctgtgatgggctcaaggatgctgaccattcatccgcccattgggatagcccaggctctgagctcagcactccacccgtcactgcgattgcactaatcctcacccacccttgcaggcaggtattactgtgggcacagagaagtttgctaacttgccagagatcctgtgtaggaagccaggtcaggaaacaaccagagtctctctaacagcccaggccttgaatgaacaccggcctgcttcagaatacatggcccgtgatgtgtttgaattcacagattcactggacaggttccctatagggcctgtgaggaaatctggtctaacagaatccagaaagacaaatttcgctaaacaggtcaagcctgatactgctgctacacttcagctgtgttaagccactcggttatcagacctgcttctcctttcatgattttagtaacacaggcctcttccttgggcccctgttgctcccaccatctcccaggttctcttgtactcagggtttagtctcccctccccactactaatgatgcatgtgccttactctctgatcatctctcctaaatctgctactcctctgctctttctgtgccttatctatccctgccgagtctaacatgcagattttggtcattccaaagtcatgtatagatctaatcacagggctctctgcttaccagctgctacttggataaggaaagcatgccaacacggtcctccttcttcatgctggccaagtcagcatcattattattacctaagtttatttctaacacatctcaatatcttcatgcactccctcttgataaaagtaactgagcatagcaccatcaataccatcaaatctgtcattctcttcccctctctctgggtgggacaggaagccaggctgctctaggaaatcttccctaacaagcaaaggggacttgcctgtcctctcgcatgtgtgatctgagcttgtgtggatcccagagtgggcattctggactacttgaccttgcctatctctccttcacaccctctcatctctccctcctaccaccaaaaaacttgcatcgtatttccaatctccagacatacttttgaaaccatttatctatctggtgtgtttatctgtatctagtatgatgtgaatatgtgatttgtatgtgtgtctaccactgttttggtcagtttgtatttctcgtgggtacagttctatgtgctcatgtatgtggaacatatgtatactgacacatggacctagctccaaatgatctgaaaggaatataattgtaattgaatatttgcacagatatacaacatacacatgtgatggctgggggaaatgcatgtgggatttcagtcagcattttattagagaaggtatgtcattagtgctgtattaacaatgaatcagcttatttgtgggtcactgtcaatgactcctttgcaaatcacacatgtaaatatttctgtctgtggtctgatgaacatgcagtgccacagtctgggagatgctgagccatgccctgtgtaggcagcatatgaaaagaactgcatgatttaaaagatgctgaccagcttaaggaaagcaatttaaaaacttcctaaaaatctagtttgaatgaacaacagttttcattttgtgtgtgtgttttttcttttagagatggggtcttgctatgttggccacgctggtctctaactcctgggatcaagcaatcctcctgcggctcagcctcccaaagtgatgggattacaggtgtgagccaccgtgtctgctggccccactgttttaaaccctgattcgacaatcatacatttaactcattacctgtcttgttccttttacgacaaactcaaagcttttattttactaaagtatttgggttaatcttttgcttttctgtcatgttctgaaatatgtacaataacagaatcgctcaaaatattatctccgttaaatgttttgtggctttagggagaggtctaacaacatgcgggaaacaagaaatcaagcgcatccaggattcatttataatctctctcgttgagtagaagtccgcatctctcgatattgtctggttacctgcatgaagtattctaaaggaggaaaatagctcaaagaggacattcatgtgcactctggcttccagttggccatttgagtaagtgatcgcaattaactgacgagcggcagggaaacacttcctggaattctcatctacagacaagaacaaactggggcggggcccatcaccttcacctacgcgccgggagggtggcggcctggcgggcggcccctcctgccccccctcccccnnnnnnnnnnnnnnnnnnnnttttgtttattgggggggggggagagaagggaaggggggcaaggggggaggaaagcggaagaggcagggcgggaacgcgagcggaaaggaagggacggacagcggcgggaaacgggagaagagagacggagaggcgggcgagggcgaaacgggcgggagggaacggcggacgggaagcgcacagaggggggggcgacaggagcgggagagaacaaacgaagcgggccgggggcgggggacagacggccaagcgacggggagaaggggggaggcggggcgggcggaaagggggcggaggcgggaacgaaagaacgggaaaggaacacggagggagcggcgaagaaggaaggggcggccgacacggaaagaaaggggcgcggaggagaaagacgcaaaagaggggcaggagggacgggggggaaaggcgggggaacagggcaggggagcgaagggaaaaaagagccgcccccatcccgcccgcatacagcccgcatcccgccggggaagcgagcccagtccagcgctgcccgtccagtcctcgcccaagatttaaagcccgcaagttttgttcttgagaccagcgactttagctccgatgcgggaaggaaagccgacctccgatttggacatttaaagagctgggcttgaacttcgtgagtttcgctctaaactgcccttgaaatgaagctggacttggaggtaaagtcactgggaagctggcctggggcggggtttccccctcttctcgtattttagaaacggacagcggcagtgcagccctagtttgctgtaagtttccttactttgttactgaggcccccagagctccacgcataagtggtgtgaccagaaaccttttaacaagacccgcctgagcctgcgttagagctcccgctcggaaagtaaaagaccatcctaatccgcggcgctgcggaaccggtgtcccgtgtgggaggaaccgcggcgttccctgggcgtagggcccgcgaggccagcacagtccgcctcttggcggagcgccctgggccggtggttccgcgcggagttagtctgtggtcagttacgtggtgaaaacacggctgtgccgcggccgcatctttccgcggccgaggcctctctgggtgggagtgttggcttcctttccggatcgctaaatggggaaagttctggccgctcggcgggatacgtctccaggccacggatggttcgttctccgtgccgcggccccgagctgggctccctgggtctccagcgcgggctcccggcattgggggctgcgggccggcccctccgccccgcccccgccccgccgcgcctcctcggccgagcggctcgcggtctccggcgcgggaggctccgagtctgcccactccgggccgagcgaggtctctggaggagaagagtggcgaggaggtgagggcacgccggccctcgcccggcgggtggcgccaggacttcaggtgggaacgcgcgcttgggccgggggcgcgtggctggcgtggacaccggatcggggcccgccgccctggcccggaccgcgcacggcccagcgccgggaagtcgggaagccggggaggcctctcccaccgcgggccccggcagcccgccctctgaaagcgcggcggagaaggaggctcgtcccctccccggaacgcctttgttccctccggcctgcccgcgcgggtggccagcggctgggacccaggccgggccgccgcccaggtgcggcaggtaggctcgggggccgggcagctccggttggggcggcttcccggggcctgcgggtccccgtccctgaggagctccggctcctcggtggcgggacaggcccgtgcgcgggagccgcgaggcgaacgccgcgcccaccaattcggttgccggccgggggccccaggcttgcggccacccgcctccggctggagggctgaattcgagtcgaaagcccgtgtcgggctggaaagaagaaaccgccaacctgagaacgctttcggcgagttactggcgggggaaatggggacagggaagtgggcaggcggggagactgcagccgcagatctccctggcggggaggtcgtggccactctttcctttgactctgcctcatttcattttgaatcctgatgtgacagaggcaattgcttgcttggataccatataggtaaaagtaacagttttcaactcgactcttgactacaccctgtacattcttggccggtgttggttttcttaggttatggatcatgttaaaggtacaccgatgtggtaaccgcacagtggccgatggtggcctgaggctcatatttatggtaattatctgatgaaagtacatccatcagaattggatttgtgcstctgtgcctttattttgggaaaccttgcctgttccctgtgggggatgggagaggaatgtgaaaagccgaagttgacccagaaaaggatgattgaaggtagttgtattaagtggtggcaccgaaatgattccaccctgaactttctgaaagggtgattagtgatcagcagcagacgttataactttctcaaaataaatttatggtagattttctatctggtcacaagtgaggaggtgaaagctgctttttggggccaactctttgcttttaaagcaagctaaacgcaataccagaaaggtttccattctgtacttaacctgcttgtccttctcactcttccttatcctcccgcacacgctctgagcattgactgagcactctgaggaggasgctgactcaggctgacccttcccggccctgcaaggctctaaggtagaaccagtgttatcacaggaaaggcccaagccaaagctcagagcagctgttcctgagaaagtgggagatgaggatgagtaggaggtagagatgcttataactgctctgcccagagaaaactcagaaggtgcagaagagttttcaaaataaagtgcaggccccatcaagtaaaaaatgaaacattgtatttcattaaaatggtgatcagttttctcttttcataaaagacattcaaatggtgagattgtaaaaaaaaaaaaaaagaaaaagaaaactttctaattctcaaaaatagaacagcttgaataataactcatgggttttgaaatgggtcatcttttaaaatgggtcactttggctagaatcattgcacttggtgactttcacattgtaaagggtccagttctttytgaggcccaattgcactagaatctgcatttcagaacacaggaggtatcaggaagaaactgggagaaattcagagggaaattgtctcttctcagagtaacaaaatgtcccctattcagggggaattttatatatgctgaagtaaatagatctcagctttgaatttttataatacattatgccttttctgaaatatttccatagccattattttaatgcattgttagaataaccttgtaaggagaggaattcattgtatctgtgttccagaaactgaggcacagtaaattacaagagctctgccctttgatatcgaatctctgtgagcgaagatgtaaccagaacagtgtaaatctagaattactttccttacggtatgcaatatctaattattatgtattagtttacatatatataggggatgtaagaatctttatatttaaaggataagaaacttgatcaggtgagatacaagatttgaataaaaaagcgattttttagaaacattttaattctacaaattcagttgctggctttgatatgtaacttattcagatttctcttccatagaaggctttaacactagaagccagttctctacaaaagagaatgttctaccaagtgtgtaggcaacaaagcccaaaagttcaagttcaaaatactgttctacagcctaagatccacctaatatttcagatttgactcttttgctcctttcctataacttcctataactttttcatagtgctctaagcaaagtaagttcaaggatggactcacctcaagtttccttctcttactttagaggaccatataatcttatacctgtgtcatcctaattgaaatgtattttaagtgcttgtgggaacaagaataacggaagaccgttattccattaatggaataatggggaacatgagaaggaccatattcagtcaattagggatgatacttctgcctcaacagtatttgcgatgtgttaaatggcccttagccatcagatcagtatttttaaaaactcctacctaattaatgttttttgagaagaagcatattatgagtatagctcagtattctaaaaagaaaaaaacctgaaaaaaaaatcagccatccattaactaacccatcctggtaaagctacacaaacagattctagagaaaggaaatttgcacagatggaacatctaatctggactgacattgtcaacaagttatctcaaatgatcctgagaaaacactggtacatggtttagagacaagtcgagctcatgtgactagtaaatggagaggcacagtatacatctacttttgttggcatttaaacactctcggcttttttactctctttcaccaccatcaggtccagattccagcttgcactggaatatttattgaccctttgatagaagagctacacctgaaacatctctgaagtctttttagcatcctatcctgcccatggcctactacacagtatgtgataagttaatgtttgttgaattagttaaatatacgtattaacctactttcagggctgcccgctgtaatgcctagaatagggcaggcacttaataaatggtagttaacttagactaaatgttgatccaccaagacagaaacatgttacatatacctcttgttttacaccatcttctactttttgtacctctgtgttataaaccctctatcaagtgttgcttctaaagacaatgtmcagaatgggacgtaggaactgccactgggcaacaggcagacactgggttatatcgtcatcctgtttctgaatcctggtttttcttattattattcaaccacagctaaactttctgatctccttttttccgttttttccctttaccctaacttctagccaaactaagtgatttgacatttccccactcaagccacaactttttctcttatgtgcttaaaaaaaattcctgcgtagtctctcttggaatgtcttattccttgctccctccacttcacccttttttttttttttttttttttttttttgagacggagtctcgctctgttgcccaggctggagtgcaatggtgccatctcggctcaccgcaacctccgcctcctgggttcaagcgattctcctgcttcagcctcccgagtagctgggattacaggcatgctccaccacacccagctaatttttgtgtttttagtagagatggggtttcaccatgttagccaggatggtcttgatctcccgacctcctgatccgcccgcctcggcctcccaaagtgctgggattacaggcatgagccaccgcacccggcccacttcaccctttaagccagttgaaatgctccttgccctactcctcccttctccttttctttctcccatccaagtactaaccaggcccaaccctgcttagcttctgagatcagccaggatcaggtgcattcagcggggtatggctgtagacttctctttctgagctgtgtcttcctcctttcctccccaaacccacatttgaattctgttctagctcctgctcatttgccacctctcccacaaagccttccccagtttccatcttctccctgcttccctcatctcagaggaaagctcttcattcacagagcacctggtttggggtccatagtttgttgtccctcagtatccttggggaattagtcccaggacaccacccccccgcccctgatatccatgcatgctcaagtcccttatataaaatggtacagcatttatattataacctatgcaatattcccatgtactctttttttttatttttatgtgtttagagatgggtctcactctgttgtccaggctagagtgcagaggcatgtagccttgagctcctgagtcaaatgatcctcctgcctccgcctcccaagtagttgggattacaagtatgagctaccacacctggcccatgtactttaaatcatctctagattacttataataactaatgcaatataaatgctatgtaaacaattgttacacggtattgtttagtgcataatgacaagaaaaaaatgtgcatgttcagtacagacacgaccataaatttttttttcaaatgtttttgatctgtagttggttgaatctgaggatgcggaacccatgaacgtacacgaccaactgcatatgggtttctaataacagatttgtggatgaagcccacccaacataatgcaacatttcaaatgtatcttagtcagtttttctggggcaaagccagcctaacaaatctcaagaatgtttgaaaaattctagcttgagtgaacgttgttcttctagtgactcaaataaagcagtcattgtgtctgaggagtcctagtggggtggcaggggtggggctaggagtagtggctgtttgtagcatgttttatatcacattaaagggctgggtatgcattttaggcaataattcttactcttattgataggagaacttgtattttttattcatctaccttatgatggataactggtttacatctcttcatcaggtttacttcttacgtgtcattttatgagctgactttgaatatatcttcagattttccctgcctttacacatgaaaacggttttgatacagctttttcattagagaatggcagcttttccaggccagggtgtctgtgtctgactcctcgcctttcattttacccaatacttgcttaaaacatcctccctgagtccggtacttttttgcctcctctccttccttccaccccacctctttttgtcaccctcctgcgactttggatctccatccttggagtccctgaatcttttttgtggttgaaagactacacccaaaggacacagactgatgaggtcacttctgcccactgtctagtactagtgagaccaagaagaagaaggagggaaaactgaaatggaaggtttgaaaaagagtgtgttagtgaaggaagtaagaacagtgctaacagaatgcagcaaaacagaaatgacttcacacttctggcagtgaagcaaattctcatccatcttgggttgcttctcttgaccctgcccacctcctcccctgccctcccctcccgatgagaactgcaggaacacctgtgcccatgccaaggaaaaagggcaggtgaggaacacagggatggggctgggactcacaagctgctctaagctgccacagggtctggaatttgttgacattacatggttaactcggtatctcgatgcctcagtatcttctgcaaaatgtggagggagatcctttcttcctcaaaggttgttgtaaggcttaaagagctaccacattcgtaaggcatttggaacagggcctggtatatagtagacatacccatggtagtaactgttgctagactgggtaaaaggagaagtttcttaagtaggcaagaaaaaaactgacaacagttatatttaaaagagcaagcaaccgtgtcagcccaaacaagtgtgttgcaagaatgagcacagagggccaagctcagaaaagcgagtgtttgacctctctgagacctcctttatatgtcagcttttttatttgtttcaaattttgcataatcaaactggttactgggaattattgagttcatataacttccctaaaatctaagaataatctataatcccatgccaccagtcccgttaataaagacttagggtctgtctttacccatttgttcatttgaaattccccgtctttacttcccccataaccaggaaacagatctacacccatgtttaacttataaagagatataagtgagtttacataggtggagatcttgtacctggattcacattgtaggttttattacccagctttcccctctatcccaaagccatgattgccatagtggaatttaaagtctttggactaacactgaatcaagaactaactctacaaatgtattctctgcaggaggataagaattccaaatggcttctaattgttgcccatggcttgaaataaagttccatatagctaaagccccagcacaaaaacacttgaagacagccattaggtagaatttyttttcttttttagaggtcttatattggaaatgtaacagttgcaaagatatctaatrtttcaccttaaaatgtgagttataaattcacatttcacattgcctccttcctccttgagcaaacagactaggcaattagtaccaaatagtaactagttatatttcttaacaccgattattgtaagtaatttattaagaaaaaatctaggaagatcaaattatagcttttccagtaaatctggggctttttattcctgatctctctcaacaaggcagtttggcttctgaagattggtcctagctatacttaacaggaaacagatgacgagaagaagccaggaaaaaawacttggaatatagaacaaaatgcagcataaagatggtacagaagattttatctttctttcctttagttatgtgtggacaggaactaaaaactctcccacgtgggactttattaagtaataaaagtttaaatgtaaaagatataaaggaatgaggatataaaggaaatttttttaaaaactgtgactcaccggaggagccttatatagtctactttctaagcatatcacttttaaagggatcattatattttcatgatgcatggggatattccaagtattaaattgattttttaaatgaagaaaattatcagttcagtcttgttttctatgtaggtttcactacagtattttatttcccccgcaaggaaaaaaccagagctagaatggaatgattaaatttcttagttttcttctaatctgttagtctttccattaaattatactgccttcttatatagaatttctgggtttgttcttgttttggcaataattgaagtaagagaggatgattttatggtagaggtttgattccattctagattggtgtttttcagctatgtagaacacaatccattcatggttcagacaaccgttttaggaggttttcatgtccagcattaaaaaaaaaaaaaaaagaatagaattgggcattcatatatatatatatatatgaatatttattaataaaagtttaaaagatataaaggaatgaggaatgcatatatattatatatatatataccaaattaaagtatcataatactaatacaaggattagtatcgttttatgatactttattatatacactaagggttagtcttgttttatgatactttattatatacactaagggttagtcttgttttatgatactttattatatacactaagggttagtcttgttttatgatactttaggttggtatacatacatatactaagaatgcagacatgtccatggaagttggcaatattcagcccccagcaggccccagtcagcaggacagggattaggggagtcaggtgaggcagggctgtataagtgcagggttggagcctgtcttggtttaccgttttgacattttgttcactgtggatttttttcagtaactttgattttttaaaaatattgcatcaaaatattatactgactacggagtttttggtacccccttaaattgtgcacctaaaataagtggctcccttgtctccccctagtcccggcccgatcagtatgttttatagagggaatggtgagtgttggggaactagggagcccatgaggaggcggcccagaaggggaggaggagctgatggtgtgtctgatgtctcctcctttctctaggaagcagacaggaggtgaagtcttcagggtgggggggacagagcctgggagggggagatttagcatggccgctgaagagactgggaaagggagaaggttcgggacaagttcaggaacagtcacgtagcactgaaaactgctcaaagctagatagtgccatttgtggtgacgctgcctgcctggtaagtcccatttccccagcagccctggaggtgtcataggaacaggaagatgggagggcgctggggtctggggttgttggggtgggagggcaaaggtgtccaatgattctgcatctgaaacgggggaggtgtgtgaggaagaaaggtcaggagactgctgggcagggtggggtggcagaaggttctcgatgaatatttagaagttgcagctgaggagtgagtgtactatagagtgagtatcctggaatttgaggtctcagaagaaatgcagttctcagtgaagccatgtaaacaacttcctggctgataaggtgtcttgagtgttgggagatcacatgatcaaaatggtatacacaccataaggtgtccttagacttgagtgtggtgtaagtctactgaataaaatgcagaaatacagttcactgttgcttttcttcctggaaattgccctccccaacctcaaaccagcccccaagtggggcagggtccatctttagaccctcctgtagcacccagcacaaccctaactatatggtcaatgtctctcttccccacttagagctccaagaccagggccttgtttgtcctgcttacccactctacccatttgttaaccccatcttaattttctgatgaatgagcccttttttcattgactcctcctttctctccttctccggagtttatttttcctccaggcccattgctgtctctccacctagagagcttatccacattcatgaaattagtcatcttcatgctcagagtacccacctggatctctccagtcctgtctaactcgtcttagattattaccccctggacatctgtaccttcttgtctctccatcgcctcgaactcaatgcgagtctaaaatcaaatactccttcactcctaactcaggaaaccagttttccctcccttgttggtaatgcttgaaattagctcttacttctcttcttcctcctttactcgccatcccaggtcattcatcaggtcctgctaggtctttgattttcttgaaagggccttctttatgccttccttccgtccccatttccaccaccctcgactaggccttcctcacctcatccggcatcagtgtgagcccttgagaaaccagcgtcctgatcttcaggcattctgcatttcaccccataccaccattagccagtttaatccctcttgctcaaacttaataaatactgagcaagggagttactataacaaacaaaaccagaaatttctatgacttcctgctgctttctgtacccccctaagactcctctacctgattttcaaggttctccataagcaggttcccacctctctgctttcaaatcttctatctgccatacacagttcttgtctaaaacaaagattgttcctactcctgcagccacctaaatcctagtcgtcctcaggccctcctaaaatcctgactaatccaacccccaccgatttctctactagtcccagagacttccctcttgtgcctggggttggtgtcatgcagacacactgtaccttaccaggatttgcccattgttgtctgtgggaactatgctttcatgtgggaactacgagtcttgtcacaaatagagtgtaaatgctttgagattggagactgtaaaatacttcttcatgatctcccactgtgtctggtataagaacccgcagagtaaatactcatatacttgtaggattaattgaaacaactggagactgaggttgtttaacttgtacttagaagtgtggacctccccatcttgattaaaacttcaaaacggatagcaggtttcacatattatctcagcatcacaaaagtagactcaacaaagaaatgagttgacagcaggggtaaggtttacaacaatcagggattattgcagggaaacttgtagcctttgggtgttctaactagttttttcccaaaaagtttaaagagctctcttgtgaaagaatattcttatgagtaactgaggggcacggctcctagactgaaaagtatttgggatctgtcacctcttttctgatgttcctacttctattctttattcttctgactacctctattagaaaagataatactaagaatacctgtcccttcttctcagtccaaatagaagcaaacccaggttgtatctgagatatctgcatattttcttctaagcaattctttgtcctcttctctcccatgctttttctatttcctattttcagcaggctctgaagtcatttataatttttactgcccctcggtgacattacatggatattcatccctgatttgcagattaaagcaccgaatcagagtgaggtgagggttgcccaaggttacacaataaatctggccccaaacaggggtaacccttgagtttctagtctgttgattggccactgacccgtgctgcaggcacacaaaggaagctgcacccacagcagtctgttgtggatggttgctgagctgcgcattcggcattgggcttgctttgtttcctgccaggcccagcattttcttctaccagatcggcaggcttgtgggcttcttcctaggtccctcccctgcactctgaataggaaagctggaagctgtgctttagagaagctttaagacgccgaaagaaaccagaagagtgagcgccagttgtatgtgcgtggtctccatccgcaaagccggagctgggcgcaacagtgttgacttgtaattgatcaatttagatcgggcgcaggccgggggagggcagtgcttttgatttaggctgggaaaggcctcctagtgactatgttcaatttggaggaattcagatgttcttttgttatacaagtgaagctgtgtaatacaaatgaggagttttacttttcctaaatcttccccttatcattcaagtattgaggagttttacctttcctaaatcttccccttatcattccagtattatcagtgagatctggttgtgatttatgtaaatggtggctaaaaaattcaaactactgagggggagaattctcattttacagcttcacatgctgtgctgaactaaataagtagcgtgggatgttggctttgtgacaggtcttttgtcatttttcagaaagcattttgacttgttgatgtcaatttggaacagctgaaaaaatacaggaaaataagataaatacgtacatgttgagggtggggacaaaatgaaggttctgaaccagctgccggcttacagtagccatataagcaacagcagcaatgcaccaacctggtgagtaataggcctgattcactggagagatactagcacctttaatgagtcagatagatgcacaatgggtgtgggagcagttggacttgtgggcacaaagtctagcaagaagctcagacttgcaaacaactgtagkacgtgcaaagcaagctggcattggagcttgccgggcacagctgctcaggaataggcagctggttttccctttgatccctgagattccaaaggttactttcctctttgttcccttcccagggtcaattagagtagaaactgcagatgcttttcagttgagaattttcctagaattctcaaaaatgtgtatgctggcttaaaatctgccatcaagaattctgttaccttgctttaagcctccagttccttccagatgtatggtggaggaggccagagggcccttgttttggggcttcagargatggttgttatctggatgagcactgtggaaagactgagagagcaactgagagaaagtgggcccctgaatgaaagtgatttcgcaaattttaggcagatgccaccatcagaaactgatattttctgacgtctttctcaccttcctctagagcattcagtccagaaatgaccagcctgtccaaagggggaaattactgatdttgatctgttccttagagcagtgtttcagtcttttttttttttttgagatggaatctcattctgtcacccaggctggagtgcagtggcacgatctcggctcattgcaacctccaccttcctgattcaagtgattctcctgcctcagcctcccaagaagctggaattacaggtgtgcaccaccacacccggctaatttttgaattttttatagagatggggtttcaccatgttgccaggctggtctcaaactcctgacctcaagtgatcctcctgcctcggcctcccaaagcgctaggattacaggcgtgagccaccatggccggccttcagcctttgtgatattaaagcacagcaacacatttcccattacacccctgaacacacacacacagaaaacccaaaagtttcacaaaatgattcttgctcttactactctcagtacactctgtatttaaaaaaaaaaatgctggttgtggcttcctaagtggtgcgtgcagttttcaaatcaatgcccttggcgataaagtgtgccctatactgattatctctggacaaagtctgaatggggcttggctctaatctctagtcctcattggacattttacatacctggcctttgcctccaccctgatgtggagtgatcatgggggtgggaaatatagctggatccgaaagctctgaagtggggatggaggtgtcacagctgaggctaggcccattctgcagggcactcagtgtgtacagttggttttctatcaggggtcaaccggcggggggacttgagaacagatctctgggcacaaagcagggcctttgccctggggcttgctatgtggctcagcctacacggctctctccccgtcagtcctgtccaaagcccaggaaactaatgtaccacccccgaggaagagagcctacctttccatccaaggaagtgttttacctgtggtaagcacgggggacagaattcttgaggaaggagggtgctgcgtcccagtggtggaggaaaagagaggacctggtgtaagcagccatggcatggacctcatccgaggtggcacctggctagggtcctgacctccaatccttccccagtaaccatcactttgagtaaacagtggctccacccccggcatggttctttgcaccaacatttggggaatgcctaccaggggtcacacactgagctggatgctgagtgtagggtgtccacaacatcgtgcctaaaaagtctctgtatggggtataagaaggtgctggggcaatacagatgagatgagaagcatctttcagggaatgggttgatcccaattcaggcttcccagagaaggatgtctgtagacttcatattagcaagggaggaaggtagccaggccacaggactgctggtgtaaagaccagggcatatgaaatggcaagtgtgactgtgctttcagccaataatttggtattgtcaaatgatgggaccaaacagctggagaggcagatcctaaagggtcctgtgggccaggctggacttcatcttgtcactaactaatggagaggctctgaaggagttaaaagagctcagtttgtctcgtggttaaatccaagttttacaaaggtcacgctgactgtaaagtggaaggtgggctggccaggggatcatctagtctgggtgagaagtgatgataacatgaaggggtgaagagagatttagaagaagtgattcacaggattaaacatttaaataatggaagtggagaaaatggggggggcggttccagatttcaggcatagatgaaagaagtgcagttaggcacatgtaaagagaaacaggaacagcaggttttaggggagaagataacagaatgggtgagaaatgacacttgagtaccctagtgtgctaggtaatcatctgtctacttcccttcatttgtcatgtatattcccatttaatttgcataaagacttcgagttaaacggtcttaccccaatttgtcaaatttctgcgcatgatatggtacaagaaaccgtaagtggctaaggcggcattggtgttcaaattgcctgactacaaaggcagtgcttgttggctacattctgttgcttcccagtttagaacatgttacattgaggcgcctgctgcatttccaaataaaaaagtacagaaagaaggtggctgtataaatctggggctcacaaagtaattttgattactgagagtttgctttcaaggagcaaactgtgactccttgattatgaaccttaatttaaaaaaaaagaaaaaagaagtcttactcttattcctgccttgtctggggcaagccttaatggatttttactgctgtgaattttcttttcattgaagattttgccttgatctatgtatctgctttcatcctgaccatattcaagtcagtatattcatgaatgtacctgtttgtgaaatttgaacttaagtatacacgattatagccgtttgggaagcttttttttttttttttttaagagtaggagtagaaaaaggtctctgtactctgaatgggaagacagtgtaaagcaattttttcccttttcctgtcctcctttaaaaaaaataaacagccgtatgcctctgctaagtactaactacctcatcaccttttgtgcagacagggcaggttacatttggttttaaggaattaggaatatgtttctttccagcaccttagtaacccacgcgattgtgattcttttctcttcttgactgtgataggtggcatggaatattcacatgggagagccgcatgaggccgcccaccacgcttcctgaaggatgcccgtgtggaagaattttgacgtgccagtgtcctcgttctacagggtgttccattcttccgcaatctcagaaaaatgggactaaaagaaactattttgtaaaataagaagacttccatttttaatgaccarcatgtattaagatggacacctactctacgaaacacraagttctatggtctcgaagaagcccgtgcctgtttaaaactgatcctaactaaaaacagacttgagtggatatgagaatgttggttagtggcagaagagtcaaaaaatggcagttaattattcagttatttgctacttgttttttagcgagcctcatgtttttttgggaaccaatcgataatcacattgtgagccatatgaagtcatattcttacagatacctcataaatagctatgactttgtgaatgataccctgtctcttaagcacacctcagcggggcctcgctaccaatacttgattaaccacaaggaaaagtgtcaagctcaagacgtcctccttttactgtttgtaaaaactgctcctgaaaactatgatcgacgttccggaattagaaggacgtggggcaatgaaaattatgttcggtctcagctgaatgccaacatcaaaactctgtttgccttaggaactcctaatccactggagggagaagaactacaaagaaaactggcttgggaagatcaaaggtacaatgatataattcagcaagactttgttgattctttctacaatcttactctgaaattacttatgcagttcagttgggcaaatacctattgtccacatgccaaatttcttatgactgctgatgatgacatatttattcacatgccaaatctgattgagtaccttcaaagtttagaacaaattggtgttcaagacttttggattggtcgtgttcatcgtggtgcccctcccattagagataaaagcagcaaatactacgtgtcctatgaaatgtaccagtggccagcttaccctgactacacagccggagctgcctatgtaatctccggtgatgtagctgccaaagtctatgaggcatcacagacactaaattcaagtctttacatagacgatgtgttcatgggcctctgtgccaataaaatagggatagtaccgcaggaccatgtgtttttttctggagagggtaaaactccttatcatccctgcatctatgaaaaaatgatgacatctcatggacacttagaagatctccaggacctttggaagaatgctacagatcctaaagtaaaaaccatttccaaaggtttttttggtcaaatatactgcagattaatgaagataattctcctttgtaaaattagctatgtggacacatacccttgtagggctgcgtttatctaatagtacttgaatgttgtatgttttcactgtcactgagtcaaacctggatgaaaaaaacctttaaatgttcgtctataccctaagtaaaatgaggacgaaagacaaatattttgaaagcctagtccatcagaatgtttctttgattctagaagctgtttaatatcacttatctacttcattgcctaagttcatttcaaagaatttgtatttagaaaaggtttatattattagtgaaaacaaaactaaagggaagttcaagttctcatgtaatgccacatatatacttgaggtgtagagatgttattaagaagttttgatgttagaataattgcttttggaaaataccaaatgaacgtacagtacaacatttcaaggaaatgaatatattgttagaccaggtaagcaagtttatttttgttaaagagcacttggtggaggtagtaggggcagggaaaggtcagcataggagagaaagttcatgaatctggtaaaacagtctcttgttcttaagaggagatgtagaaaaatgtgtacaatgttattataaacagacaaatcacgtcttaccacatccatgtagctactggtgttagagtcattaaaatacctttttttgcatcttttttcaaagtttaatgtgaacttttagaaaagtgattaatgttgccctaatactttatatgtttttaatggatttttttttaagtattagaaaatgacacataacacgggcagctggttgctcatagggtccttctctagggagaaaccattgttaattcaaataagctgattttaatgacgttttcaactggtttttaaatattcaatattggtctgtgtttaagtttgttatttgaatgtaatttacatagaggaatataataatggagagacttcaaatggaaagacagaacattacaagcctaatgtctccataattttataaaatgaaatcttagtgtctaaatccttgtactgattactaaaattaacccactcctccccaacaaggtcttataaaccacagcactttgttccaagttcagagttttaaattgagagcattaaacatcaaagttataatatctaaaacaatttatttttcatcaataactgtcagaggtgatctttattttctaaatatttcaaacttgaaaacagagtaaaaaagtgatagaaaagttgccagtttggggttaaagcatttttaaagctgcatgttccttgtaatcaaagagatgtgtctgagatctaatagagtaagttacatttattttacaaagcaggataaaaatgtggctataatacacactacctcccttcactacagaaagaactaggtggtgtctactgctagggagattatatgaaggccaaaataatgacttcagcaagagtgactgaactcactctaaggcctttgactgcagaggcacctgttagggaaaatcagatgtctcatataataaggtgatgtcggaaacacgcaaaacaaaacgaaaaaagatttctcagtatacacaactgaatgatgatacttacaatttttagcaggtagctttttaatgtttacagaaattttaatttttttctattttgaaatttgaggcttgtttacattgcttagataatttagaatttttaactaatgtcaaaactacagtgtcaaacattctaggttgtagttactttcagagtagatacagggttttagatcattacagtttaagttttctgaccaattaaaaaaacatagagaacaaaagcatatttgaccaagcaacaagcttataattaatttttattagttgattgattaatgatgtattgccttttgcccatatataccctgtgtatctatacttggaagtgtttaaggttgccattggttgaaaacataagtgtctctggccatcaaagtgatcttgtttacagcagtgcttttgtgaaacaattatttatttgctgaaagagctcttctgaactgtgtccttttaatttttgcttagaatagaatggaacaagtttaaatttcaaggaaatatgaaggcacttcctttttttctaagaaggaagttgctagatgattccttcatcacacttacttaaagtactgagaagagtatctgtaaataaaagggttccaaccttttaaaaaagaaggaaaaaactttttggtgctccagtgtagggctatctttttaaaaaatgtcaacaaagggaaaataaactatcagcttggatggtcacttgaatagaagatggttatacacagtgttattgttaaaatttttttaccttttggttggtttgcatcttttttccatattgttaattttataccaaaatgttaaatatttgtattacttgaattttgctcttgtatggcaaaataattagtgagtttaaaaaaaatctatagtttccaataaacaactgaaaaattatcatgagatgtgtatttaaactttttcatgaacattgcttatataatcattccttctgtcttaatgtactacatggtcttagccctgttcctataggattatcatgttctctgcattatagagccacctaagatgtactttttgttaaatgactcatgctggaatatctggatggggagatgttctttcctaatgtagtcatgtgccacaaaatgacgtttcggttaacgatggatcacatatatgatgatagtcccatgaaattgtaatggaactgccctatacaggtgtaccattttttatcttttatttcagatttttactgtaccttttgtatatttagatgtgtttagatacacaaatactttccattgtcttacaattgcctgcagtattcagtacagcaacatgctgtacaggtttctagcccaggagcaataggctctaccatatatctaggtgtctagtaggctattccatctaggttctcgtatgtataacctgggatgtttgcacatcgatgtggtcacctaaagatgcatttattggccaggcgccatggctcacgcctgtaatcccagcactttgggaggccgaggcaagtggaccacctgaggttaggagtttgagaccagcctggccaacatggtgaaaccccatctctactaaaaatacaaaaatcagccaggtgtggtggcacacaccagtaatcccaactactcgggaggctgaggcaggagaattgcttgaacctgggaaagggaggttgcaatgacctgagattgtgccactgctctccaacctggacgacagagcgagactgtctcaaaaaaaaaaaaaatgcatttctcagaacttatcctcattgttaagcaatgcatgactataatctgttgagagagggatgaaatcacctgtagttatagcgctttaagataccatttgaaaaggttacgttttccttttctttgacacggttagctgtctgaaatacagtcaattttaaccctaatctcttaatatcaggaatgcccttacacctactttggagtgtctggtgcttcgatatagttgcatgtaatgtgctctcatctgtttttacctgattcctgctcagttcttcacatggcatattgtgtaactcaatctatatttaaaacttgtaagcatccgaattatttgtttatggtagaactttttacttgcaagtcgtggtaggagtgtttgtagttggtactaaaatgtgatgacttggaagaattaattaatgacctatatttggggactttaattggatgctatagctgcaatgagaatagaaccagagaactcttgatatgcaaggttattcattctgtgataataatgagaggaatattcgatgtctctttgagtcagttttccttccgatcacttccgcattctgcagtgacacaatccttaatcatagctttcattacaatattcctttactccagacctcaaagactcctcactgcctccagcatcaaatctaaactcttctacctggttttcaacgccctacgtaaacttttcctccttcattccctatagcttggtttttttttttttatcactgccactattatctatcacaaatgtcaatcatgaccataccttgcttaagttggtttcccttgccaagagcactgtttttcctatacctgttgaaattttggaaatccaattctacctcctctcttcccttaagcatctcttccttcccttctccccaaatttatatttagtcacatatattatcgtactacctactaatcattccatgtgtttttttacgagctgtaagttctgaaggcaaccatgccttgtacagtgtccacttagggttctgaataattaatcatctccccaaaatctgaaagccttctatataccaagcaaatttgtttagttatgcagcaaaactcaaatctataaaatcaaaaaggaataaggaaatacagattaaacagttgcagcaaagactggtgatcttaaggtatttagtcaaagctggtggtagaacaaaaacagtagtcttacagattctacctcttgattaactcagtggctaattttgccttttctcaaagttcttttgcaagaacataaagatatttttgtttctttagttgagtgctgtaactttattcctttgtgtttctcataagtatgatttggcagtctgccatacgttttttgttttttttcttcctctttgagacagggttttgctctgtcacccaggctgcagtgcagctgtgtgatcacagcttagctcactgcagacttagcttcctgggctcaagcaatcttctcacctcagtctcctgagtaactgagactacaggtgcaccccaccacatcccgctaaatgttttaatttcttgtggagatggtgtcttcactatgttgctcaggctggtcttcaactcctgggctcgagcaatcctcctacctcagcctcccaaagtgttggaaagtgttgggattacagacctgagccaccacacctggcctgttataagttaatacaataattcatcaactaacttaaagaacactaagactcttacaaaagtaggtatgagttttagtaaaagtctcaaaagataaactgtcacttaaggaaaactagagaacatatcattgccaaatggtgtttttcagagattataccattcaacgcccacatgctgaattgggccattcattataactccaggaacatggcaatcagtaagagcccacatgtttctttgaatacaccgtaagtgaaagaatataaagtagtctagttaatattatgtttaatcaaggagcacattcctaaagatgtttgttcattcattctacagacatttttcagaggcctgctaagagtcaagcattatgatagacgccatggataaaagcttacaagtcaaccagcgtgggtataaataatgtgactagcactagaacaggtatcatgatggggattctgagtataaatatttttttaaaataaatttccccgtgttatttttggcttttacctccctaatttaggctttctaaatggcacagcatttctgaggatgcaaacacctttctacagagcaaaaacagcatttgtataaatttgtgtctttggggaaccaagagactttaaatgtgtttaaaccaataattcagtcaatatcaacattagcttacatgtaatattctcttgatagcccaattttttaaaacactgtattcttagaagtttggtttctaagatgtcactttaagctcttttgcttgttgcttttgtgggatccacaaattttgttctcaggtacataaatgaaggttagtatagaggataaatattatgattcttatctgggaaagacaggtgctgaggtgtaaaagagaggatcctcgccacccatgccccgcaccccctcgccccctgcacccacggatgtgcagtcttacctgcggggggaaaggtctccgagcctggcctgctgctccagctcagggttccccctttcatgatggctttcaaagatttcttcactctgaagtgaaagaaattttggtaagatttgatattgtagggacctcctaatctatatttttctctctcccaatttctgtgtttgattttggttttgagtctctcgataagcaaaatatccagtttctcatgccgctttctcaggttttccccagccactctggatccattatggtttgccctttttggcttcctttaggcacactaaaaactccttcccaaaagcaggtatcggccgggcgtggtggcaggcgcctgtaatcccagctactctggaggctgaggcaggagaattgctcgaacctgggaggcggaggttgcagtgagccaagatcacaccattgcactccagcctcagcaacagagcgagatgccatatccaaaaaaaaaaaaaaaagcaggtgtcctttccccttaatcatgaagggctattcatactttactgccccacccctattgattcataagaggacagtaaagcgatcactgcattcaacatctcctttttttttttcttgtaagaaatcaaggtctggaaaagttgcactcgccctgagaccagaaagtgctggaggcagagatgaagtaagcccagtgtaggctttcacagatgcgtgataacaagtctaactaaagaagtacctgggatactagttttgccaattcagctctaaaacaatatggcaatcttatattccaaatatatatatatatatttgtatttatagtagagatggaaactcccccgctactaaaaatnnnnnnnnnnnnnnnnnnnnnnnnnnnnnnnnnnnnnnnnnnnnnnnnnnnnnnnnnnnnnnnnnnnnnnnnnnnnnnnnnnnnnnnnnnnnnnnnnnnnnnnnnnnnnnnnnnnnnnnnnnnnnnnnnnnnnnnnnnnnnnnnnnnnnnnnnnnnnnnnnnnnnnnnnnnnnnnnnnnnnnnnnnnnnnnnnnnnnnnnnnnnnnnnnnnnnnnnnnnnnnnnnnnnnnnnnnnnnnnnnnnnnnnnnnnnnnnnnnnnnnnnnnnnnnnnnnnnnnnnnnnnnnnnnnnnnnnnnnnnnnnnnnnnnnnnnnnnnnnnnnnnnnnnnnnnnnnnnnnnnnnnnnnnnnnnnnnnnnnnnnnnnnnnnnnnnnnnnnnnnnnnnnnnnnnnnnnnnnnnnnnnnnnnnnnnnnnnnnnnnnnnnnnnnnnnnnnnnnnnnnnnnnnnnnnnnnnnnnnnnnnnnnnnnnnnnnnnnnnnnnnnnnnnnnnnnnnnnnnnnnnnnnnnnnnnnnnnnnnnnnnnnnnnnnnnnnnnnnnnnnnnnnnnnnnnnnnnnnnnnnnnnnnnnnnnnnnnnnnnnnnnnnnnnnnnnnnnnnnnnnnnnnnnnnnnnnnnnnnnnnnnnnnnnnnnnnnnnnnnnnnnnnnnnnnnnnnnnnnnnnnnnnnnnnnnnnnnnnnnnnnnnnnnnnnnnnnnnnnnnnnnnnnnnnnnnnnnnnnnnnnnnnnnnnnnnnnnnnnnnnnnnnnnnnnnnnnnnnnnnnnnnnnnnnnnnnnnnnnnnnnnnnnnnnnnnnnnnnnnnnnnnnnnnnnnnnnnnnnnnnnnnnnnnnnnnnnnnnnnnnnnnnnnnnnnnnnnnnnnnnnnnnnnnnnnnnnnnnnnnnnnnnnnnnnnnnnnnnnnnnnnnnnnnnnnnnnnnnnnnnnnnnnnnnnnnnnnnnnnnnnnnnnnnnnnnnnnnnnnnnnnnnnnnnnnnnnnnnnnnnnnnnnnnnnnnnnnnnnnnnnnnnnnnnnnnnnnnnnnnnnnnnnnnnnnnnnnnnnnnnnnnnnnnnnnnnnnnnnnnnnnnnnnnnnnnnnnnnnnnnnnnnnnnnnnnnnnnnnnnnnnnnnnnnnnnnnnnnnnnnnnnnnnnnnnnnnnnnnnnnnnnnnnnnnnnnnnnnnnnnnnnnnnnnnnnnnnnnnnnnnnnnnnnnnnnnnnnnnnnnnnnnnnnnnnnnnnnnnnnnnnnnnnnnnnnnnnnnnnnnnnnnnnnnnnnnnnnnnnnnnnnnnnnnnnnnnnnnnnnnnnnnnnnnnnnnnnnnnnnnnnnnnnnnnnnnnnnnnnnnnnnnnnnnnnnnnnnnnnnnnnnnnnnnnnnnnnnnnnnnnnnnnnnnnnnnnnnnnnnnnnnnnnnnnnnnnnnnnnnnnnnnnnnnnnnnnnnnnnnnnnnnnnnnnnnnnnnnnnnnnnnnnnnnnnnnnnnnnnnnnnnnnnnnnnnnnnnnnnnnnnnnnnnnnnnnnnnnnnnnnnnnnnnnnnnnnnnnnnnnnnnnnnnnnnnnnnnnnnnnnnnnnnnnnnnnnnnnnnnnnnnnnnnnnnnnnnnnnnnnnnnnnnnnnnnnnnnnnnnnnnnnnnnnnnnnnnnnnnnnnnnnnnnnnnnnnnnnnnnnnnnnnnnnnnnnnnnnnnnnnnnnnnnnnnnn

SEQ ID NO: 93449 - DNA, 14416 bp, Homo sapiens
ctctcttttatgagtttcctgttcaaatctgtgttgctcataatttctattaggctttctggccttttatttgattttcaaatggtaatccaatcttggattcataaaataatccagacttatttgtgatgtattattcttttcttgatgcattactacattgttttttaatattttgttcagtttttgcatctatgttcataatggcattgtctataatttttctttctagtaatacaattgtcataatctgatgctaacttattctggtcccataataatacaaccccaaattgggatgtattttttcttttaatctctggaataatttgtgtaagattactatggtaggcagtctctaagatcatatcccaaaaattctattatcctggtattcatgcccttgtgtaataacccccctttagtgtgggccagatttagtgactcatttctaagaatataatctatcagggatgaagggatgtcaccttcaagattagggtacaaaaagactgtagcttcagtcttcagtgctcaccatcccttgctcagtctgaggaagccatctgtcatgttgtgaacagccttatggagagacccacatggtaagaaactgagtaaggtctctggccaacagcaaaggaagaagtaacaccttcagtcaacagcctgtgaaaaactgaagcctgtcaacaaccacataagtgagcttggaagtacacactttaccaatcaaactttcagataagactgcagccccagccaagagcttccctgtggaaaaaccttggatcagagtcatctgggtaggccacacctggattcctgacccatagaaactgtgagataataaatgttgtttaaagttactaagttttgggatactgtgttttgcagcaataatcaatataattaccattatttttcttttaaatgtttgaaagaattcactggtaaaatcatttaatcttggagtcttctttatggacagacctttaattacatatttagtttaataattatagtactatttagattttccatttctttcacttagttttgttaagttttatttttctaggaatttgtccatttctctacattttcacatttaccggcatagagttgtgtctaaaatcttactatctttatgataattaagattctcattgtaagatctgtaggatctgaagtatgttcccttccacattcttgatactggttatttatgccatcactttttcctgcaccagtcttaccaggagcttgtcaatgttattagtcttttcaaagaaaccacttttggctttgtaagtcctctctatttttattaatttatttcatctatttatccttttcttctactttctttaggtttactttgctgtttttccctaaagcatttcctttccaaatttattttttgtaaatttaaattttaaacttatttttgtaattttttgtaaatttaaatgtacagttaaaacattcttaaagtttatttaaaatcatacattttccttgaagcatggatttagttgcatccccaaaatttcaatgtcatactgtaatcctttttcagtttgcaatatcttctaacctccgctgtgatttctccttggcccaggacttatgtagaggtatatttgagttttttctagtaatattttacttaatgatttctagcttaattctactgtcatcagaacatactctgtataatcttaacattttgaaattagttgagtcttgttttatggcccagcatgggatcacgttttatacatattcctgtgtacttaaaaattatttgcattatgaacattatgtaatagtaagtacactgttctgtatatgccaatttgaattaagcttgttaattgtcttgttcaaagcttctatatttaaagtgctttttctatcaattattgaggaagctatgttatttgctgaaaatttagaattcttataccttattgttgaagtaaatatttaattattatgaagtatctctttttatgtctaggaatacctgttacctcagtgaactttctctgatattaatctttgtgatgtgatattaaattacaccagttttattttcattagtgtttgtacactatatcttttccattcatttactttccatctttctgtgttctcaaaatttaaatgtgtctcttctaaagcataaaattgttttaaaaataaattcaggctgggcacggtggctcatgcctgtaatcccagaactttgggaggccaaggcagacagatcacctgaggttgggagttcgagaccagcctgaccaacacggagaaaccccatctctactaaaaatacaaaattagctgggcgtggtggcgcatgcctgtaatcccaactacttgggaggctgaggcaggagaatcgcttgaacccagagggcggaggttgtggtgagcagacatcatgccgttgcactctagcctgggcaacaagcgtgaaactccatctcaaaaaaaaaaattaaaataaataaataaatccagctattaatattttaataaaagcatttagttgctatgtagttaacgtatgtcttgatatattggggtttacatcctcctaggcttcatgcttctcttgcctattctagttccttctcctgtacctcctccccccttccattttgctttctttttgaattaacttggtattttaaaataattttctcccgttaatttggcattttacaatctttaattactttttagttacagaaattacagcattcaggccaggcatggtggctcatgcctgtaatcccagcactttgggaggccaaggtgggcagatcacttgagtccaggaatttgagaccagcctggccaacgtggtgaaacccatctctactgaaaacccaaaaattagccaggtgtggtggcgggcgcctgtaatcccagctacttggaggctgaggcaggtgaatcgcttgaatttgggaggcagaggttgcagtgagccgagatcagaccactgcactccagcctgggcaacagagcaagactcctactcaaaaaaaaaaaaaaattaattttaaaaaacgaagctaacatcattaacacttttacttcaaaatgcaaaggactttataatactttaattttgtttagatccttcatttctgttgagactttaaacaattatgtttttaaactccaaagcatagcattaatatcattttttgaagaacaacattcatttggatttactcatttatttaccccatttctctcgctctccatttcatcccccatctctaaaaaattagagtcacttttctcttgcctgagaatgttctttggtgttccctttattacaaagatgcctctggtaaattctctcagttgttgtttacctgaaaatgcctttgtttccttgtcaatcttggtagttctttttgctagggatagaattccaaaattcaaagattttattcttctgtcttctattatttctgtaaagaagttagctgtcagtcttatgattcattctatgaggataatctctcctcacctaccacctcactttctttgctttaaattttctgtctgcctttcagcagaattttactatcatttttgtttttatttatcttacttgaggattacaatgactcttaaaactatgactttaagtctttcatcaattttgaaaaattctcagccattatcccttgaaatgttgcttctgtctcattttctctctcctttccttccaggactaaatgttacattctttcactgtattccctatcttttcttttttatgtattttctttgttttcttcctgtcttttttttttttttttttttttttttgagatggagccttgctctgtcgcgtaggctagagtgccatggagcaatcttggctcactgcaacctctgcctcccaggttctagcgattttcctgcctcagcctccagagtagctgagattacaggtgcctgccaccacgcctggctaatttttgtattttcagtagagacagggtttcaccatgttggctaggctggtctcaaattccaaccttcagtgatccacccacctcagcctcccaaagtgctgggattacaggcatgagtcaccacgcccagcctcttttatgtattttctaaacttttatttttctatgcttcattctagatattttcttcagattttcctactccactccttctctctttagctgtctctaatctgccataaatcttatccattgagtttttcttttatcataatttttagttgtagaactttgttcttttatagcatttctagttctctgcttaagttgccaatcttgtcatttatttctttaaatatattaatcagtgttactttaaaatctgtataagagaatgatattactgagatatggcaggatcccctgtgagtccatttctattgtctatcatttctcttggtattcagtcacattgtcttgactccttatgtacataataatgactgcctgaattctggacattacacataaaaaatgagagagaatttaagggctaggacaatgttattaatatatttctccaaagaggaatataaatttgctctttatagacatctagggatattacccatctcaattatcttgatcccaccagggattgaggtgattcgcagctgaattgcagtgtctgtgaggaacggtctatttctatacacatttactcccatgctatatagcctttcagggtctcaatccgaagttttgggaagtttaccagacaattgctgtatcagaccccaaactcagttttttgttccctaatccactgagtttgtcaaaaactctgctaagcttatcagactctcagctacctctaatggaacatgcagaggtccctaaggaaacagtgggcccaaatgctcacctctctgtacttctttcttttcccagatctcagtactataattattcactaacttcttaggactccaatgtatccgaccaaatttttaaaaaaatttgttctctgagggaggttggtttaaatggactattctgccataaacaraagcaaatccccatttataaatattttattatcacaaatacttgtccattcatggtagtatgctgggggcatagcagcacacataataaatttcatataaataaagtgtacaatttttctgtctcattagagaacatatttgcggcattatttgttagcatgtcattatcataggttttgacaggatggtagggaataaatattattccttaattccataggttttagagtatggagggatcatgtaaatttacctaaactcctcccttcccatttcatagaggcagcaatagagccccagggatgttgagtgacttatccaagatcaaacaatcagctagtggcacaagcagattcttaaatcagttatcacacttctagagctctgaggtctttcttccataacacactggtgttgtttgagaaagcttctatacatgaattggagtttcaagtatgtttctgatactaagagagaagtgaggctagaggacccgagatgatagggcattcgagtcattaggtgcaacttgaaaaaaaaaaaaaaaggcttaggtaggaatgggttgatcacgtaaataaactgatggatcggctgggcacagtggctcacgcctgtaatcccagaactttgggaggccgaagagggcggatcacctgagttcgggagttcgagaccagcctgaccaacatggtgaaacccccatctctactaaaaatacaaaattagctagggcgtggtggcgcrtgcctgtaatcccagctacttgggaggctgaggcaggagaatcgcttgaacccgggagatgaaggttgcggtgacctgagatcgtgccacagcactctagcctgggcaacaagagggaaactccgtctcaaaaaaaaaaaaagaaaaaaagaaaaaaagaaggaaactgacggatcgaagcggctgggttgggcggtaaacaggccgtgggtagggaggacagagaggcggcgttcgctcctctgggacttttcacgcctcgttttgttttttttcttcagatgtggctttttcctgacgcagggtccaagcagtcagcttgagcttactcttctgtgaaagcggaaagtctcctctgaggaaagcggttgaacttgtggagggcgtgcgagacgggcgttctcccccatgccaggcgaatggtgcsgccttgagctggtccagcagccggctcgatgacaggtctgagggaggccccagaggcggcrggraggtggcccgcagaacgcgggttctgtaaagacacgtggagaagattcgattccgagaacaggaagaggcggatggaaagacagccaggcggctgccgggaagggggctgccaagatggcgtcggcctcctcccaaccgtcgttggcggtcggtttttcatcctttgatcccggggccccttcctgtaccgcrtcctcagcatctggaatcttgagccccacggcatctgaggtgccttatgcctctggcatgcccatcaagaaaacaggccatcgaggtgtcgattcctcaggagagacaacatataaaaagacaacctcaacagccttgaaaggtgccatccagttaggcattacttacactgtggggagcctgagtaccaaaccagagcgtgatgtcctcatgcaagatttctacgtggtggagagtatcttcttccccagtgaagggagcaacctgacccctgctcatcactacaatgccttccgtttcaagacctatgcgccggttgccttccgctactttcgggagctatttggtatcccgcccgatgattacttgtgctccctctgcagtgagccgctgattgaactctgtagctctggagctagtggttccctgttctatgtgtccagcgacgatgaactcattattaagacactccaacataaagaggcggagtttctgcagaagctgcttccaggatactacttgaayctcagccagaaccctcggactttgctgcctaaattctttggactgtactgtgtgcagacaggtggcaagaacattcggattgtggtgatgaacaatcttttaccaagatccgtcaaaatgcatatcaaatatgacctcaaaggctcaacctacaaacgccgggcttcccagaaagagcgagagaagcctcttcccacatttaaagatctagacttcttacaagacatccctgatggtctttttttggatgctgacacgtacaatgctctctgtaagaccctgcagcgtgactrtttggtgctgcagagcttcaagataatggactatagcctctggctgtcaatccacaatatagatcatgcacaacgagagcccttaagcagcgacactcttcaagtgtcaatcgacactcaaagactggctccccaaaaggctctgtattccacagccatggaattcatccagggagaggctcggctgggcgacaccatggaggccgatgaccatatgsgtggcatccctgctcagaatagtaaaggggaaaggctkctgctttatattggcatcattgacattctacagtcttacacgtttcttaagaagttggagcactcttggaaagccgtggtacatgatggggacgctgtctcagtgcatcgcccaggcttctacgctgaacggttccagcacttcatgtgcaacgcagtatttaagaagatccccttgaagccttctccttccaaaaagtttcggtctggcttatctttctctctgcatacgggctccagtggcaactcctgcattacttaccagccaytggtctctgaggaacacaagtcacaagtgataaasgtgcaagtggagccaggtgttcaccttggtcgttctgatgttttacctcagacctcagaatccacctttggaggaaatcagtgagggctcactattactgaccacagtttctcacctgtagttggaaagactttgcatatgctaactacaagtataaccttggaaaaacttgaatgtacagagtcagagttcacccattaagcgcaaagcctcagaagacctggaacaagattctgcttctctgtgatcccaagatgtcagcccttgccccagcaatgttgaattttcttctacttggtcatcaaaaaaggagtgtaaaagaagcgaggtgcactctccatcttcttcctgaagaagagcctcctattcttctctgtcctcataaatgggcattagtgccttggacagttgaggaccactccatcctctccacagcatcccctccactccagagttgggtggcacggattttcaactggctaaccttggyttccacaactgaatttttttcagacccccattcttcatgctggaaatgagattactggacttggcagttttctttcccctcatctttcaccaggaactggactcttaatttcctcaggacagactagctgccacattatccccaccttagttctttctctctgatccctggaagaaaacccctgtaatctctgtataggtttttgggggataagggtgtttaaccacctcccaactttgtttttttttttttcctgaaaaaaggaaaaagcgcacagcaccaaatttcaagccagtttcagatcaaaaatccagaagtgttgacgagatgcctatccgtagggttccctcagaagagccacggtgtttgtgaagggaaaagtagtgattgctctgccagaagcagctcctctttaaactcctcatctcttgatgaatttcttaaggctgaaggaatggagagagtgggacgtggggtaatctttaccacttttgttaaaacatgaggcagccatgggttgggagatcatagcccttcctgggcagaatcctattcactgccaggctataatgattattactgttttgcaatttgaaatatattctggttgcttttctaaatatgaagacttaccaaatgaattttagatcattctccaaaggagatttttttgctcttcccatcttttccaacagtgttctcctgtttgtggtgctaaggtgaagaggggacacctctgtctgtttaacaggcagtccgtatctgtgaggccagcaaatattttcttaaattcatggggagacagtggattcttgcctcggtgaggtcattgctatgccatatgtcctacccccgtcttcatgcagagaagttggaaatgggggctacatatgccctctcctccccacctacaagagttgtggttttccatctgatccttccactgttgtcaggagaagaagggggcctggtatctcaggcatattgttgaattcctgttctatcccttctctatcccaccctgccttgacagtaggttagcccataccccaaataactttctatattagacacccccagccagtttctggctgcctgtctttgctgccatgttcttttttacaagaaggaaagaaacaattcttgctatttttttcataatttactatttatgatgtatttaagtgttttattaaggacagagttctgtaaggggtgggagagaatatttgagggagggctgggtcttagggaaaggaatagggaatcaacattttaatgaagtgtctctatttgcttctactttgtatcattcggaaaaggcaaatgcaatataaaagtgatatatggttttaatgtaataaacttttatcagttatttagaaaaagaaaagaaaccgatggatcattttgacaacaatgaagaaaggagacaggaacaaggaaaagttgaggttatcctgtaaagcatcttaaagcagaaagcaaggctcttagtttgtaatttaatacacctgactgtaataattgtaaaacaaggcaggagtcaaggaagggaggcagctgacgatgccatgtgtctgtcagcataaggcaaaggcagagcgaggtgaaaaggcatgaccaggaaagatgacatgcattgtcataaataaatgcagagagaaataattttttttgtgaaaacgaacggacccatatactttataaacacagggtaccacttattcttcaaactatctaaactagtcatggatgagttttcaatgtttttatatgagttctttcatgagtccaaaatactatttcttacattgtgtctttccataacttatctgccaataaagatacctgctagggcaccaggagctttaatgagaggcttctttaatgttatgttactagcatgacttctgagacacatttattcatccactcatatactaaagcactcatttgagaagcacttattaaaatttatgctagaactaaggaaacagataaaagacacaatccctgatgccaagaagttgcctgccttgctgatggaatttcctagtaccccatgttattcttggctgtgcaaaaattagatttttaaacttttattattgtctaaaattatgggttataccatttagagaaaaaagcctcactactgttgcaggttgaggttaccattgggatattaggtatcaacacaggccccatgacaggatttgagtaaaaaccgtagcctttgcataatgacaagtctgtgtcacttttcctaaaactgtgtgaaaacagaaaaattacatcttcttcttttttttttttttttttttttgagactagtcttggtcttgttgtccaggctggagtgcaatggcatagtctcgactcactgcaacctccacctcctaggttcaagagattatcctgcctcagccccccaagtagctgggattacaagcgcgcaccaccaggcccggctaattttttgcatttttagtagagatggggtttcaccatgttggccaggctggtcttgaactcctgacctcaggtgatccaccctccttggcctcccaaagtgctgagattacaggcgtgagccaccatgcccggctaattatatcttcttattgctttcaaagatcttaatgacaataaagagagccaacgctccatcccagaaggaagaaaatgaccatgtcacttctgaatgtttgctaggatgctaaagtaaaaatgggctgaggatataagaaatgctaaagttcaggtggcattgttgcttataagtcaatgaaaattaagtcacattaaacattcagttccttagacacattagccacattccgagtactcaatagttacatacggctagtggctaccatattggacaacacagataaagaacacttcccccactgcagaaagttctactggacaatgctggaagtgaaatgggtctcctaaaaagcttcaaaggtaaggttgtacatggtgtcgatgagtttgagtagcaaagaaattattttaaaattataattaaatgtaataagagatatttttaaaaattctgttggaacttttaaagacataatttagccaaacaaaaatgatacaaattttctcctggaactttgggtgtttgggtgactgttttgaatcttgtctgtgggacaagcaagaggccgtgcccctgtgtgtggccaccagatggacctgggatcactgactgtgttgtcttggagtcatccagctgttggctgacagaaaagggaagggcattcaccctgcatgcatatacatgcacacagacataccctgcctgcctgttgccagcttccataacatgggggagaaacttttaaaaaagaaggtcctctcatttatgtgactaaagttttgcctttgaactagtcacatggagaaacagaatggcctcatctgcagtagattttagttaatgcaatttatctggctcatgttgacatactatactattctacactctacttacttgctcaaatcgaagtcaatttgatacatcctactcttgatcttaaaatataagacagtaaatgggtgcagtatttcttgggttatttggatgaatgagacctagaacaatatgaaacctgttactggggcctaaatgagattggtcagtgctggtttcttttatgtcttctgtctaccccctggtggagggattcattactagtcagagccaaagaaggaaagagaaagagaaaaaagcatgaattatttcctgaacatctattcagtccctcaataatcttgggtttgttgtttatacgagagtgccagctcaacgggagaagagctgaaacccattatttccctttgaacatgttcttcaccgggaatggcaggaggagcagagcagcaggagggctgtcctgccaaaacgctgaacttggaactgaaggggccatcgctctgggtgcaaaaaaagagttctgagctttgctgctctggcaggcctggaatccttcccttggctgtggataatacctaatgattcagaggaagtactgtcaactcttcaaagcagacctagctaattgtgtaatgttattctgaggcactgggagaagccaaaaaagaagggaggctggggagaaattccttcctttgcaatgatcagcttacatcctgcaccatcagatttgattatccttatcttttcttgcataactacaaatgttatgactggtcatagtgaccagacttccaaaaaaaaatccagccacagtatttgactctatgactgcctctggyggtaaattccttagactagctacatgctgtgcaaaaagctatttcctttgatttattcatttcccagttcttaactccatcaggtgcccccttgatctcacattagagaatgaggcaaaaaaagaaaaggaaaaaagaagtctgttcattttgccttatctccttgcagttaggaaatgtaaatatccactaacctcttttgctcatattgcacagtaatttttaaaattaactccttttaactagctcttttttttaattgaataagtaatacaaggacctgattaaaagatttaggcactacaggctgggtgcagtggctcacgcctgtaatcccagcactttgggaggctgaggctagcagatcacgaggtcagatcgagaccatcctggctaacacagtgaaaccccatctctactaaaaatacaaaaaattagctgggcgcggtggcgggtgcctgtagtcccagctactcgggaggctgaagcaggtgaatggcgtgaacctgggagatggagtttgcagtgagccgagatcgcaccactgcactccagcctgggcgatagagcgagactccatctcgaaaaaaaaaaaaagatttaggcactacaataaatagaaaaaggaaaagtaagtatccctcccattgcagacctgcagacccttgattcctcagaccctaccctgaggcagtcatcagtaccagctgctggtatacactctagaaatatccaaatgcaagcatgtgtgcattttctccttttaaaatgtatctttctttttcacataataacatcttggagatcattccatattatcatgtttagtgctaacccatcctttttcatggctgcatagtattcccattcaaatataccacacaattgattaaccagttccatattaatggatatttatgttgtttctagtatttttctcatatgaaaagctacaacaaagacctttgtacacatcttaacaagtatgtgccataccttgttaagcacataccagccagtatgtgcattttaaatgttgatagatattttcagatcgccctccaaagaggttacatcaatttatactctcctttgagagtatgtaggagtatgtaggagtcctcttcctcacttctttgctaacatatatattaactataacaaataactaataatattttacaatcttccatcatatgactgttctgcctgaaaaaccacacaagatgcagtgacctctatgtaaccatcaggtcctgacattaagccttttgcccagtctcctgtaacaccactctcacctgtataagccctaacatctaatagggaaaacaagcaagatgaaaaaaaacaaagaaaatgggttacataaactaacgaaccagcgccacctacacgtccctgggcttctgtaccaccaaattcgtgaactagccaatttgcacctataactgtttgtgtatgtgttttgggggatggagttaccaaaagattcctaaaacggtctgcgattgctacttaaaaaagataagcatcagtgatctatgtaattaaaaagagagcaagagaaaattaaaattggagggctggatgcagtggctcacgcttgtcatcgcagcactttgggaagccgaggtgggaggattgcttgaggccaggagttcaagagcagtctgggcaacacagcaagacccctgtctctacacaaaaataaattagctgggtgtcatggcatgtgc

SEQ ID NO: 93450 - DNA, 13941 bp, Homo sapiens
tggacctcacagtctaggctgctcccgattggctaaaggtttaaaacttttcctaaagagataatggcagagaagaacaaaggaaaggaggaagtttcttatgaaaagacttagaaaagtaataacattcccaaataaggaaggggcataggctgcgagctgggacatgcttgtgagcacatctagcacagatatcttggttaaagtacaaggtcatagaatgtactatgtgcctgtgagcatgtctagcataaagttagtctttaaaagaaactattatttctaacacttatgacttattctttaacaagaagagaaacagtaaaaaggaacttttactttctgcaaagaagaagctggaagccattatcctcagcaaactaatacagggacagaacaccaaaaccgcacattctcacttataagcaggagctgaacaatgagaacgcatagacacagggaggggaaaaatacacactggggcctgttgtaggggctggggggagaggaagagtattacaataaatagctaattcatgcagggcttaatacctaggtgatgggttgataggtgcagcaagccaccatggcacatgtttacctctgtaacaaacctgcacgtcctgcacttgtatcctggaacttaaaagaaaaaatggttgctctgtcttctgcccagctgtatatggctttttgaatttaaatgaataaaaatgaaaatttcagttacgctaaccacagttcctgtgctccatagccacatgtgactagtgactgctgtattagacaacacagtagaatgtccatcatctcagaaagttctaatggccagcagtggtctagtaatgctaagagctaaagctttttgagtacctcttatgtgctgggcactgtttgcagcattctacatgtatgaattctcttattccttatagcaaacctaggagttagatactatttgtctgatttatagatgagcagacacaggcacagagagcttatttacatcataaaaccacttgcatcacatccttaatatgtgacacagacaagacagtcacaggcaatctgtctccagagcccaagctctgcacctcctggctctcacactggatacattagaaagagatggagccccagactaactatgatttaaataaatgcttctattttcaaagaatgaaagactgttaatctagtaatcattgcttccctgcccttcctggccctgactctgctctgagcagatggttgaccttccattttataaaaaggaaagaggcaaaacacctttttccttcaaccattttctttgctacttgactactgccctgtttcttcaatttttgtctcctctcttgtatcctcctaaaaacggctaatacctttaccggcctgtctgatttcatcctttcccacctcactcagaaacaagctgccattgcttactttctctctaatcaatgttttccctcggtaagattctttatctttgcagaaaacacgtgtggtacttttcttccctatgcctttgtttaaatatgccagcccagcttctagttctcccttcagagttaacaggtatcatctgtttaggaggcccttcagccccatcacctcccctttcctcagaccaggccaccaggctaataaatgctcttgttcagtgcttccgtagcctgctggttacctggcttcaggttgaacaatgtagttacatttctgttttctcctctaaattgtatactgcttgagagtaaggatcaagttctaatcatctctggatcttgccagccagcacaatgtaggcactaaataaatgttgattggaatataaccatttattctgaaaagaaaaccgcaccaaacacctaaacatgtcatctttcttttgactctgtttcctcctctgatattggcttctggcttttatcctcagacttcttgaaacatttgtatttactaccaattactctttttgtctttttgagacagctgttgcccaggctggagtgcagtggcacgatctcagcttactgcaacctctgcctcccgggagtgattctcccacctcagcctcctgagtagctggtattacaggcatgtgccaccacgcctggctaatttttttatttttagtagagatggggtttcaccttgttggccaggctggtctcgaaatcctgacctcaaattatcctcccacctcagcttcccaaagtgctgggattacaggtgtgagccaccacacccagcctactatgaattactctttatctcctggcaatttggtctctgcatgcaacgcggcctttgtgtataagcactgtgtgtgtgtaaaaacattgaaacttccttaataaatgaagagatgtcctttttgtacatctggatttgtgaaaggcataatttcttgagatcttagctgcttgggcaactgcttgtgcagtgtgacccattacagtttttgattgatctagttgaaagacttcatcacagttgtcatcacagtatttcagatgactgtagttataaacctgagtgcacacaattactaaccaagttaccatgtgtttatatgtttccctttttatacatttccttttttattctatttctttatgcatatcatttgcttataactgttatacctgtgtaactgttgtcagtatatgagagcatttgcttgcaacaatatgtatgttattattgcctatattattatgtgaagtagcctatgaaatgttctgttgtgatatgtttctcaaataaaccccccttttaaagtgtgaaatgtcttttaaagaacttttaacatttttttttcccaaattacatttctgggactttagggattttgatctttcaggatttcatcatttaggattatgttgtacaagactgtgtcaacattataatcagctcccccttgataatacatttttggaatttaaactacttgatattagtgaccccaccttgaagttctcctctctcttaaattctgttcacttcagcatttggattcctgtttcttctttggtcaaatcacttcttgctcttgatgttcttggctagcttctgttcttctaccattcattaattatgatggacattccttaagctttaggaattcttcccctttctttgtgatggtataaatttctgtgacttcaattattttctccatgggaatgattcttacgttcatgtccttcttagtatctgtatcctgctggttcttgaaacttaacatttgtaaactaggttaatcatttttgctgttaaacgtgtccattctcctgactttccagattcttccaaagtcatcactattttgcattactatatttcagtctcaaactcatctctgatgtctcctatgtcttcaatcccatatctccaataagccattatatcctattgaattttctttgaaattgctctcacttcttttttcacatgcctttcacatggcggcctccctaatcaagacctttatttagctctcgtctgttctattgcaataattttccagcatctagcctcttctgccttctaatatatctttcacaccactgccagagtgatcttctcaaacaactctgattatatctgattatgtcttttctttattcaaaatatctttaatgacagtttcatgcctagttaagaaagtccgtatcatttgcttgacagtcaagaaccagatataacaatttttcttttcatttttatctcccatggttctatgcatataccctgaatgtctcatttcccaacacactttccattctttcatctccacacttaaaaaaaaaattctccatcctgcttgagttgccctagatcactcctctgtcttcttcacctccagttctacttattaaagtgctttccattcaatgccctgttctgatgccatctgctccatgaagactttcctgatgactgcagccaggaatggtctctctctctctaaactcccacagtcttctatctgggccatgagaattactgccttctgcttgttacctgaccacatgtattctatgagatggtagctccttgagcatgaatacatgtctaattattcttcacattcctcacaatattttgctaagggcagatgctgagtcagtatttgttgactgtgggacgcccccagctttgatactgcacttcttttgtccagagtattgcattaacatctctgctatgagaacttcagcaggaataaagaagaagctgaaaatctgccatttaaataataggtggcagctctgtgatgtgtctgccatttatctgtctttcttttggatggtaaaagagtataggcaataaatcaaggattgaagagaagagagttaaatcccaattttggcctcatcactagtctttctgcaatatgcacacatcctttctttcttcactttcttcttcaaggaaattggcatcactgggctacttcaaaggagccatggtgataactaccaattacattgacacttcaaagtgttaagaccatgtggctgtcactttggcacattgtgctttcttccttctgaattctcatgacttttcctggattccttactaacttacacatactacggtgtattggatggtggtcctgaaaacatatgtacacatcctaatcgctggaacctgtgaatattaccctatgtggtaaaagagcaaatattaccttatattgcaaaagatgtgattaagttaagaatcttgagaggaggggtttatcctgaattatctgaatgggcactaaatgccatcacatatatctttataagacagacaacacagaagagaaggcaatgcaaagaaagagatagagattggaatgctgaagctacaaaccaagcaacactggggttggcagccacccttagaaactaggaaggaggcattgaaagaaatctaccctagaacccttggaaagagtgtggtcctctcagcatcttggttttggacttctgacctccagaattgtgagagaatacatttctgttttaagccaccacatttgtggtagtttgtacagcagctccaggaaaaaaaatatacctattccatcctgtgatacatcttatgctgatatttaatatttgcatccatgttttgactttcttacaagctacttaacaaccactatgcttaaaactttccctttcgacaggtattgattgagattctactacgtgccaggtacaattttaggtcccaaggttacaaaaccaaaaaagatctcattcctgccctcaaaaaagtcataatctttaggggataaggtagtctaagtgaagcaggggcaggtaaggaagcttcctggatgaggtgacattaaactgagttccaaagattgaattgggattaactaggctgggggagttaggagatagaacaattttaggcaacgaagacatcatgaagaaggtcacagaacccagacctcatggtgtgtatcttgtgtggacagggattggtgggaattgcagctggaaagttagggaatagccagatcactgaggctttatgttcttagaagaaggggagaaaccaagttttaatctcagttaaactactcatagcaagtggaaagttttaaccatatagtcagtactcagtagatgttccctgaatgactctgtattaaaatagatgcaatttgtaataaaagttggtagcaattggtataaaaaaacccaatgttttcttactgaatagtgtctaaatctgttggttatctgtaagagtgcaatgaggataattatgggataaataaaattcacagacatgtttttaaatactgaacaatataatggatattttacaacttgctacctttcagattggttatatgaggtccataaagcaagtttgttcagtgccatgcatattaatgaaaagccatttggagagtggaggacccatacagtggtgctgctgtgaagatgtgaaggcgtctccccaagaacacatcttacctacggatgacactcctgtgcaagaagatggagaggcagaatttcaaatggtggcagtgaaacctaaagccaccgggggctttggatgtgagcctatcagaggctcaaaatggaaatgtgtcagaagaaacagtggggcatggaaaagttaaaaaaatccctaaaacatgttatgattgtgggcttgtcagaagccccaaatggagacatgtctaaagaaatagtagaaaatgtaaaagttaaagaaaactagaaatctatcatactaaccagtgcagaagcagcaattcagtctctagattcgaaatcaaaaaagaaaagaagaacaagagaaaaatagtgactaatgctgggcgtgatacaaaaaaagcaaaaactgaaaacaaaggggaatccgaagaagatggtatcgaggctcctgaagaaacagaaaactggggggaagccagacaatgrgaragatgagaatacttcatttcttctctaattttgtcagtgaaaacactttgaaggcaataaaagaaatgggctttaccaacatgactgaaatttagcataaaaatgatgggccacttatggaaggcaggatcttccagcagctacacaaaccagcagtggcaaaaaccctggcatttctcatccctgcatttgaactaattgttaagttaaaattcatgtccagaaatggaacaggagtctttattctctcactaattaaacagcttgtcctgagactcttggtgttcttaaggagctaatgactcaccatatgcacatgcatgggttgataatgggtggcagtaacagatctgctgaagtacagaagcttgcaaatgggatcagcactggtggtcacaccaggccatctcctgggctgtatgcagaattctgcaggatttaagtataaaaacctatggcgtctggttatggatgaggctaatgatatcttggatgctgggtttgaagagaaattaaagcaaattattaaacttctttgaacatggagactatgcccttttccgccacacaaactcaaaaacttgaagacctggcaaggatttctccaaaaaaaaaaaaaaaggaacaaatgtatgctggtgttgataatgataaagctactgcaacagtggatagtctcaagcggggatatgttgttcgtccctctgaaaaaggattccttttgctctttatattccttaagaactgaaagaagaaactgatggtcttcttttcatcctgtaggtccrtaaaataccactatgagttgcggaactacattgacttgcctacctcagccattcatttccagaagcaaaattacgtgtagaattacattttttccagttctgtaatgcagattcagggatattgtgtacagatgaggcagggagagagctagatattcctggctggattgttcagtattatcctccagatgaccctaaggaatatgttcatcgtsgggggacaatagccagggacctaaacgaaagagggcatgccttgctcagtttttgcccagaagaattgggttttgtttgttacctgaagcaacccaaggttccattaagtgaatttgacttttcctggcctaaaatttctgacattcagtcttggtttgtaaaattaatgaaaaagaactactttcttcataagtcagcccaggaagcatataagtcatacatacgagtaaatgattctcattctctgagacagatttttaatgttaataacttaaatttgcctcaagttgctctgtcattcggtttcaaggtgcctccttctgttgatgtgaatgtgaacagcaatgaaggcaagcataaaaagagaggaggcgagagtagattcagctaccagaaaaccaagaaagttaagtccataatctttaaaaacattagcamgaaatcatctgatagcaggcagttctgtcactgaagatacacctttctttcatcttgaataagtgtcctgaggtggagtttttcccctttgctctaacaaaggcatttttgtaggctttagaatttgaatggatataacaacagtgtagactgacttgggttgcgagcactgagcattgttatttccagcaagtctcttttgtatttttgggatttaaaacagattttaactgttcttggttgctcaagggcaaagcaaggagtcttcttcatctttcttgtgatgagatgatattttaattttaaatacaccccaaatttatgtaattgttttaatataattttgtaccttaaaaagaacaaaagcctcttagaatcaagatgaaaacttcaaattttctgtattttttctttttctattttttccttttttttttttagagatggttttgttctgtcacccaggctacagtgcagtagaataatcagagctcactgcagcccggacctggcaggctcaagtgatcctcccacctcagccaaccaaatagctaggactacgggcatgcaccaccttgcccggctaatttttatattttaattttttgtagagatggagtttcactatgttttccaggctagtcttgaactcattgattctcataccaaagtgtgaggattacaggcatgagccacagcactcagcccagcttctctttattatgaaaaatgagagcttattcttgagaggacaacaggtttcattgtttatctggtctgtctactgtaatgaaagctggagatgttatttaggcaatgaggcacaatactgctgtcactagcattggtgagctgtccccacatggtatgattatgattttcatgtcgttagcactgaagtcctcagaaataggataaagtgggaaagcaggtgtcaggtgagaactctgtccttgtaaggaacatccagttgatagatatgaatgcaattaagtacttcctgtcactggatcatatcattaggactctgctcacctgatctgtgatacaagctgaaatcaactatgctgtgaaaactttttcaaattttgtcattttagcaaattacaaaatattctctatatgtaaaaatctccaggtgggcatttaaagtgaagtgagcaagttcctaagaaatatttcctgtgtatctgttgttttatgttttgctagaaacaaaggagatgtagtttcagctcacaaagggcttaaagttttgttggaagagaaaatgataaagacacttgacaaaagcatgtacttttttttttttcttcagagacagggccttgctctgttgcccaggctggagcacagtgctatgattattgttcactgcagccttgaactcctaggctcatgctatcctcccacctcagctccccaaagcactgagattacaggtgaaaaccactgtgcccggcccacaaatatataatttttggaagcatgttgtgacacttggaagtccctaagtggaaagtcatattgagcaaccaattaaaaggtgaaagagttgagacttgcatctgactcagccttagagcaccagatttgaattggtatggcaggaaaaatggtttgagtggagaagcagtgtgggattaaaaacaaatgagcatgtttagggactgaaaggagacccacttgactgcagcagtggattcctgtttcagagcactgggatgttttggatacataagttggatccaaatcgctaaaggtttagctttagattttgattgctgccataacaaataatcacaaatgtagtagtttaagatgacacaaatctattatcttatagttctctgggcctgaagtctagtgggctcaactggtttccctgcttggaattcataagacgaacgtgaaagtgttggtgcagttgtgctctggagaagaatctgcatctgtgctcatttaggttgttggcagaattcacttctatgtagttgtaggactgaggtctctgttttcttgctggctgttggatggtggttgtttttagcttttggaggccacttgccttctttgctcatggatcccttgctccattttcaaagctggcaaaggcagtttgagactatctcatactttaaatcactccagtgcctcactcatctgctgtatcaccctgattcttctgcatcaccctgattcttctgcctttctcttccactgttaagggccgttgtgattacattggtcccaactagagaataaaggataatctcctaatctccctgttttaaggttcagaaccttctatctgcaaagttccttttgccatgtcacgtaacatattcatgggttccagggactaagggccaagctgaggagtttgaatgtgagacagaagataatagagaagcactgtagattattgaacagaggaaatgtacgtaggtacacaggacaggctgatgatatgacattccttcaaaccagtattatttaactattcgtgtaacatttatgtagaggagagactgagcaagacatagggaacagatgaggagaactactggtggctgtttttgacctctctttattagacccaagcaaattgactcaatcttgaaaactccactcagtagaagaagattcctatagttgattgtacttaccctccttcagggcagtttagccaacacccttgtgggagggtggctcatcctccccctgacttatgtggtttatccaagtattccctctataaacatttgcggaggaattctaaaataaatatcctttatctcactatcttttcagtgaagcttcagcccccttttatagatgggcatcttaggccaccaccccactgtgccccccagccctaagctggttctgaggatattcatcattttattcattcatgagcatttgctatatgcaagtaatgatccaggtgctggggttactgcagtgaacaaagtccctttgctcctggaacttaaccttcaagtgggagaagaaagtcaggaatcaaacaaatatacatcagatgatgcaaatgtgaagaaactaagtaggttagaaggatagagagtggtgggtgaagatggaaggtaacattggaagagacacttaaaagaagtgaagggttaagccatgtggccgtctagtgtaagagtgtttaaggcagaggaaatagcaaatgcgatgactgtgagaagggggcatgcttgggacattcatggaaaataaatgggtctaaaagactacatattgggtacactgcttaggtgatggttgcaccaaaatctcagaaatgaccactagagaacttattcatgtaaccaaacaccacctgttccccaaaaacctattgaaataaaaattaaataaaaataaattggtctatggctggagcagagtgagtgaagggggaggagtgtttggaaaggaggtcagagaggtggcaggcagtgctgtagtaaagtcatctgtcattggtctacattaagcaacattctaatcttgggtctgcatgttctcacacactgtttactccaaaactttagtctgattaccacacagaaggatttatttgtctcaagaaatttggaccaaagagcaaaatagcatatccaagttctgggtatagactgctgtgaaaaattaacttatatgcatttattgactattgtttatgacgtaaacaaagctgctcttcttctataataagaagagttggtaatattgtacctttattttccaccgtcaatattattataaaataaaagagctgaatatataatatactgccgagagggtaatgagcaggattcaatcacacatttaaatraatttttaagaaatctgaaccatgtccaagttcttccatctaagcatcacttaagaatctgtttgttcagttgagtttcatctctgcagctgccaagacacttcagttctgccagctcgactctctgattgcaaaataaagggtggtcagttaacagtggatgtgaagaataagaatgttctgtgaaaagaatgacattatgagaaaccctgataatggaaaactggaggcttccctcttgtgccccccttagcctgaaggcagttaaatgggagggtattctcaccttccccgaatctcagcagcctttgacggggtatgtgtgcttttggaagatggatgcactttgctgcagcttacattcataaatatttttgtagtataataggttgtcaaaacaaatctgtgttttccatttgtgtgtgcgtgagtgtgtcagtatgcctcttcatctttttgtccatctagaggtagagcacaaatagtttactttcctcattgtggatttttcattacagtatagagttttgcagaagtgagtcatgaggaataggtaaataaatgaccatataatcggtgggaacagtttgtgtatctttgttttagcagttccatgtctttgctggaaatctgtggttctttttaagcattatttgatggaaaatcttatctgaagcttggcagtaactatatcattgagctggggagggaaggcaaggtggtcttgttgacaacacagtcgtgcctgtggaaatgcagcattgtgttcagaggacaggcaccaagtttcatacaacttcatcacttgttagctgtgtgaccttaagtgatctgcttaacttctctgagactccattttttattttgtaaaatgaggaaaacaatgcttacatcctggagtggttgtgagaattacatgaggtaatataagtatagtgcttagtgtagtgcctgcacctgctaaatgctctataaatggtatccatttttactatcatttttctttggcttatttcattctgatggcacagcatgtagacttggcataaagcagcagtctttccggtgcatggaaatgtagttccttagaggctagcacatcaaaccctgaaactcagtgtatatcctccttcaaatttttcacaatatttttctctcttcaaggaaacctggacaaaacattttgctgcttgctgcctgaattgaccagcaattctagtttccaaggagattgtaaatggatgtatttgtgtatgctgatttgcctcaactttagaagaaatcctcagggtattcttcaaaagagacagaacataatggaaatgcttttattttttcataagccgtggaaaattgtgtgtgtatgtgtgtgaatccttagtgatctaaaagttacttagaagtggtcaggcaaatggaaagatttgctaatgaaagatttatctccccatgactgcaattttatatgtcctttcagattaatttatctgggtctttttctatttagaaaggcatttagtgtaatttggaattgtaattaggatattctataccatctgcagtgctcgatgtaattctctagcttcactatggttacatcacaaaggaggctggagctgaagtctgcttttttactctagaaaacccaacagcactcacacaatgtctatccttgataggtattcaatactggttaactgataataaagttttactcctggtacaggttccattagggcttgtggtgaaaaattgcacattaatatcttaaaaattatggattgatggacagaggatgccactttcaaaggctcttggttctaattctagatagcccatatgacattgacccaggcctctcttagtctctctgttttcattcagtcaattgtcagatgggataataaaactgatgtagcttctagtattttaaggagagttattgctgttatttttttgcatatctaaatgttgaaaattttgatttagaggtcaatatcattcttttcacagaacacttttatttttcacatccactattaaatggccaccctttattttgcaatcagaaagttgaactggcagaatttaagtgccttgggtccaggcttgtttgatggattgattcattcattcatcactcatcatgtattcgtgcagcactgagtggcacagtgtggtgtaa
